United States Patent Application Publication US 2007/0214517 A1 - sequence listing, part 55

SEQ ID NO: 73609 - protein, 919 aa, Arabidopsis thaliana
  peptide (1)..(919): Ceres Seq. ID no. 4972449
  misc_feature (774)..(902): Pfam Name: Sodium/calcium exchanger protein Pfam Description: Sodium/calcium exchanger protein
  misc_feature (1)..(402): Homolog of NCBI NO: 26449859 NR Description: unknown protein [Arabidopsis thaliana]
  misc_feature (582)..(906): Homolog of NCBI NO: 26449859 NR Description: unknown protein [Arabidopsis thaliana]
  misc_feature (399)..(592): Homolog of NCBI NO: 26449859 NR Description: unknown protein [Arabidopsis thaliana]
  misc_feature (123)..(361): Homolog of NCBI NO: 15226193 NR Description: unknown protein; protein id: At2g34030.1
  misc_feature (1)..(35): Homolog of NCBI NO: 15226193 NR Description: unknown protein; protein id: At2g34030.1
  misc_feature (123)..(374): Homolog of NCBI NO: 15226191 NR Description: unknown protein; protein id: At2g34020.1
  misc_feature (1)..(35): Homolog of NCBI NO: 15226191 NR Description: unknown protein; protein id: At2g34020.1
  misc_feature (597)..(838): Homolog of NCBI NO: 15226193 NR Description: unknown protein; protein id: At2g34030.1
  misc_feature (568)..(593): Homolog of NCBI NO: 26449859 NR Description: unknown protein [Arabidopsis thaliana]
  misc_feature (399)..(831): Homolog of NCBI NO: 15226191 NR Description: unknown protein; protein id: At2g34020.1
MTGNNVAVTVGYSVFALTMQWGACVVFGLSGLRSDDQSITCDISSPRRQVKKSINLLKNLAGASIRADPKNKKAAGIMLLTLLPFVLVTFSETFHIKSWDDNMVLVTLIFSGSATVLYFVYLYFDKADQVKSLEYAKFELMSEVHKHLQNFSPQSLIRNGQLCQESLKSLFKKFDVNKDGKIQVSELKDLTVDFGVLGRVKCDINELATTLLADFDSNRDGEIDETEFAIGIEKWLKQYKFSFNGTESQGEDIAEDDGVLKVEQLLKGCLFTKLLTKRTLKAVIEVIIGITIVSFLAMPFMMNIELLSVSAGVPSFYVVFAVIPLARNLKNALSAHFCRKKEKAKITSDTFSEIYRDVTLNNLLGITIILAIVYIRGLTWDYSTEVLIIVIVGLIIALISVVNCRVLSSLSEKDSILVSDGVQDGSSYEFLSLDPPNDITKNMCVHVYDFLPCADNVAGYVFQVFSFGCILIIGEYFLTKGRTKLFLIFEVGFYGGIIFPLLTMFPRIALILSTGLVGSREMASSRVGNIIGVTVGYSVFALTIQWGACILFGLSGTKPEQPIDLSAASVEADITNKKSAGIMLLTILPFILVFFVKNSQYFDRDDQAKSLDHARFELMSEVHKHLQIFSPKSLIRDGQLNQESLKRLFQKIDANGDGKIQVAELKDLTVEFGMIGRVKCHIDKLVHTLVDDFDRDGDREIDEAEFEIGIKKWLNQYKFSFDTTVPPREDQAEGVPILKVEKPEQSLVKKLLSWRTLRASLEVILGMLVVIYLARPFMMNIQLLSESAGVPSFYVVFVVIPLARNLKNTLSAHFCRKKDKAKITSDTFSEIYKDVTMNNLMGISIILAIVYARELVWDYTTEVLIIVIVGLLIGLPAYVRTTYPFWICLLAFALYFISLVVVYFHFMSLEKGTTVTFNK

SEQ ID NO: 73610 - DNA, 3867 bp, Arabidopsis thaliana
  misc_feature (1)..(3867): Ceres Seq. ID no. 4972526
atgggttataccttgcaacagatactgaggagcatctgctccaacacggattggaactacgccgtgttctggaaacttaatcaccactcgccaatggttcttactttggaggatgtgtactgtgttaatcatgagcgcggtttgatgccggaaagcttgcatggagggcgccatgctcatgaccctcttgggttagctgtggctaagatgtcatatcatgttcacaacggttgggagagtcaaatttctgctggaattaagacaattcttatagtagctgttggttcttgcggagttgtgcagcttggctctttgtgtaaagttgaagaagacccggctttggtgactcatatcaggcatttatttttggcacttacggatccactagcagaccatgcatcaaatttaatgcaatgtgatattaacagtccatcggatcggccaaaaataccttccaaatgcttacatgaggcatcccctgatttctcaggagaatttgacaaagctatggatatggaagggttaaatattgtatctcaaaacacaagtaatagaagtaacgaccttccatacaatttcactccaacatattttcacatggagaggactgctcaagtaattggtgggcttgaagcagtccaaccttccatgtttggaagcaatgattgtgttacaagtggtttttcagttggtgtggttgatactaaacacaagaatcaagtggatataagtgatatgagtaaggtgatttatgatgaggaaacaggtggataccgatactcaagagaattagatcccaatttccaacactactcgaggaatcatgtgcgtaatagtggaggcacatctgctttagctatggagagtgataggctaaaagcaggttcatcatatccacaacttgattcaactgtacttactgcgttgaaaacagataaagattattctcgtcgaaatgaggttttccaaccatctgagagccaaggaagtatatttgtgaaagatacagaacataggcaggaggaaaaaagtgagtcaagtcagttggatgctttaactgcatctttgtgttctttttctggcagtgagctgttagaggcattagggccagcgttcagtaaaacaagcactgattatggggagctagcaaagtttgaatctgctgcagctataagacgaacaaatgatatgagccatagtcacctgacatttgaatccagctccgagaatcttctagatgccgttgttgctagtatgagtaatggtgatggtaatgtcaggcgtgaaatatcttcaagcaggtcaacacagtcattgcttacaactgctgaaatggcacaggcagaaccttttggtcataataagcaaaatattgttagcacagttgatagtgtgattagccagccgcctctagcagatgggcttatccaacagaatccatcaaatatctgcggagcattttcttccattgggttttcatcaacatgtctcagttcatccagcgaccagtttccgacgtccctggaaattcccaagaagaacaaaaagagagctaaacctggtgaaagttctcggcctcgtccaagggacaggcaacttattcaggatcgtatcaaagaactaagggagcttgtgcctaatggatctaagtgcagtattgattccttgctagagtgcacgatcaagcacatgctcttcctgcagagtgtctctcagcatgctgacaagctcactaaaagtgcaagttcaaagatgcaacacaaggataccggcaccctaggaatatcaagcactgaacaaggttcgagctgggcagtggagattggaggccatctgcaagtgtgctcaatcatggtggagaatctggacaaagaaggagtgatgcttattgagatgctatgcgaagaatgtagccactttctcgagatagcgaacgtgataaggagcttggaactcatcatcctcagaggcaccactgagaaacaaggcgagaaaacatggatatgttttgtagtggagggacaaaacaacaaagtaatgcacaggatggacatcctgtggtctcttgtgcaaatatttcaacccaaggctacaaacagtctgcatctttatcgacaatctcaaattctttacatgaatgctttcgccaatgtgcatagtcttcgggtaccttctcaccatcttcgagatttctcagcgtcactctctctggctcctccaaatttaaagaaaatcatcaagcaatgctcgacgcccaagcttctggagtctgctttagccgccatgatcaagacgagcctaaaccaagactgtcgcttaatgaaccaattcatcactgcctgcacttcctttaaacgtcttgacctcgcagtttccaccatgacccagatgcaggaacctaatgttttcgtctacaacgcgttgtttaaaggcttcgttacttgttctcacccgattcgatctctggaattgtatgttcgtatgctcagggactcggtttctccatcaagctacacgtactcttcactagtaaaggcgtcttctttcgcttctaggtttggggaatcactccaggcgcacatctggaaatttggatttggtttccatgttaaaattcagacgactcttattgatttttattcagccactggtagaatcagggaagccaggaaagtgtttgatgaaatgcctgaaagagatgatattgcttggaccacaatggtttctgcttatcgtcgggttttggatatggactctgcgaattctttagctaaccaaatgtcggagaagaatgaggctacgtcgaactgtttgattaatggatatatgggattaggcaatctggaacaagcagagtcattgtttaatcagatgcctgtgaaggacataatctcatggaccactatgatcaagggttactcgcagaataaaagatatagagaagcaattgcagtgttctacaaaatgatggaggagggcatcattcctgatgaggttactatgtcaactgttatttcagcttgtgcccatctcggcgtgctggaaataggtaaggaggttcatatgtacacgttacagaacggttttgttcttgatgtctacattggttctgcactggtagatatgtattccaaatgtggtagcttagagcgggcgcttctggtgttcttcaatttgcccaaaaagaatctattttgttggaattcgatcattgaaggactggcggctcatggttttgcacaagaagcactgaaaatgtttgccaagatggagatggagtcggtgaaacctaacgcagtcacttttgtgagtgtttttactgcgtgtactcacgcaggtcttgttgacgaaggtcggaggatatatcgcagcatgattgatgactattccattgtctctaatgttgaacattacggaggcatggttcatctattcagcaaagctgggttgatctatgaggctcttgaattgattggaaatatggaatttgaaccaaatgcggttatctggggggccttgcttgatgggtgcagaattcacaagaatctcgtgatagctgaaatagcgtttaacaaactgatggttttggagccgatgaatagtgggtattatttccttttagttagcatgtatgcagaacaaaacaggtggagagatgttgcagagattaggggaaggatgagagagttgggtatagaaaagatatgtcctgggacaagttcgattcggatagataaacgagaccatctgtttgctgcagctgataagtctcactcagcttcagatgaggtttgcttgctgcttgatgagatatatgatcagatgggattagctggatatgtgcaggaaactgagaatgtatattaa

SEQ ID NO: 73611 - protein, 1288 aa, Arabidopsis thaliana
  peptide (1)..(1288): Ceres Seq. ID no. 4972527
  misc_feature (1136)..(1170): Pfam Name: PPR repeat Pfam Description: PPR repeat
  misc_feature (29)..(697): Homolog of NCBI NO: 29649495 NR Description: hypothetical protein [Arabidopsis thaliana]
  misc_feature (29)..(697): Homolog of NCBI NO: 30684893 NR Description: expressed protein [Arabidopsis thaliana]
  misc_feature (1)..(76): Homolog of NCBI NO: 29649495 NR Description: hypothetical protein [Arabidopsis thaliana]
  misc_feature (1)..(76): Homolog of NCBI NO: 30684893 NR Description: expressed protein [Arabidopsis thaliana]
  misc_feature (71)..(697): Homolog of NCBI NO: 22651858 NR Description: hypothetical protein [Arabidopsis thaliana]
  misc_feature (1)..(76): Homolog of NCBI NO: 22651858 NR Description: hypothetical protein [Arabidopsis thaliana]
  misc_feature (147)..(693): Homolog of NCBI NO: 25408145 NR Description: hypothetical protein At2g31280 [imported] - thaliana >gi|4432823|gb|AAD20673.1| hypothetical protein
  misc_feature (6)..(107): Homolog of NCBI NO: 25408145 NR Description: hypothetical protein At2g31280 [imported] - thaliana >gi|4432823|gb|AAD20673.1| hypothetical protein
  misc_feature (775)..(1287): Homolog of NCBI NO: 15235498 NR Description: hypothetical protein; protein id: At4g02750.1
  misc_feature (875)..(1287): Homolog of NCBI NO: 15220337 NR Description: hypothetical protein; protein id: At1g11290.1
MGYTLQQILRSICSNTDWNYAVFWKLNHHSPMVLTLEDVYCVNHERGLMPESLHGGRHAHDPLGLAVAKMSYHVHNGWESQISAGIKTILIVAVGSCGVVQLGSLCKVEEDPALVTHIRHLFLALTDPLADHASNLMQCDINSPSDRPKIPSKCLHEASPDFSGEFDKAMDMEGLNIVSQNTSNRSNDLPYNFTPTYFHMERTAQVIGGLEAVQPSMFGSNDCVTSGFSVGVVDTKHKNQVDISDMSKVIYDEETGGYRYSRELDPNFQHYSRNHVRNSGGTSALAMESDRLKAGSSYPQLDSTVLTALKTDKDYSRRNEVFQPSESQGSIFVKDTEHRQEEKSESSQLDALTASLCSFSGSELLEALGPAFSKTSTDYGELAKFESAAAIRRTNDMSHSHLTFESSSENLLDAVVASMSNGDGNVRREISSSRSTQSLLTTAEMAQAEPFGHNKQNIVSTVDSVISQPPLADGLIQQNPSNICGAFSSIGFSSTCLSSSSDQFPTSLEIPKKNKKRAKPGESSRPRPRDRQLIQDRIKELRELVPNGSKCSIDSLLECTIKHMLFLQSVSQHADKLTKSASSKMQHKDTGTLGISSTEQGSSWAVEIGGHLQVCSIMVENLDKEGVMLIEMLCEECSHFLEIANVIRSLELIILRGTTEKQGEKTWICFVVEGQNNKVMHRMDILWSLVQIFQPKATNSLHLYRQSQILYMNAFANVHSLRVPSHHLRDFSASLSLAPPNLKKIIKQCSTPKLLESALAAMIKTSLNQDCRLMNQFITACTSFKRLDLAVSTMTQMQEPNVFVYNALFKGFVTCSHPIRSLELYVRMLRDSVSPSSYTYSSLVKASSFASRFGESLQAHIWKFGFGFHVKIQTTLIDFYSATGRIREARKVFDEMPERDDIAWTTMVSAYRRVLDMDSANSLANQMSEKNEATSNCLINGYMGLGNLEQAESLFNQMPVKDIISWTTMIKGYSQNKRYREAIAVFYKMMEEGIIPDEVTMSTVISACAHLGVLEIGKEVHMYTLQNGFVLDVYIGSALVDMYSKCGSLERALLVFFNLPKKNLFCWNSIIEGLAAHGFAQEALKMFAKMEMESVKPNAVTFVSVFTACTHAGLVDEGRRIYRSMIDDYSIVSNVEHYGGMVHLFSKAGLIYEALELIGNMEFEPNAVIWGALLDGCRIHKNLVIAEIAFNKLMVLEPMNSGYYFLLVSMYAEQNRWRDVAEIRGRMRELGIEKICPGTSSIRIDKRDHLFAAADKSHSASDEVCLLLDEIYDQMGLAGYVQETENVY

SEQ ID NO: 73612 - protein, 1257 aa, Arabidopsis thaliana
  peptide (1)..(1257): Ceres Seq. ID no. 4972528
  misc_feature (1105)..(1139): Pfam Name: PPR repeat Pfam Description: PPR repeat
  misc_feature (1)..(666): Homolog of NCBI NO: 29649495 NR Description: hypothetical protein [Arabidopsis thaliana]
  misc_feature (1)..(666): Homolog of NCBI NO: 30684893 NR Description: expressed protein [Arabidopsis thaliana]
  misc_feature (1)..(45): Homolog of NCBI NO: 29649495 NR Description: hypothetical protein [Arabidopsis thaliana]
  misc_feature (1)..(45): Homolog of NCBI NO: 30684893 NR Description: expressed protein [Arabidopsis thaliana]
  misc_feature (40)..(666): Homolog of NCBI NO: 22651858 NR Description: hypothetical protein [Arabidopsis thaliana]
  misc_feature (1)..(45): Homolog of NCBI NO: 22651858 NR Description: hypothetical protein [Arabidopsis thaliana]
  misc_feature (116)..(662): Homolog of NCBI NO: 25408145 NR Description: hypothetical protein At2g31280 [imported] - thaliana >gi|4432823|gb|AAD20673.1| hypothetical protein
  misc_feature (1)..(76): Homolog of NCBI NO: 25408145 NR Description: hypothetical protein At2g31280 [imported] - thaliana >gi|4432823|gb|AAD20673.1| hypothetical protein
  misc_feature (744)..(1256): Homolog of NCBI NO: 15235498 NR Description: hypothetical protein; protein id: At4g02750.1
  misc_feature (844)..(1256): Homolog of NCBI NO: 15220337 NR Description: hypothetical protein; protein id: At1g11290.1
MVLTLEDVYCVNHERGLMPESLHGGRHAHDPLGLAVAKMSYHVHNGWESQISAGIKTILIVAVGSCGVVQLGSLCKVEEDPALVTHIRHLFLALTDPLADHASNLMQCDINSPSDRPKIPSKCLHEASPDFSGEFDKAMDMEGLNIVSQNTSNRSNDLPYNFTPTYFHMERTAQVIGGLEAVQPSMFGSNDCVTSGFSVGVVDTKHKNQVDISDMSKVIYDEETGGYRYSRELDPNFQHYSRNHVRNSGGTSALAMESDRLKAGSSYPQLDSTVLTALKTDKDYSRRNEVFQPSESQGSIFVKDTEHRQEEKSESSQLDALTASLCSFSGSELLEALGPAFSKTSTDYGELAKFESAAAIRRTNDMSHSHLTFESSSENLLDAVVASMSNGDGNVRREISSSRSTQSLLTTAEMAQAEPFGHNKQNIVSTVDSVISQPPLADGLIQQNPSNICGAFSSIGFSSTCLSSSSDQFPTSLEIPKKNKKRAKPGESSRPRPRDRQLIQDRIKELRELVPNGSKCSIDSLLECTIKHMLFLQSVSQHADKLTKSASSKMQHKDTGTLGISSTEQGSSWAVEIGGHLQVCSIMVENLDKEGVMLIEMLCEECSHFLEIANVIRSLELIILRGTTEKQGEKTWICFVVEGQNNKVMHRMDILWSLVQIFQPKATNSLHLYRQSQILYMNAFANVHSLRVPSHHLRDFSASLSLAPPNLKKIIKQCSTPKLLESALAAMIKTSLNQDCRLMNQFITACTSFKRLDLAVSTMTQMQEPNVFVYNALFKGFVTCSHPIRSLELYVRMLRDSVSPSSYTYSSLVKASSFASRFGESLQAHIWKFGFGFHVKIQTTLIDFYSATGRIREARKVFDEMPERDDIAWTTMVSAYRRVLDMDSANSLANQMSEKNEATSNCLINGYMGLGNLEQAESLFNQMPVKDIISWTTMIKGYSQNKRYREAIAVFYKMMEEGIIPDEVTMSTVISACAHLGVLEIGKEVHMYTLQNGFVLDVYIGSALVDMYSKCGSLERALLVFFNLPKKNLFCWNSIIEGLAAHGFAQEALKMFAKMEMESVKPNAVTFVSVFTACTHAGLVDEGRRIYRSMIDDYSIVSNVEHYGGMVHLFSKAGLIYEALELIGNMEFEPNAVIWGALLDGCRIHKNLVIAEIAFNKLMVLEPMNSGYYFLLVSMYAEQNRWRDVAEIRGRMRELGIEKICPGTSSIRIDKRDHLFAAADKSHSASDEVCLLLDEIYDQMGLAGYVQETENVY

SEQ ID NO: 73613 - protein, 1240 aa, Arabidopsis thaliana
  peptide (1)..(1240): Ceres Seq. ID no. 4972529
  misc_feature (1088)..(1122): Pfam Name: PPR repeat Pfam Description: PPR repeat
  misc_feature (1)..(649): Homolog of NCBI NO: 29649495 NR Description: hypothetical protein [Arabidopsis thaliana]
  misc_feature (1)..(649): Homolog of NCBI NO: 30684893 NR Description: expressed protein [Arabidopsis thaliana]
  misc_feature (1)..(28): Homolog of NCBI NO: 29649495 NR Description: hypothetical protein [Arabidopsis thaliana]
  misc_feature (1)..(28): Homolog of NCBI NO: 30684893 NR Description: expressed protein [Arabidopsis thaliana]
  misc_feature (23)..(649): Homolog of NCBI NO: 22651858 NR Description: hypothetical protein [Arabidopsis thaliana]
  misc_feature (1)..(28): Homolog of NCBI NO: 22651858 NR Description: hypothetical protein [Arabidopsis thaliana]
  misc_feature (99)..(645): Homolog of NCBI NO: 25408145 NR Description: hypothetical protein At2g31280 [imported] - thaliana >gi|4432823|gb|AAD20673.1| hypothetical protein
  misc_feature (1)..(59): Homolog of NCBI NO: 25408145 NR Description: hypothetical protein At2g31280 [imported] - thaliana >gi|4432823|gb|AAD20673.1| hypothetical protein
  misc_feature (727)..(1239): Homolog of NCBI NO: 15235498 NR Description: hypothetical protein; protein id: At4g02750.1
  misc_feature (827)..(1239): Homolog of NCBI NO: 15220337 NR Description: hypothetical protein; protein id: At1g11290.1
MPESLHGGRHAHDPLGLAVAKMSYHVHNGWESQISAGIKTILIVAVGSCGVVQLGSLCKVEEDPALVTHIRHLFLALTDPLADHASNLMQCDINSPSDRPKIPSKCLHEASPDFSGEFDKAMDMEGLNIVSQNTSNRSNDLPYNFTPTYFHMERTAQVIGGLEAVQPSMFGSNDCVTSGFSVGVVDTKHKNQVDISDMSKVIYDEETGGYRYSRELDPNFQHYSRNHVRNSGGTSALAMESDRLKAGSSYPQLDSTVLTALKTDKDYSRRNEVFQPSESQGSIFVKDTEHRQEEKSESSQLDALTASLCSFSGSELLEALGPAFSKTSTDYGELAKFESAAAIRRTNDMSHSHLTFESSSENLLDAVVASMSNGDGNVRREISSSRSTQSLLTTAEMAQAEPFGHNKQNIVSTVDSVISQPPLADGLIQQNPSNICGAFSSIGFSSTCLSSSSDQFPTSLEIPKKNKKRAKPGESSRPRPRDRQLIQDRIKELRELVPNGSKCSIDSLLECTIKHMLFLQSVSQHADKLTKSASSKMQHKDTGTLGISSTEQGSSWAVEIGGHLQVCSIMVENLDKEGVMLIEMLCEECSHFLEIANVIRSLELIILRGTTEKQGEKTWICFVVEGQNNKVMHRMDILWSLVQIFQPKATNSLHLYRQSQILYMNAFANVHSLRVPSHHLRDFSASLSLAPPNLKKIIKQCSTPKLLESALAAMIKTSLNQDCRLMNQFITACTSFKRLDLAVSTMTQMQEPNVFVYNALFKGFVTCSHPIRSLELYVRMLRDSVSPSSYTYSSLVKASSFASRFGESLQAHIWKFGFGFHVKIQTTLIDFYSATGRIREARKVFDEMPERDDIAWTTMVSAYRRVLDMDSANSLANQMSEKNEATSNCLINGYMGLGNLEQAESLFNQMPVKDIISWTTMIKGYSQNKRYREAIAVFYKMMEEGIIPDEVTMSTVISACAHLGVLEIGKEVHMYTLQNGFVLDVYIGSALVDMYSKCGSLERALLVFFNLPKKNLFCWNSIIEGLAAHGFAQEALKMFAKMEMESVKPNAVTFVSVFTACTHAGLVDEGRRIYRSMIDDYSIVSNVEHYGGMVHLFSKAGLIYEALELIGNMEFEPNAVIWGALLDGCRIHKNLVIAEIAFNKLMVLEPMNSGYYFLLVSMYAEQNRWRDVAEIRGRMRELGIEKICPGTSSIRIDKRDHLFAAADKSHSASDEVCLLLDEIYDQMGLAGYVQETENVY

SEQ ID NO: 73614 - DNA, 1068 bp, Arabidopsis thaliana
  misc_feature (1)..(1068): Ceres Seq. ID no. 4972719
  misc_feature: MA Experiment ID: 20000496 Result: Up-regulated in Transcription
  misc_feature: MA Experiment 20000496 PARAMETER Experiment Name: At_Guard_Cells_P Parameter: Harvest Date Value: 7/19/2002
  misc_feature: MA Experiment 20000496 PARAMETER Experiment Name: At_Guard_Cells_P Parameter: Organism Value: Canola
  misc_feature: MA Experiment 20000496 PARAMETER Experiment Name: At_Guard_Cells_P Parameter: Tissue Value: Guard Cells vs. Leaves
  misc_feature: Pfam Name: Zip Pfam Description: ZIP Zinc transporter
atgactaaatctcatgtcattttctctgcctccatcgctctctttctcctactctccatctcgcatttcccgggagctctctctcaatccaataaagattgccaatcaaaatccaactactcatgtatagacaaaaacaaagcattagatctcaaactcttatcaatcttctcaattctcatcactagtctaatcggtgtttgcctcccgttctttgcccgatcaattcccgctttccaacccgagaaatctcacttcctcatcgtaaaatctttcgcctccggaatcatcctttccactggtttcatgcatgtcttgcctgattctttcgagatgctttcatctccttgtcttaacgataacccctggcacaagtttcctttcgccggctttgtagccatgatgtctgccgtgttcacgctcatggttgactctattaccaccagcgtcttcaccaagtcaggaaggaaagatctacgtgctgacgtagcatccgttgagactcctgaccaagagatagggcacgtacaggttcatggccatgttcatagccatactcttcctcacaatcttcatggagagaatgataaagagcttggttcttatttacagcttctgcggtatcgtattcttgcaatctcgatagtgataggactatcggtaggagacactaacaatacttgcaccatcaaaggactcgtcgctgcgctttgcttccatcaaatgttcgaaggcatgggtctcggcggttgcatccttcaggcggagtacgggtgggttaaaaaggcggtgatggctttcttttttgcggtgacgacgccttttggagtggttctagggatggcactatctaaaacatacaaagagaatagccctgaatcgcttataacagttgggttgctcaacgcttcctcggcaggactactcatctacatggctttagttgaccttctagctgccgattttatgggtcaaaaaatgcaaaggagcatcaagcttcaattaaagtcatatgctgccgttttgcttggtgctggtggcatgtccgtcatggccaagtgggcttga

SEQ ID NO: 73615 - protein, 355 aa, Arabidopsis thaliana
  peptide (1)..(355): Ceres Seq. ID no. 4972720
  misc_feature: Pfam Name: Zip Pfam Description: ZIP Zinc transporter
  misc_feature (1)..(355): Homolog of NCBI NO: 15221659 NR Description: iron-regulated transporter protein, putative; id: At1g31260.1 [Arabidopsis thaliana]
  misc_feature (2)..(355): Homolog of NCBI NO: 27549575 NR Description: root iron transporter protein IRT1 [Malus
  misc_feature (14)..(355): Homolog of NCBI NO: 4836773 NR Description: iron-regulated transporter 2 [Lycopersicon
  misc_feature (12)..(355): Homolog of NCBI NO: 4836771 NR Description: iron-regulated transporter 1 [Lycopersicon
  misc_feature (28)..(355): Homolog of NCBI NO: 7488829 NR Description: probable Fe(II) transport protein, root - garden >gi|3153889|gb|AAC17441.1| root iron transporter protein [Pisum
  misc_feature (12)..(355): Homolog of NCBI NO: 22328811 NR Description: Fe(II) transport protein; protein id: supported by cDNA: gi_1353265 [Arabidopsis thaliana]
  misc_feature (1)..(355): Homolog of NCBI NO: 40782191 NR Description: Fe(II) transport protein IRT1 [Arabidopsis
  misc_feature (1)..(355): Homolog of NCBI NO: 16304676 NR Description: putative Fe(II) transporter [Thlaspi caerulescens]
  misc_feature (14)..(355): Homolog of NCBI NO: 15235143 NR Description: putative Fe(II) transport protein; protein id: [Arabidopsis thaliana] >gi|7488125|pir||T04749 probable iron
  misc_feature (42)..(355): Homolog of NCBI NO: 40888850 NR Description: TPA: iron regulated transporter-like protein
MTKSHVIFSASIALFLLLSISHFPGALSQSNKDCQSKSNYSCIDKNKALDLKLLSIFSILITSLIGVCLPFFARSIPAFQPEKSHFLIVKSFASGIILSTGFMHVLPDSFEMLSSPCLNDNPWHKFPFAGFVAMMSAVFTLMVDSITTSVFTKSGRKDLRADVASVETPDQEIGHVQVHGHVHSHTLPHNLHGENDKELGSYLQLLRYRILAISIVIGLSVGDTNNTCTIKGLVAALCFHQMFEGMGLGGCILQAEYGWVKKAVMAFFFAVTTPFGVVLGMALSKTYKENSPESLITVGLLNASSAGLLIYMALVDLLAADFMGQKMQRSIKLQLKSYAAVLLGAGGMSVMAKWA

SEQ ID NO: 73616 - protein, 253 aa, Arabidopsis thaliana
  peptide (1)..(253): Ceres Seq. ID no. 4972721
  misc_feature: Pfam Name: Zip Pfam Description: ZIP Zinc transporter
  misc_feature (1)..(253): Homolog of NCBI NO: 15221659 NR Description: iron-regulated transporter protein, putative; id: At1g31260.1 [Arabidopsis thaliana]
  misc_feature (1)..(253): Homolog of NCBI NO: 27549575 NR Description: root iron transporter protein IRT1 [Malus
  misc_feature (1)..(253): Homolog of NCBI NO: 4836773 NR Description: iron-regulated transporter 2 [Lycopersicon
  misc_feature (1)..(253): Homolog of NCBI NO: 4836771 NR Description: iron-regulated transporter 1 [Lycopersicon
  misc_feature (1)..(253): Homolog of NCBI NO: 7488829 NR Description: probable Fe(II) transport protein, root - garden >gi|3153889|gb|AAC17441.1| root iron transporter protein [Pisum
  misc_feature (1)..(253): Homolog of NCBI NO: 22328811 NR Description: Fe(II) transport protein; protein id: supported by cDNA: gi_1353265 [Arabidopsis thaliana]
  misc_feature (1)..(253): Homolog of NCBI NO: 40782191 NR Description: Fe(II) transport protein IRT1 [Arabidopsis
  misc_feature (1)..(253): Homolog of NCBI NO: 16304676 NR Description: putative Fe(II) transporter [Thlaspi caerulescens]
  misc_feature (1)..(253): Homolog of NCBI NO: 15235143 NR Description: putative Fe(II) transport protein; protein id: [Arabidopsis thaliana] >gi|7488125|pir||T04749 probable iron
  misc_feature (1)..(253): Homolog of NCBI NO: 40888850 NR Description: TPA: iron regulated transporter-like protein
MHVLPDSFEMLSSPCLNDNPWHKFPFAGFVAMMSAVFTLMVDSITTSVFTKSGRKDLRADVASVETPDQEIGHVQVHGHVHSHTLPHNLHGENDKELGSYLQLLRYRILAISIVIGLSVGDTNNTCTIKGLVAALCFHQMFEGMGLGGCILQAEYGWVKKAVMAFFFAVTTPFGVVLGMALSKTYKENSPESLITVGLLNASSAGLLIYMALVDLLAADFMGQKMQRSIKLQLKSYAAVLLGAGGMSVMAKWA

SEQ ID NO: 73617 - protein, 244 aa, Arabidopsis thaliana
  peptide (1)..(244): Ceres Seq. ID no. 4972722
  misc_feature: Pfam Name: Zip Pfam Description: ZIP Zinc transporter
  misc_feature (1)..(244): Homolog of NCBI NO: 15221659 NR Description: iron-regulated transporter protein, putative; id: At1g31260.1 [Arabidopsis thaliana]
  misc_feature (1)..(244): Homolog of NCBI NO: 27549575 NR Description: root iron transporter protein IRT1 [Malus
  misc_feature (1)..(244): Homolog of NCBI NO: 4836773 NR Description: iron-regulated transporter 2 [Lycopersicon
  misc_feature (1)..(244): Homolog of NCBI NO: 4836771 NR Description: iron-regulated transporter 1 [Lycopersicon
  misc_feature (1)..(244): Homolog of NCBI NO: 7488829 NR Description: probable Fe(II) transport protein, root - garden >gi|3153889|gb|AAC17441.1| root iron transporter protein [Pisum
  misc_feature (1)..(244): Homolog of NCBI NO: 22328811 NR Description: Fe(II) transport protein; protein id: supported by cDNA: gi_1353265 [Arabidopsis thaliana]
  misc_feature (1)..(244): Homolog of NCBI NO: 40782191 NR Description: Fe(II) transport protein IRT1 [Arabidopsis
  misc_feature (1)..(244): Homolog of NCBI NO: 16304676 NR Description: putative Fe(II) transporter [Thlaspi caerulescens]
  misc_feature (1)..(244): Homolog of NCBI NO: 15235143 NR Description: putative Fe(II) transport protein; protein id: [Arabidopsis thaliana] >gi|7488125|pir||T04749 probable iron
  misc_feature (1)..(244): Homolog of NCBI NO: 40888850 NR Description: TPA: iron regulated transporter-like protein
MLSSPCLNDNPWHKFPFAGFVAMMSAVFTLMVDSITTSVFTKSGRKDLRADVASVETPDQEIGHVQVHGHVHSHTLPHNLHGENDKELGSYLQLLRYRILAISIVIGLSVGDTNNTCTIKGLVAALCFHQMFEGMGLGGCILQAEYGWVKKAVMAFFFAVTTPFGVVLGMALSKTYKENSPESLITVGLLNASSAGLLIYMALVDLLAADFMGQKMQRSIKLQLKSYAAVLLGAGGMSVMAKWA

SEQ ID NO: 73618 - DNA, 753 bp, Arabidopsis thaliana
  misc_feature (1)..(753): Ceres Seq. ID no. 4972785
  misc_feature: MA Experiment ID: 20000173 Result: Down-regulated in Transcription
  misc_feature: MA Experiment 20000173 PARAMETER Experiment Name: At_42deg_Heat_P Parameter: Age (day) Value: 14
  misc_feature: MA Experiment 20000173 PARAMETER Experiment Name: At_42deg_Heat_P Parameter: Organism Value: A. thaliana
  misc_feature: MA Experiment 20000173 PARAMETER Experiment Name: At_42deg_Heat_P Parameter: Plant Line Value: WS
  misc_feature: MA Experiment 20000173 PARAMETER Experiment Name: At_42deg_Heat_P Parameter: Temperature (deg C) Value: 42 vs. 22
  misc_feature: MA Experiment 20000173 PARAMETER Experiment Name: At_42deg_Heat_P Parameter: Timepoint (hr) Value: 6
  misc_feature: MA Experiment 20000173 PARAMETER Experiment Name: At_42deg_Heat_P Parameter: Tissue Value: Aerial
  misc_feature: MA Experiment ID: 20000234 Result: Down-regulated in Transcription
  misc_feature: MA Experiment 20000234 PARAMETER Experiment Name: At_Siliques_P Parameter: Age (day) Value: 21
  misc_feature: MA Experiment 20000234 PARAMETER Experiment Name: At_Siliques_P Parameter: Organism Value: A. thaliana
  misc_feature: MA Experiment 20000234 PARAMETER Experiment Name: At_Siliques_P Parameter: Plant Line Value: WS
  misc_feature: MA Experiment 20000234 PARAMETER Experiment Name: At_Siliques_P Parameter: Tissue Value: Less Than 5mm Siliques vs. Whole Plant
  misc_feature: MA Experiment ID: 20000264 Result: Down-regulated in Transcription
  misc_feature: MA Experiment 20000264 PARAMETER Experiment Name: At_Open_Flower_P Parameter: Age (day) Value: 21
  misc_feature: MA Experiment 20000264 PARAMETER Experiment Name: At_Open_Flower_P Parameter: Plant Line Value: WS
  misc_feature: MA Experiment 20000264 PARAMETER Experiment Name: At_Open_Flower_P Parameter: Tissue Value: Open Flower vs. Whole Plant
  misc_feature: MA Experiment ID: 20000265 Result: Down-regulated in Transcription
  misc_feature: MA Experiment 20000265 PARAMETER Experiment Name: At_Open_Flower_P Parameter: Age (day) Value: 21
  misc_feature: MA Experiment 20000265 PARAMETER Experiment Name: At_Open_Flower_P Parameter: Plant Line Value: WS
  misc_feature: MA Experiment 20000265 PARAMETER Experiment Name: At_Open_Flower_P Parameter: Tissue Value: Closed Flower vs. Whole Plant
  misc_feature: MA Experiment ID: 20000286 Result: Down-regulated in Transcription
  misc_feature: MA Experiment 20000286 PARAMETER Experiment Name: At_Open_Flower_P Parameter: Age (day) Value: 21
  misc_feature: MA Experiment 20000286 PARAMETER Experiment Name: At_Open_Flower_P Parameter: Plant Line Value: WS
  misc_feature: MA Experiment 20000286 PARAMETER Experiment Name: At_Open_Flower_P Parameter: Tissue Value: Half Open vs. Whole Plant
  misc_feature: MA Experiment ID: 20000495 Result: Down-regulated in Transcription
  misc_feature: MA Experiment 20000495 PARAMETER Experiment Name: At_Guard_Cells_P Parameter: Harvest Date Value: 8/2/2002
  misc_feature: MA Experiment 20000495 PARAMETER Experiment Name: At_Guard_Cells_P Parameter: Organism Value: A. thaliana
  misc_feature: MA Experiment 20000495 PARAMETER Experiment Name: At_Guard_Cells_P Parameter: Tissue Value: Guard Cells vs. Leaves
  misc_feature: MA Experiment ID: 20001556 Result: Down-regulated in Transcription
  misc_feature: MA Experiment 20001556 PARAMETER Experiment Name: At_Drought_Soil_Dry_P Parameter: Age (day) Value: 26
  misc_feature: MA Experiment 20001556 PARAMETER Experiment Name: At_Drought_Soil_Dry_P Parameter: Organism Value: A. thaliana
  misc_feature: MA Experiment 20001556 PARAMETER Experiment Name: At_Drought_Soil_Dry_P Parameter: Plant Line Value: WS
  misc_feature: MA Experiment 20001556 PARAMETER Experiment Name: At_Drought_Soil_Dry_P Parameter: Post Timepoint (hr) Value: None
  misc_feature: MA Experiment 20001556 PARAMETER Experiment Name: At_Drought_Soil_Dry_P Parameter: Post-Treatment Value: None
  misc_feature: MA Experiment 20001556 PARAMETER Experiment Name: At_Drought_Soil_Dry_P Parameter: Timepoint (day) Value: 12
  misc_feature: MA Experiment 20001556 PARAMETER Experiment Name: At_Drought_Soil_Dry_P Parameter: Treatment Value: Drought vs. No Drought
  misc_feature: MA Experiment ID: 20001558 Result: Down-regulated in Transcription
  misc_feature: MA Experiment 20001558 PARAMETER Experiment Name: At_Drought_Soil_Dry_P Parameter: Age (day) Value: 27
  misc_feature: MA Experiment 20001558 PARAMETER Experiment Name: At_Drought_Soil_Dry_P Parameter: Organism Value: A. thaliana
  misc_feature: MA Experiment 20001558 PARAMETER Experiment Name: At_Drought_Soil_Dry_P Parameter: Plant Line Value: WS
  misc_feature: MA Experiment 20001558 PARAMETER Experiment Name: At_Drought_Soil_Dry_P Parameter: Post Timepoint (hr) Value: 6
  misc_feature: MA Experiment 20001558 PARAMETER Experiment Name: At_Drought_Soil_Dry_P Parameter: Post-Treatment Value: Re-Water vs. No Drought
  misc_feature: MA Experiment 20001558 PARAMETER Experiment Name: At_Drought_Soil_Dry_P Parameter: Timepoint (day) Value: 13
  misc_feature: MA Experiment 20001558 PARAMETER Experiment Name: At_Drought_Soil_Dry_P Parameter: Treatment Value: Drought vs. No Drought
  misc_feature: MA Experiment ID: 20001560 Result: Down-regulated in Transcription
  misc_feature: MA Experiment 20001560 PARAMETER Experiment Name: At_Drought_Soil_Dry_P Parameter: Age (day) Value: 28
  misc_feature: MA Experiment 20001560 PARAMETER Experiment Name: At_Drought_Soil_Dry_P Parameter: Organism Value: A. thaliana
  misc_feature: MA Experiment 20001560 PARAMETER Experiment Name: At_Drought_Soil_Dry_P Parameter: Plant Line Value: WS
  misc_feature: MA Experiment 20001560 PARAMETER Experiment Name: At_Drought_Soil_Dry_P Parameter: Post Timepoint (hr) Value: None
  misc_feature: MA Experiment 20001560 PARAMETER Experiment Name: At_Drought_Soil_Dry_P Parameter: Post-Treatment Value: None
  misc_feature: MA Experiment 20001560 PARAMETER Experiment Name: At_Drought_Soil_Dry_P Parameter: Timepoint (day) Value: 14
  misc_feature: MA Experiment 20001560 PARAMETER Experiment Name: At_Drought_Soil_Dry_P Parameter: Treatment Value: Drought vs. No Drought
atgaatgttctgggggtttcatctttcaaggcttcttctattattccgtttcttcaagggtcgaaatggattaagaatccaccggtgattgatgacgtggataaaggaggaacagtttgtgatgatgatgatgataaggaatcgaggaatggaggaagtggatgggttaataagcttttgagtgtttgttctgaggatgctaaggctgctttcacggcggttactgtttctatcctttttagatcagctcttgcggagccaaagtcgattccttcaacgtctatgtaccctaccttggacaagggtgatcgcgttatggcggagaaggtctcatactttttcaggaagccagaggtttcagatatagtaatcttcaaggctcctccaattttgctggaatatccggaatatggctacagttccaatgatgtattcataaaaaggatagtggcaagtgaaggtgactgggttgaagttcgtgatgggaagctctttgtgaatgacattgtgcaagaagaagattttgtcttagaaccaatgtcatatgaaatggaaccaatgtttgtccccaaaggttatgtctttgtccttggtgataaccgcaacaaaagctttgactctcataactggggtccacttccaatagagaacatcgttggaagatctgtgttccggtactggccaccgagcaaagtatcagacaccatataccacgaccaagctatcacaaggggacctgttgcagtttcatga

SEQ ID NO: 73619 - protein, 250 aa, Arabidopsis thaliana
  peptide (1)..(250): Ceres Seq. ID no. 4972786
  misc_feature (56)..(220): Pfam Name: Signal peptidase I Pfam Description: Signal peptidase I
  misc_feature (1)..(250): Homolog of NCBI NO: 25408074 NR Description: probable signal peptidase I [imported] - thaliana >gi|1946373|gb|AAB63091.1| putative signal peptidase I
  misc_feature (1)..(250): Homolog of NCBI NO: 30684587 NR Description: signal peptidase I -related [Arabidopsis >gi|2769566|emb|CAA71502.1| chloroplast thylakoidal processing [Arabidopsis thaliana] >gi|22135950|gb|AAM91557.1| putative
  misc_feature (1)..(250): Homolog of NCBI NO: 15222236 NR Description: chloroplast thylakoidal processing peptidase, protein id: At1g06870.1, supported by cDNA: 15392. [Arabidopsis
  misc_feature (4)..(250): Homolog of NCBI NO: 21553622 NR Description: chloroplast thylakoidal processing peptidase,
  misc_feature (1)..(233): Homolog of NCBI NO: 31415933 NR Description: putative chloroplast thylakoidal processing
  misc_feature (21)..(236): Homolog of NCBI NO: 9294054 NR Description: contains similarity to signal peptidase (leader
  misc_feature (21)..(236): Homolog of NCBI NO: 30687572 NR Description: chloroplast thylakoidal processing peptidase
  misc_feature (21)..(236): Homolog of NCBI NO: 25082936 NR Description: chloroplast thylakoidal processing peptidase,
  misc_feature (50)..(228): Homolog of NCBI NO: 23042815 NR Description: hypothetical protein [Trichodesmium erythraeum
  misc_feature (65)..(231): Homolog of NCBI NO: 16329254 NR Description: leader peptidase I [Synechocystis sp. PCC 6803]
MNVLGVSSFKASSIIPFLQGSKWIKNPPVIDDVDKGGTVCDDDDDKESRNGGSGWVNKLLSVCSEDAKAAFTAVTVSILFRSALAEPKSIPSTSMYPTLDKGDRVMAEKVSYFFRKPEVSDIVIFKAPPILLEYPEYGYSSNDVFIKRIVASEGDWVEVRDGKLFVNDIVQEEDFVLEPMSYEMEPMFVPKGYVFVLGDNRNKSFDSHNWGPLPIENIVGRSVFRYWPPSKVSDTIYHDQAITRGPVAVS

SEQ ID NO: 73620 - protein, 156 aa, Arabidopsis thaliana
  peptide (1)..(156): Ceres Seq. ID no. 4972787
  misc_feature (1)..(126): Pfam Name: Signal peptidase I Pfam Description: Signal peptidase I
  misc_feature (1)..(156): Homolog of NCBI NO: 25408074 NR Description: probable signal peptidase I [imported] - thaliana >gi|1946373|gb|AAB63091.1| putative signal peptidase I
  misc_feature (1)..(156): Homolog of NCBI NO: 30684587 NR Description: signal peptidase I -related [Arabidopsis >gi|2769566|emb|CAA71502.1| chloroplast thylakoidal processing [Arabidopsis thaliana] >gi|22135950|gb|AAM91557.1| putative
  misc_feature (1)..(156): Homolog of NCBI NO: 15222236 NR Description: chloroplast thylakoidal processing peptidase, protein id: At1g06870.1, supported by cDNA: 15392. [Arabidopsis
  misc_feature (1)..(156): Homolog of NCBI NO: 21553622 NR Description: chloroplast thylakoidal processing peptidase,
  misc_feature (1)..(139): Homolog of NCBI NO: 31415933 NR Description: putative chloroplast thylakoidal processing
  misc_feature (1)..(142): Homolog of NCBI NO: 9294054 NR Description: contains similarity to signal peptidase (leader
  misc_feature (1)..(142): Homolog of NCBI NO: 30687572 NR Description: chloroplast thylakoidal processing peptidase
  misc_feature (1)..(142): Homolog of NCBI NO: 25082936 NR Description: chloroplast thylakoidal processing peptidase,
  misc_feature (1)..(134): Homolog of NCBI NO: 23042815 NR Description: hypothetical protein [Trichodesmium erythraeum
  misc_feature (1)..(137): Homolog of NCBI NO: 16329254 NR Description: leader peptidase I [Synechocystis sp. PCC 6803]
MYPTLDKGDRVMAEKVSYFFRKPEVSDIVIFKAPPILLEYPEYGYSSNDVFIKRIVASEGDWVEVRDGKLFVNDIVQEEDFVLEPMSYEMEPMFVPKGYVFVLGDNRNKSFDSHNWGPLPIENIVGRSVFRYWPPSKVSDTIYHDQAITRGPVAVS

SEQ ID NO: 73621 - protein, 145 aa, Arabidopsis thaliana
  peptide (1)..(145): Ceres Seq. ID no. 4972788
  misc_feature (1)..(115): Pfam Name: Signal peptidase I Pfam Description: Signal peptidase I
  misc_feature (1)..(145): Homolog of NCBI NO: 25408074 NR Description: probable signal peptidase I [imported] - thaliana >gi|1946373|gb|AAB63091.1| putative signal peptidase I
  misc_feature (1)..(145): Homolog of NCBI NO: 30684587 NR Description: signal peptidase I -related [Arabidopsis >gi|2769566|emb|CAA71502.1| chloroplast thylakoidal processing [Arabidopsis thaliana] >gi|22135950|gb|AAM91557.1| putative
  misc_feature (1)..(145): Homolog of NCBI NO: 15222236 NR Description: chloroplast thylakoidal processing peptidase, protein id: At1g06870.1, supported by cDNA: 15392. [Arabidopsis
  misc_feature (1)..(145): Homolog of NCBI NO: 21553622 NR Description: chloroplast thylakoidal processing peptidase,
  misc_feature (1)..(128): Homolog of NCBI NO: 31415933 NR Description: putative chloroplast thylakoidal processing
  misc_feature (1)..(131): Homolog of NCBI NO: 9294054 NR Description: contains similarity to signal peptidase (leader
  misc_feature (1)..(131): Homolog of NCBI NO: 30687572 NR Description: chloroplast thylakoidal processing peptidase
  misc_feature (1)..(131): Homolog of NCBI NO: 25082936 NR Description: chloroplast thylakoidal processing peptidase,
  misc_feature (1)..(123): Homolog of NCBI NO: 23042815 NR Description: hypothetical protein [Trichodesmium erythraeum
  misc_feature (1)..(126): Homolog of NCBI NO: 16329254 NR Description: leader peptidase I [Synechocystis sp. PCC 6803]
MAEKVSYFFRKPEVSDIVIFKAPPILLEYPEYGYSSNDVFIKRIVASEGDWVEVRDGKLFVNDIVQEEDFVLEPMSYEMEPMFVPKGYVFVLGDNRNKSFDSHNWGPLPIENIVGRSVFRYWPPSKVSDTIYHDQAITRGPVAVS

SEQ ID NO: 73622 - DNA, 906 bp, Arabidopsis thaliana
  misc_feature (1)..(906): Ceres Seq. ID no. 4972958
  misc_feature: MA Experiment ID: 20000179 Result: Up-regulated in Transcription
  misc_feature: MA Experiment 20000179 PARAMETER Experiment Name: At_Germinating_Seeds_P Parameter: Age (hr) Value: 6 vs. 0
  misc_feature: MA Experiment 20000179 PARAMETER Experiment Name: At_Germinating_Seeds_P Parameter: Tissue Value: Germinating Seeds
  misc_feature: MA Experiment ID: 20000180 Result: Up-regulated in Transcription
  misc_feature: MA Experiment 20000180 PARAMETER Experiment Name: At_Germinating_Seeds_P Parameter: Age (hr) Value: 24 vs. 0
  misc_feature: MA Experiment 20000180 PARAMETER Experiment Name: At_Germinating_Seeds_P Parameter: Tissue Value: Germinating Seeds
  misc_feature: MA Experiment ID: 20000234 Result: Up-regulated in Transcription
  misc_feature: MA Experiment 20000234 PARAMETER Experiment Name: At_Siliques_P Parameter: Age (day) Value: 21
  misc_feature: MA Experiment 20000234 PARAMETER Experiment Name: At_Siliques_P Parameter: Organism Value: A. thaliana
  misc_feature: MA Experiment 20000234 PARAMETER Experiment Name: At_Siliques_P Parameter: Plant Line Value: WS
  misc_feature: MA Experiment 20000234 PARAMETER Experiment Name: At_Siliques_P Parameter: Tissue Value: Less Than 5mm Siliques vs. Whole Plant
  misc_feature: MA Experiment ID: 20000264 Result: Up-regulated in Transcription
  misc_feature: MA Experiment 20000264 PARAMETER Experiment Name: At_Open_Flower_P Parameter: Age (day) Value: 21
  misc_feature: MA Experiment 20000264 PARAMETER Experiment Name: At_Open_Flower_P Parameter: Plant Line Value: WS
  misc_feature: MA Experiment 20000264 PARAMETER Experiment Name: At_Open_Flower_P Parameter: Tissue Value: Open Flower vs. Whole Plant
  misc_feature: MA Experiment ID: 20000265 Result: Up-regulated in Transcription
  misc_feature: MA Experiment 20000265 PARAMETER Experiment Name: At_Open_Flower_P Parameter: Age (day) Value: 21
  misc_feature: MA Experiment 20000265 PARAMETER Experiment Name: At_Open_Flower_P Parameter: Plant Line Value: WS
  misc_feature: MA Experiment 20000265 PARAMETER Experiment Name: At_Open_Flower_P Parameter: Tissue Value: Closed Flower vs. Whole Plant
  misc_feature: MA Experiment ID: 20000286 Result: Up-regulated in Transcription
  misc_feature: MA Experiment 20000286 PARAMETER Experiment Name: At_Open_Flower_P Parameter: Age (day) Value: 21
  misc_feature: MA Experiment 20000286 PARAMETER Experiment Name: At_Open_Flower_P Parameter: Plant Line Value: WS
  misc_feature: MA Experiment 20000286 PARAMETER Experiment Name: At_Open_Flower_P Parameter: Tissue Value: Half Open vs. Whole Plant
  misc_feature: MA Experiment ID: 20000495 Result: Up-regulated in Transcription
  misc_feature: MA Experiment 20000495 PARAMETER Experiment Name: At_Guard_Cells_P Parameter: Harvest Date Value: 8/2/2002
  misc_feature: MA Experiment 20000495 PARAMETER Experiment Name: At_Guard_Cells_P Parameter: Organism Value: A. thaliana
  misc_feature: MA Experiment 20000495 PARAMETER Experiment Name: At_Guard_Cells_P Parameter: Tissue Value: Guard Cells vs. Leaves
  misc_feature: MA Experiment ID: 20000794 Result: Down-regulated in Transcription
  misc_feature: MA Experiment 20000794 PARAMETER Experiment Name: At_Petals_P Parameter: Age (day) Value: 23-25 days
  misc_feature: MA Experiment 20000794 PARAMETER Experiment Name: At_Petals_P Parameter: Plant Line Value: WS
  misc_feature: MA Experiment 20000794 PARAMETER Experiment Name: At_Petals_P Parameter: Tissue Value: Petals vs. Whole plant
  misc_feature: MA Experiment ID: 20001911 Result: Down-regulated in Transcription
  misc_feature: MA Experiment 20001911 PARAMETER Experiment Name: At_Drought_Reproduction_P Parameter: Age (day) Value: 40
  misc_feature: MA Experiment 20001911 PARAMETER Experiment Name: At_Drought_Reproduction_P Parameter: Organism Value: A. thaliana
  misc_feature: MA Experiment 20001911 PARAMETER Experiment Name: At_Drought_Reproduction_P Parameter: Plant Line Value: WS
  misc_feature: MA Experiment 20001911 PARAMETER Experiment Name: At_Drought_Reproduction_P Parameter: Timepoint (day) Value: 10
  misc_feature: MA Experiment 20001911 PARAMETER Experiment Name: At_Drought_Reproduction_P Parameter: Tissue Value: Flowers
  misc_feature: MA Experiment 20001911 PARAMETER Experiment Name: At_Drought_Reproduction_P Parameter: Treatment Value: Drought vs. No Drought
atgttggaaacagaccttgaagctcggatgcaaatcctgcgtgagtctggttttcaagaaagccaaggagatgatgatacctttgctcaacgagctgaatggttttaccagggacgacctttgcttctctcactttgtctggacctgtacaacggctacgtcactctcttgggtcgttcttctcatcagaccagacttaaacccactacttctcttccgaaccagcttctccaagatgatgatgactgcatttcggacattgattccgttagtgaggtcagttctgaagttgagagcaccttatcctttcaacagatgaaagatcctactgcggtttctgagaaagtcgatgagcttgtatcccaacttgtgacagcaagcttggacaaagagattctgaaacacgagttacttcacaaggaccaacagtttcatgaagcctccaagactatagagctgttgaagaagtttgtcatgttgctggagatggagaaagaagtggctgtggaggaaaacgctaatcttggctacaaactcacttctctcttggaggagaacagagagctagccactgaggcattgttcatgaagaacgaagctgttgggcttgctaggtgtgtgcttaagatgagagatgaccactttcacaaggtctgcattctccagaaccgcatctactcgcttcaggcatctaggaactcagagcccgtctctgataaggtctcatacggatgctttggcctggataagcataagaccaaaaagaagaaggagaacaaaaccgaagagaagaagcctggattcaagtggttgaagaaactgaacaccattaacctgtttacaaagtgcagccttaacccatcggctgctgctccatcatgctgcactttcgacttgccttattag

SEQ ID NO: 73623 - protein, 301 aa, Arabidopsis thaliana; identical to SEQ ID NO: 70116
  peptide (1)..(301): Ceres Seq. ID no. 4972959
  misc_feature (4)..(301): Homolog of NCBI NO: 9294158 NR Description: contains similarity to unknown
  misc_feature (4)..(301): Homolog of NCBI NO: 30684631 NR Description: expressed protein [Arabidopsis thaliana]
  misc_feature (4)..(287): Homolog of NCBI NO: 22330107 NR Description: hypothetical protein; protein id: At1g48405.1
  misc_feature (4)..(147): Homolog of NCBI NO: 8778711 NR Description: T1N15.1 [Arabidopsis thaliana]
  misc_feature (5)..(230): Homolog of NCBI NO: 24431596 NR Description: Unknown protein [Oryza sativa (japonica

SEQ ID NO: 73624 - protein, 292 aa, Arabidopsis thaliana; identical to SEQ ID NO: 70117
  peptide (1)..(292): Ceres Seq. ID no. 4972960
  misc_feature (1)..(292): Homolog of NCBI NO: 9294158 NR Description: contains similarity to unknown
  misc_feature (1)..(292): Homolog of NCBI NO: 30684631 NR Description: expressed protein [Arabidopsis thaliana]
  misc_feature (1)..(278): Homolog of NCBI NO: 22330107 NR Description: hypothetical protein; protein id: At1g48405.1
  misc_feature (1)..(138): Homolog of NCBI NO: 8778711 NR Description: T1N15.1 [Arabidopsis thaliana]
  misc_feature (1)..(221): Homolog of NCBI NO: 24431596 NR Description: Unknown protein [Oryza sativa (japonica

SEQ ID NO: 73625 - protein, 196 aa, Arabidopsis thaliana
  peptide (1)..(196): Ceres Seq. ID no. 4972961
  misc_feature (1)..(196): Homolog of NCBI NO: 9294158 NR Description: contains similarity to unknown
  misc_feature (1)..(196): Homolog of NCBI NO: 30684631 NR Description: expressed protein [Arabidopsis thaliana]
  misc_feature (1)..(182): Homolog of NCBI NO: 22330107 NR Description: hypothetical protein; protein id: At1g48405.1
  misc_feature (1)..(42): Homolog of NCBI NO: 8778711 NR Description: T1N15.1 [Arabidopsis thaliana]
  misc_feature (1)..(125): Homolog of NCBI NO: 24431596 NR Description: Unknown protein [Oryza sativa (japonica
MKDPTAVSEKVDELVSQLVTASLDKEILKHELLHKDQQFHEASKTIELLKKFVMLLEMEKEVAVEENANLGYKLTSLLEENRELATEALFMKNEAVGLARCVLKMRDDHFHKVCILQNRIYSLQASRNSEPVSDKVSYGCFGLDKHKTKKKKENKTEEKKPGFKWLKKLNTINLFTKCSLNPSAAAPSCCTFDLPY

SEQ ID NO: 73626 - DNA, 1482 bp, Arabidopsis thaliana
  misc_feature (1)..(1482): Ceres Seq. ID no. 4972986
  misc_feature: MA Experiment ID: 20000182 Result: Down-regulated in Transcription
  misc_feature: MA Experiment 20000182 PARAMETER Experiment Name: At_2mM_SA_P Parameter: Age (day) Value: 14
  misc_feature: MA Experiment 20000182 PARAMETER Experiment Name: At_2mM_SA_P Parameter: Organism Value: A. thaliana
  misc_feature: MA Experiment 20000182 PARAMETER Experiment Name: At_2mM_SA_P Parameter: Plant Line Value: WS
  misc_feature: MA Experiment 20000182 PARAMETER Experiment Name: At_2mM_SA_P Parameter: Timepoint (hr) Value: 6
  misc_feature: MA Experiment 20000182 PARAMETER Experiment Name: At_2mM_SA_P Parameter: Tissue Value: Aerial
  misc_feature: MA Experiment 20000182 PARAMETER Experiment Name: At_2mM_SA_P Parameter: Treatment Value: 2mM SA vs. No Treatment
  misc_feature: MA Experiment ID: 20000265 Result: Up-regulated in Transcription
  misc_feature: MA Experiment 20000265 PARAMETER Experiment Name: At_Open_Flower_P Parameter: Age (day) Value: 21
  misc_feature: MA Experiment 20000265 PARAMETER Experiment Name: At_Open_Flower_P Parameter: Plant Line Value: WS
  misc_feature: MA Experiment 20000265 PARAMETER Experiment Name: At_Open_Flower_P Parameter: Tissue Value: Closed Flower vs. Whole Plant
  misc_feature: MA Experiment ID: 20000436 Result: Down-regulated in Transcription
  misc_feature: MA Experiment 20000436 PARAMETER Experiment Name: At_Drought_P Parameter: Age (day) Value: 7
  misc_feature: MA Experiment 20000436 PARAMETER Experiment Name: At_Drought_P Parameter: Organism Value: A. thaliana
  misc_feature: MA Experiment 20000436 PARAMETER Experiment Name: At_Drought_P Parameter: Plant Line Value: WS
  misc_feature: MA Experiment 20000436 PARAMETER Experiment Name: At_Drought_P Parameter: Timepoint (hr) Value: 12
  misc_feature: MA Experiment 20000436 PARAMETER Experiment Name: At_Drought_P Parameter: Tissue Value: Whole Plant
  misc_feature: MA Experiment 20000436 PARAMETER Experiment Name: At_Drought_P Parameter: Treatment Value: Drought vs. No Drought
  misc_feature: MA Experiment ID: 20000437 Result: Down-regulated in Transcription
  misc_feature: MA Experiment 20000437 PARAMETER Experiment Name: At_Drought_P Parameter: Age (day) Value: 8
  misc_feature: MA Experiment 20000437 PARAMETER Experiment Name: At_Drought_P Parameter: Organism Value: A. thaliana
  misc_feature: MA Experiment 20000437 PARAMETER Experiment Name: At_Drought_P Parameter: Plant Line Value: WS
  misc_feature: MA Experiment 20000437 PARAMETER Experiment Name: At_Drought_P Parameter: Timepoint (hr) Value: 24
  misc_feature: MA Experiment 20000437 PARAMETER Experiment Name: At_Drought_P Parameter: Tissue Value: Whole Plant
  misc_feature: MA Experiment 20000437 PARAMETER Experiment Name: At_Drought_P Parameter: Treatment Value: Drought vs. No Drought
  misc_feature: MA Experiment ID: 20000453 Result: Down-regulated in Transcription
  misc_feature: MA Experiment 20000453 PARAMETER Experiment Name: At_100uM_ABA_P Parameter: Age (day) Value: 15
  misc_feature: MA Experiment 20000453 PARAMETER Experiment Name: At_100uM_ABA_P Parameter: Organism Value: A. thaliana
  misc_feature: MA Experiment 20000453 PARAMETER Experiment Name: At_100uM_ABA_P Parameter: Plant Line Value: WS
  misc_feature: MA Experiment 20000453 PARAMETER Experiment Name: At_100uM_ABA_P Parameter: Timepoint (hr) Value: 24
  misc_feature: MA Experiment 20000453 PARAMETER Experiment Name: At_100uM_ABA_P Parameter: Tissue Value: Aerial
  misc_feature: MA Experiment 20000453 PARAMETER Experiment Name: At_100uM_ABA_P Parameter: Treatment Value: 100uM ABA vs. No Treatment
  misc_feature: MA Experiment ID: 20001451 Result: Down-regulated in Transcription
  misc_feature: MA Experiment 20001451 PARAMETER Experiment Name: At_Far-red-induction_P Parameter: Age (day) Value: 7
  misc_feature: MA Experiment 20001451 PARAMETER Experiment Name: At_Far-red-induction_P Parameter: Light Value: Far-red vs. White
  misc_feature: MA Experiment 20001451 PARAMETER Experiment Name: At_Far-red-induction_P Parameter: Organism Value: A. thaliana
  misc_feature: MA Experiment 20001451 PARAMETER Experiment Name: At_Far-red-induction_P Parameter: Plant Line Value: Columbia
  misc_feature: MA Experiment 20001451 PARAMETER Experiment Name: At_Far-red-induction_P Parameter: Timepoint (hr) Value: 24
  misc_feature: MA Experiment 20001451 PARAMETER Experiment Name: At_Far-red-induction_P Parameter: Tissue Value: Whole Plant
  misc_feature: MA Experiment ID: 20001556 Result: Up-regulated in Transcription
  misc_feature: MA Experiment 20001556 PARAMETER Experiment Name: At_Drought_Soil_Dry_P Parameter: Age (day) Value: 26
  misc_feature: MA Experiment 20001556 PARAMETER Experiment Name: At_Drought_Soil_Dry_P Parameter: Organism Value: A. thaliana
  misc_feature: MA Experiment 20001556 PARAMETER Experiment Name: At_Drought_Soil_Dry_P Parameter: Plant Line Value: WS
  misc_feature: MA Experiment 20001556 PARAMETER Experiment Name: At_Drought_Soil_Dry_P Parameter: Post Timepoint (hr) Value: None
  misc_feature: MA Experiment 20001556 PARAMETER Experiment Name: At_Drought_Soil_Dry_P Parameter: Post-Treatment Value: None
  misc_feature: MA Experiment 20001556 PARAMETER Experiment Name: At_Drought_Soil_Dry_P Parameter: Timepoint (day) Value: 12
  misc_feature: MA Experiment 20001556 PARAMETER Experiment Name: At_Drought_Soil_Dry_P Parameter: Treatment Value: Drought vs. No Drought
  misc_feature: MA Experiment ID: 20001558 Result: Up-regulated in Transcription
  misc_feature: MA Experiment 20001558 PARAMETER Experiment Name: At_Drought_Soil_Dry_P Parameter: Age (day) Value: 27
  misc_feature: MA Experiment 20001558 PARAMETER Experiment Name: At_Drought_Soil_Dry_P Parameter: Organism Value: A. thaliana
  misc_feature: MA Experiment 20001558 PARAMETER Experiment Name: At_Drought_Soil_Dry_P Parameter: Plant Line Value: WS
  misc_feature: MA Experiment 20001558 PARAMETER Experiment Name: At_Drought_Soil_Dry_P Parameter: Post Timepoint (hr) Value: 6
  misc_feature: MA Experiment 20001558 PARAMETER Experiment Name: At_Drought_Soil_Dry_P Parameter: Post-Treatment Value: Re-Water vs. No Drought
  misc_feature: MA Experiment 20001558 PARAMETER Experiment Name: At_Drought_Soil_Dry_P Parameter: Timepoint (day) Value: 13
  misc_feature: MA Experiment 20001558 PARAMETER Experiment Name: At_Drought_Soil_Dry_P Parameter: Treatment Value: Drought vs. No Drought
  misc_feature: MA Experiment ID: 20001560 Result: Up-regulated in Transcription
  misc_feature: MA Experiment 20001560 PARAMETER Experiment Name: At_Drought_Soil_Dry_P Parameter: Age (day) Value: 28
  misc_feature: MA Experiment 20001560 PARAMETER Experiment Name: At_Drought_Soil_Dry_P Parameter: Organism Value: A. thaliana
  misc_feature: MA Experiment 20001560 PARAMETER Experiment Name: At_Drought_Soil_Dry_P Parameter: Plant Line Value: WS
  misc_feature: MA Experiment 20001560 PARAMETER Experiment Name: At_Drought_Soil_Dry_P Parameter: Post Timepoint (hr) Value: None
  misc_feature: MA Experiment 20001560 PARAMETER Experiment Name: At_Drought_Soil_Dry_P Parameter: Post-Treatment Value: None
  misc_feature: MA Experiment 20001560 PARAMETER Experiment Name: At_Drought_Soil_Dry_P Parameter: Timepoint (day) Value: 14
  misc_feature: MA Experiment 20001560 PARAMETER Experiment Name: At_Drought_Soil_Dry_P Parameter: Treatment Value: Drought vs. No Drought
  misc_feature: MA Experiment ID: 20001757 Result: Up-regulated in Transcription
  misc_feature: MA Experiment 20001757 PARAMETER Experiment Name: At_50mM_NH4NO3_L-to-H_P Parameter: Timepoint (hr) Value: 6
  misc_feature: MA Experiment 20001757 PARAMETER Experiment Name: At_50mM_NH4NO3_L-to-H_P Parameter: Tissue Value: Leaf
  misc_feature: MA Experiment 20001757 PARAMETER Experiment Name: At_50mM_NH4NO3_L-to-H_P Parameter: Treatment Value: 50mM NH4NO3 vs 100mM Mannitol
atggctgcaatggctcgctgtgctttgattccatctataaacccagctcatagcttccgtcatcagtttccgcaacccaatgcgtcattctatttacctcccactcttccgattttttcgcgtgttcggagatttggaatttccggcggatatcgccgccgtgtgatcaccatggccgccggaactgatcactactcgactttgaatgtgaaccgcaatgccaccttgcaggagatcaagagctcgtatagaaaactcgctcgcaagtatcacccagatatgaacaagaaccctggtgcagaagataagttcaaacagataagtgctgcttacgaggtattatctgatgaggagaagagatctgcctatgatcggttcggcgaggctggtttagaaggtgattttaatggatcacaggatacttcaccaggggtggatccatttgacttgtacagtgcattctttggaggttctgatggattctttgggggaatgggtgaatcaggagggatgggttttgatttcatgaataagagaagcctagaccttgacattcgatatgacctgcggttgagctttgaagaggcagtttttggagtaaaacgggagattgaggtttcttatttagaaacatgtgatggttgtggaggaactggtgctaaatccagtaactccattaaacagtgtagtagttgtgatggtaaaggacgtgtgatgaattctcagagaacaccctttggaatcatgtctcaggtgtccacttgctccaaatgtggtggtgaaggaaaaactatcactgataagtgtcgaaagtgcattggcaacgggagactacgggctaggaaaaagatggatgttgtagtccctcctggtgtcagcgatagagccacaatgcgaattcaaggagaaggtaacatggacaagagaagtggaagagctggtgacttgttcatcgtacttcaagttgatgagaagcgtggaattcggcgggaagggcttaatttatactccaatatcaacatagatttcacagatgctatacttggggcgaccacaaaggtagaaacggttgagggatcaatggatcttcggattccgccaggaactcaacctggcgacaccgtaaaattacctaggaaaggagttccagacacggatagaccttcaatccggggagaccattgctttgtagtgaaaatttcgatccccaaaaaactgagggagcgcaagttggtagaggaattctcgtcgctcagaagatctagtagtagtactggacctactgagcccagaaaagaaccatctttgtggcataaaatgaagaatttcataagaagattcaagaacgaaatttgggactatgagcttaaacccatcattaccattacgaagaatgaaagtgtcagagacttcaattgctttttcagtcttggctctgtgcgttataacctcggctgttgcattggtacagaagaagggtaa

SEQ ID NO: 73627 - protein, 493 aa, Arabidopsis thaliana
  peptide (1)..(493): Ceres Seq. ID no. 4972987
  misc_feature (296)..(416): Pfam Name: DnaJ C terminal region Pfam Description: DnaJ C terminal region
  misc_feature (1)..(493): Homolog of NCBI NO: 15229531 NR Description: DnaJ, putative; protein id: At3g17830.1
  misc_feature (1)..(428): Homolog of NCBI NO: 9294487 NR Description: DnaJ homolog [Arabidopsis thaliana]
  misc_feature (53)..(458): Homolog of NCBI NO: 18412605 NR Description: DnaJ protein, putative; protein id: At1g80030.1,
  misc_feature (53)..(458): Homolog of NCBI NO: 14326568 NR Description: At1g80030/F18B13_37 [Arabidopsis thaliana]
  misc_feature (52)..(439): Homolog of NCBI NO: 7441921 NR Description: heat shock protein dnaJ - garden pea
  misc_feature (53)..(458): Homolog of NCBI NO: 25296044 NR Description: hypothetical protein F18B13.12 [imported] - thaliana >gi|5902381|gb|AAD55483.1|AC009322_23 Similar to DNAJ
  misc_feature (28)..(421): Homolog of NCBI NO: 18420568 NR Description: DnaJ - like protein; protein id: At4g39960.1, by cDNA: gi_15450580, supported by cDNA: gi_17380627 [Arabidopsis >gi|15450581|gb|AAK96562.1| AT4g39960/T5J17_130 [Arabidopsis
  misc_feature (57)..(421): Homolog of NCBI NO: 7441920 NR Description: heat shock protein T5J17.130, dnaJ-type -
  misc_feature (57)..(425): Homolog of NCBI NO: 30794072 NR Description: putative DnaJ protein [Arabidopsis thaliana]
  misc_feature (57)..(424): Homolog of NCBI NO: 18399949 NR Description: putative DnaJ protein; protein id: At2g22360.1, by cDNA: 10312. [Arabidopsis thaliana]
MAAMARCALIPSINPAHSFRHQFPQPNASFYLPPTLPIFSRVRRFGISGGYRRRVITMAAGTDHYSTLNVNRNATLQEIKSSYRKLARKYHPDMNKNPGAEDKFKQISAAYEVLSDEEKRSAYDRFGEAGLEGDFNGSQDTSPGVDPFDLYSAFFGGSDGFFGGMGESGGMGFDFMNKRSLDLDIRYDLRLSFEEAVFGVKREIEVSYLETCDGCGGTGAKSSNSIKQCSSCDGKGRVMNSQRTPFGIMSQVSTCSKCGGEGKTITDKCRKCIGNGRLRARKKMDVVVPPGVSDRATMRIQGEGNMDKRSGRAGDLFIVLQVDEKRGIRREGLNLYSNINIDFTDAILGATTKVETVEGSMDLRIPPGTQPGDTVKLPRKGVPDTDRPSIRGDHCFVVKISIPKKLRERKLVEEFSSLRRSSSSTGPTEPRKEPSLWHKMKNFIRRFKNEIWDYELKPIITITKNESVRDFNCFFSLGSVRYNLGCCIGTEEG

SEQ ID NO: 73628 - protein, 490 aa, Arabidopsis thaliana
  peptide (1)..(490): Ceres Seq. ID no. 4972988
  misc_feature (293)..(413): Pfam Name: DnaJ C terminal region Pfam Description: DnaJ C terminal region
  misc_feature (1)..(490): Homolog of NCBI NO: 15229531 NR Description: DnaJ, putative; protein id: At3g17830.1
  misc_feature (1)..(425): Homolog of NCBI NO: 9294487 NR Description: DnaJ homolog [Arabidopsis thaliana]
  misc_feature (50)..(455): Homolog of NCBI NO: 18412605 NR Description: DnaJ protein, putative; protein id: At1g80030.1,
  misc_feature (50)..(455): Homolog of NCBI NO: 14326568 NR Description: At1g80030/F18B13_37 [Arabidopsis thaliana]
  misc_feature (49)..(436): Homolog of NCBI NO: 7441921 NR Description: heat shock protein dnaJ - garden pea
  misc_feature (50)..(455): Homolog of NCBI NO: 25296044 NR Description: hypothetical protein F18B13.12 [imported] - thaliana >gi|5902381|gb|AAD55483.1|AC009322_23 Similar to DNAJ
  misc_feature (25)..(418): Homolog of NCBI NO: 18420568 NR Description: DnaJ - like protein; protein id: At4g39960.1, by cDNA: gi_15450580, supported by cDNA: gi_17380627 [Arabidopsis >gi|15450581|gb|AAK96562.1| AT4g39960/T5J17_130 [Arabidopsis
  misc_feature (54)..(418): Homolog of NCBI NO: 7441920 NR Description: heat shock protein T5J17.130, dnaJ-type -
  misc_feature (54)..(422): Homolog of NCBI NO: 30794072 NR Description: putative DnaJ protein [Arabidopsis thaliana]
  misc_feature (54)..(421): Homolog of NCBI NO: 18399949 NR Description: putative DnaJ protein; protein id: At2g22360.1, by cDNA: 10312. [Arabidopsis thaliana]
MARCALIPSINPAHSFRHQFPQPNASFYLPPTLPIFSRVRRFGISGGYRRRVITMAAGTDHYSTLNVNRNATLQEIKSSYRKLARKYHPDMNKNPGAEDKFKQISAAYEVLSDEEKRSAYDRFGEAGLEGDFNGSQDTSPGVDPFDLYSAFFGGSDGFFGGMGESGGMGFDFMNKRSLDLDIRYDLRLSFEEAVFGVKREIEVSYLETCDGCGGTGAKSSNSIKQCSSCDGKGRVMNSQRTPFGIMSQVSTCSKCGGEGKTITDKCRKCIGNGRLRARKKMDVVVPPGVSDRATMRIQGEGNMDKRSGRAGDLFIVLQVDEKRGIRREGLNLYSNINIDFTDAILGATTKVETVEGSMDLRIPPGTQPGDTVKLPRKGVPDTDRPSIRGDHCFVVKISIPKKLRERKLVEEFSSLRRSSSSTGPTEPRKEPSLWHKMKNFIRRFKNEIWDYELKPIITITKNESVRDFNCFFSLGSVRYNLGCCIGTEEG

SEQ ID NO: 73629 - protein, 436 aa, Arabidopsis thaliana
  peptide (1)..(436): Ceres Seq. ID no. 4972989
  misc_feature (239)..(359): Pfam Name: DnaJ C terminal region Pfam Description: DnaJ C terminal region
  misc_feature (1)..(436): Homolog of NCBI NO: 15229531 NR Description: DnaJ, putative; protein id: At3g17830.1
  misc_feature (1)..(371): Homolog of NCBI NO: 9294487 NR Description: DnaJ homolog [Arabidopsis thaliana]
  misc_feature (1)..(401): Homolog of NCBI NO: 18412605 NR Description: DnaJ protein, putative; protein id: At1g80030.1,
  misc_feature (1)..(401): Homolog of NCBI NO: 14326568 NR Description: At1g80030/F18B13_37 [Arabidopsis thaliana]
  misc_feature (1)..(382): Homolog of NCBI NO: 7441921 NR Description: heat shock protein dnaJ - garden pea
  misc_feature (1)..(401): Homolog of NCBI NO: 25296044 NR Description: hypothetical protein F18B13.12 [imported] - thaliana >gi|5902381|gb|AAD55483.1|AC009322_23 Similar to DNAJ
  misc_feature (1)..(364): Homolog of NCBI NO: 18420568 NR Description: DnaJ - like protein; protein id: At4g39960.1, by cDNA: gi_15450580, supported by cDNA: gi_17380627 [Arabidopsis >gi|15450581|gb|AAK96562.1| AT4g39960/T5J17_130 [Arabidopsis
  misc_feature (1)..(364): Homolog of NCBI NO: 7441920 NR Description: heat shock protein T5J17.130, dnaJ-type -
  misc_feature (1)..(368): Homolog of NCBI NO: 30794072 NR Description: putative DnaJ protein [Arabidopsis thaliana]
  misc_feature (1)..(367): Homolog of NCBI NO: 18399949 NR Description: putative DnaJ protein; protein id: At2g22360.1, by cDNA: 10312. [Arabidopsis thaliana]
MAAGTDHYSTLNVNRNATLQEIKSSYRKLARKYHPDMNKNPGAEDKFKQISAAYEVLSDEEKRSAYDRFGEAGLEGDFNGSQDTSPGVDPFDLYSAFFGGSDGFFGGMGESGGMGFDFMNKRSLDLDIRYDLRLSFEEAVFGVKREIEVSYLETCDGCGGTGAKSSNSIKQCSSCDGKGRVMNSQRTPFGIMSQVSTCSKCGGEGKTITDKCRKCIGNGRLRARKKMDVVVPPGVSDRATMRIQGEGNMDKRSGRAGDLFIVLQVDEKRGIRREGLNLYSNINIDFTDAILGATTKVETVEGSMDLRIPPGTQPGDTVKLPRKGVPDTDRPSIRGDHCFVVKISIPKKLRERKLVEEFSSLRRSSSSTGPTEPRKEPSLWHKMKNFIRRFKNEIWDYELKPIITITKNESVRDFNCFFSLGSVRYNLGCCIGTEEG

SEQ ID NO: 73630 - DNA, 2103 bp, Arabidopsis thaliana
  misc_feature (1)..(2103): Ceres Seq. ID no. 4973092
  misc_feature: MA Experiment ID: 20000173 Result: Up-regulated in Transcription
  misc_feature: MA Experiment 20000173 PARAMETER Experiment Name: At_42deg_Heat_P Parameter: Age (day) Value: 14
  misc_feature: MA Experiment 20000173 PARAMETER Experiment Name: At_42deg_Heat_P Parameter: Organism Value: A. thaliana
  misc_feature: MA Experiment 20000173 PARAMETER Experiment Name: At_42deg_Heat_P Parameter: Plant Line Value: WS
  misc_feature: MA Experiment 20000173 PARAMETER Experiment Name: At_42deg_Heat_P Parameter: Temperature (deg C) Value: 42 vs. 22
  misc_feature: MA Experiment 20000173 PARAMETER Experiment Name: At_42deg_Heat_P Parameter: Timepoint (hr) Value: 6
  misc_feature: MA Experiment 20000173 PARAMETER Experiment Name: At_42deg_Heat_P Parameter: Tissue Value: Aerial
  misc_feature: MA Experiment ID: 20000264 Result: Up-regulated in Transcription
  misc_feature: MA Experiment 20000264 PARAMETER Experiment Name: At_Open_Flower_P Parameter: Age (day) Value: 21
  misc_feature: MA Experiment 20000264 PARAMETER Experiment Name: At_Open_Flower_P Parameter: Plant Line Value: WS
  misc_feature: MA Experiment 20000264 PARAMETER Experiment Name: At_Open_Flower_P Parameter: Tissue Value: Open Flower vs. Whole Plant
  misc_feature: MA Experiment ID: 20000265 Result: Up-regulated in Transcription
  misc_feature: MA Experiment 20000265 PARAMETER Experiment Name: At_Open_Flower_P Parameter: Age (day) Value: 21
  misc_feature: MA Experiment 20000265 PARAMETER Experiment Name: At_Open_Flower_P Parameter: Plant Line Value: WS
  misc_feature: MA Experiment 20000265 PARAMETER Experiment Name: At_Open_Flower_P Parameter: Tissue Value: Closed Flower vs. Whole Plant
  misc_feature: MA Experiment ID: 20000286 Result: Up-regulated in Transcription
  misc_feature: MA Experiment 20000286 PARAMETER Experiment Name: At_Open_Flower_P Parameter: Age (day) Value: 21
  misc_feature: MA Experiment 20000286 PARAMETER Experiment Name: At_Open_Flower_P Parameter: Plant Line Value: WS
  misc_feature: MA Experiment 20000286 PARAMETER Experiment Name: At_Open_Flower_P Parameter: Tissue Value: Half Open vs. Whole Plant
  misc_feature: MA Experiment ID: 20000794 Result: Up-regulated in Transcription
  misc_feature: MA Experiment 20000794 PARAMETER Experiment Name: At_Petals_P Parameter: Age (day) Value: 23-25 days
  misc_feature: MA Experiment 20000794 PARAMETER Experiment Name: At_Petals_P Parameter: Plant Line Value: WS
  misc_feature: MA Experiment 20000794 PARAMETER Experiment Name: At_Petals_P Parameter: Tissue Value: Petals vs. Whole plant
  misc_feature: MA Experiment ID: 20001910 Result: Up-regulated in Transcription
  misc_feature: MA Experiment 20001910 PARAMETER Experiment Name: At_Drought_Reproduction_P Parameter: Age (day) Value: 37
  misc_feature: MA Experiment 20001910 PARAMETER Experiment Name: At_Drought_Reproduction_P Parameter: Organism Value: A. thaliana
  misc_feature: MA Experiment 20001910 PARAMETER Experiment Name: At_Drought_Reproduction_P Parameter: Plant Line Value: WS
  misc_feature: MA Experiment 20001910 PARAMETER Experiment Name: At_Drought_Reproduction_P Parameter: Timepoint (day) Value: 7
  misc_feature: MA Experiment 20001910 PARAMETER Experiment Name: At_Drought_Reproduction_P Parameter: Tissue Value: Flowers
  misc_feature: MA Experiment 20001910 PARAMETER Experiment Name: At_Drought_Reproduction_P Parameter: Treatment Value: Drought vs. No Drought
  misc_feature: MA Experiment ID: 20001911 Result: Up-regulated in Transcription
  misc_feature: MA Experiment 20001911 PARAMETER Experiment Name: At_Drought_Reproduction_P Parameter: Age (day) Value: 40
  misc_feature: MA Experiment 20001911 PARAMETER Experiment Name: At_Drought_Reproduction_P Parameter: Organism Value: A. thaliana
  misc_feature: MA Experiment 20001911 PARAMETER Experiment Name: At_Drought_Reproduction_P Parameter: Plant Line Value: WS
  misc_feature: MA Experiment 20001911 PARAMETER Experiment Name: At_Drought_Reproduction_P Parameter: Timepoint (day) Value: 10
  misc_feature: MA Experiment 20001911 PARAMETER Experiment Name: At_Drought_Reproduction_P Parameter: Tissue Value: Flowers
  misc_feature: MA Experiment 20001911 PARAMETER Experiment Name: At_Drought_Reproduction_P Parameter: Treatment Value: Drought vs. No Drought
atggcggaggggcaatccccggagaattcaccgccgtcccctacaccaccatctccgtcatcatccgacaatcaacaacaatcctctcctccgccttctgattcctcctctccttcaccaccagctcctcctccgcccgatgattcctcaaatggttcacctcaaccgccttcttcagactcacaatcaccaccatctccgcaaggaaacaataacaatgatggcaacaatggtaataacaacaatgacaacaacaacaacaacaatggtaataacaacaacgacaacaacaatgggaataacaaagacaacaacaacaatggcaataacaacaatggtaataacaacaatggaaatgacaacaatggcaataacaacaatgggaataacaatgacaacaacaaccaaaacaatggcggaggaagcaacaatcgttcacctccgcctccttccagaaactctgaccgtaactctccttccccaccaagagcgctggctcctcctagatcaagcggtggtggttccaactcctccggcaacaatgaaccaaacacggctgctatcgtaggaattgtggctggtgctggattgttgtttcttgttatgatattgttctgcgtctgttgctgtcgtaagaaaaaaaagaagcatcaaatgccctattatgcaggaaacggctacgccaccggcaaaggtgatcaataccaacagcagcaatacaataaccagagcgatcacgtaatgaatctgtctcagcagtatcctggatccaacgggaataataactggatgaattcaccgcctccaccaccaccaggaagctggcaaccatcgccgcctccaccaccaccgccagtctcaggcggtatgaatggaaacagtagcgactttagctcaaactactcaggaccacatggtccgtcggtaccaccacctcacccttcagtggctctaggtttcaacaagagcacattcacctacgacgagctagccgctgcaactcaaggcttctcccaatcaagattgttaggtcaaggcgggttcggatatgttcacaagggaatacttcccaatgggaaagagattgcggtgaagagtctgaaagcgggaagcgggcaaggagagcgcgagtttcaggctgaggttgacatcattagccgagttcatcatcggtttcttgtgtctcttgttggatattgtattgcaggaggacagaggatgttggtttatgagttcttacctaatgacacacttgagttccatctccatggtaaaagtggcaaggttcttgactggcctacaagactcaagattgctttgggatcagctaaaggacttgcttacttacatgaagactgtcatccgagaatcattcatagagacattaaagcttcaaacattcttcttgatgaatcctttgaggctaaggttgcagacttcgggttagcgaagctatctcaagacaatgttacgcatgtctccactcgtatcatgggaactttcgggtacttggctccagagtatgcgtcaagcgggaaactgacagaccgatcagatgttttctcctttggagtgatgcttcttgagctagttaccggacgcagacctgttgatctcactggtgaaatggaagacagtttggtcgattgggcaagacccatatgcttaaacgcagctcaggatggagattacagtgaactagttgatccacgtctcgaaaaccaatacgagcctcatgagatggcacaaatggttgcttgtgccgctgcagccgtcaggcactcagctagacgcaggcctaagatgagccagattgttcgggctctggagggagatgcaacgctagacgatctaagcgaaggagggaaagcgggacaaagctcattcctcgggaggggttcaagctcggactatgactcaagcacttacagtgcggatatgaagaagttcaggaaagtggcattggatagtcatgagtacggtgcaagcagcgagtacgggaacacgagcgaatacgggcttgacccgtcttcctcgagcagcgaggagattcgtagaggaggagctaacaacaacaaaaccactcctagccgagaccattga

SEQ ID NO: 73631 - protein, 700 aa, Arabidopsis thaliana
  peptide (1)..(700): Ceres Seq. ID no. 4973093
  misc_feature (337)..(536): Pfam Name: Protein kinase domain Pfam Description: Protein kinase domain
  misc_feature (1)..(698): Homolog of NCBI NO: 15222081 NR Description: hypothetical protein; protein id: At1g49270.1
  misc_feature (260)..(692): Homolog of NCBI NO: 30690042 NR Description: serine threonine protein kinase -related thaliana] >gi|26452004|dbj|BAC43092.1| putative serine/threonine kinase [Arabidopsis thaliana] >gi|29029022|gb|AAO64890.1|
  misc_feature (6)..(291): Homolog of NCBI NO: 30690042 NR Description: serine threonine protein kinase -related thaliana] >gi|26452004|dbj|BAC43092.1| putative serine/threonine kinase [Arabidopsis thaliana] >gi|29029022|gb|AAO64890.1|
  misc_feature (146)..(692): Homolog of NCBI NO: 7488206 NR Description: probable serine/threonine-specific protein kinase
  misc_feature (6)..(179): Homolog of NCBI NO: 7488206 NR Description: probable serine/threonine-specific protein kinase
  misc_feature (142)..(682): Homolog of NCBI NO: 13877617 NR Description: protein kinase-like protein [Arabidopsis thaliana]
  misc_feature (142)..(682): Homolog of NCBI NO: 15230130 NR Description: protein kinase, putative; protein id: supported by cDNA: 17909., supported by cDNA: gi_13877616,
  misc_feature (1)..(70): Homolog of NCBI NO: 13877617 NR Description: protein kinase-like protein [Arabidopsis thaliana]
  misc_feature (1)..(70): Homolog of NCBI NO: 15230130 NR Description: protein kinase, putative; protein id: supported by cDNA: 17909., supported by cDNA: gi_13877616,
  misc_feature (11)..(113): Homolog of NCBI NO: 13877617 NR Description: protein kinase-like protein [Arabidopsis thaliana]
MAEGQSPENSPPSPTPPSPSSSDNQQQSSPPPSDSSSPSPPAPPPPDDSSNGSPQPPSSDSQSPPSPQGNNNNDGNNGNNNNDNNNNNNGNNNNDNNNGNNKDNNNNGNNNNGNNNNGNDNNGNNNNGNNNDNNNQNNGGGSNNRSPPPPSRNSDRNSPSPPRALAPPRSSGGGSNSSGNNEPNTAAIVGIVAGAGLLFLVMILFCVCCCRKKKKKHQMPYYAGNGYATGKGDQYQQQQYNNQSDHVMNLSQQYPGSNGNNNWMNSPPPPPPGSWQPSPPPPPPPVSGGMNGNSSDFSSNYSGPHGPSVPPPHPSVALGFNKSTFTYDELAAATQGFSQSRLLGQGGFGYVHKGILPNGKEIAVKSLKAGSGQGEREFQAEVDIISRVHHRFLVSLVGYCIAGGQRMLVYEFLPNDTLEFHLHGKSGKVLDWPTRLKIALGSAKGLAYLHEDCHPRIIHRDIKASNILLDESFEAKVADFGLAKLSQDNVTHVSTRIMGTFGYLAPEYASSGKLTDRSDVFSFGVMLLELVTGRRPVDLTGEMEDSLVDWARPICLNAAQDGDYSELVDPRLENQYEPHEMAQMVACAAAAVRHSARRRPKMSQIVRALEGDATLDDLSEGGKAGQSSFLGRGSSSDYDSSTYSADMKKFRKVALDSHEYGASSEYGNTSEYGLDPSSSSSEEIRRGGANNNKTTPSRDH

SEQ ID NO: 73632 - protein, 499 aa, Arabidopsis thaliana
  peptide (1)..(499): Ceres Seq. ID no. 4973094
  misc_feature (136)..(335): Pfam Name: Protein kinase domain Pfam Description: Protein kinase domain
  misc_feature (1)..(497): Homolog of NCBI NO: 15222081 NR Description: hypothetical protein; protein id: At1g49270.1
  misc_feature (59)..(491): Homolog of NCBI NO: 30690042 NR Description: serine threonine protein kinase -related thaliana] >gi|26452004|dbj|BAC43092.1| putative serine/threonine kinase [Arabidopsis thaliana] >gi|29029022|gb|AAO64890.1|
  misc_feature (1)..(90): Homolog of NCBI NO: 30690042 NR Description: serine threonine protein kinase -related thaliana] >gi|26452004|dbj|BAC43092.1| putative serine/threonine kinase [Arabidopsis thaliana] >gi|29029022|gb|AAO64890.1|
  misc_feature (1)..(491): Homolog of NCBI NO: 7488206 NR Description: probable serine/threonine-specific protein kinase
  misc_feature (1)..(481): Homolog of NCBI NO: 13877617 NR Description: protein kinase-like protein [Arabidopsis thaliana]
  misc_feature (1)..(481): Homolog of NCBI NO: 15230130 NR Description: protein kinase, putative; protein id: supported by cDNA: 17909., supported by cDNA: gi_13877616,
  misc_feature (1)..(481): Homolog of NCBI NO: 13447449 NR Description: receptor protein kinase PERK1 [Brassica napus]
  misc_feature (1)..(479): Homolog of NCBI NO: 15224182 NR Description: putative protein kinase; protein id: At2g18470.1
  misc_feature (1)..(464): Homolog of NCBI NO: 34904234 NR Description: putative receptor protein kinase PERK1 [Oryza
  misc_feature (1)..(445): Homolog of NCBI NO: 37530386 NR Description: putative protein kinase [Oryza sativa (japonica group)] >gi|18542934|gb|AAK00425.2| Putative protein kinase sativa] >gi|31429780|gb|AAP51782.1| putative protein kinase
MILFCVCCCRKKKKKHQMPYYAGNGYATGKGDQYQQQQYNNQSDHVMNLSQQYPGSNGNNNWMNSPPPPPPGSWQPSPPPPPPPVSGGMNGNSSDFSSNYSGPHGPSVPPPHPSVALGFNKSTFTYDELAAATQGFSQSRLLGQGGFGYVHKGILPNGKEIAVKSLKAGSGQGEREFQAEVDIISRVHHRFLVSLVGYCIAGGQRMLVYEFLPNDTLEFHLHGKSGKVLDWPTRLKIALGSAKGLAYLHEDCHPRIIHRDIKASNILLDESFEAKVADFGLAKLSQDNVTHVSTRIMGTFGYLAPEYASSGKLTDRSDVFSFGVMLLELVTGRRPVDLTGEMEDSLVDWARPICLNAAQDGDYSELVDPRLENQYEPHEMAQMVACAAAAVRHSARRRPKMSQIVRALEGDATLDDLSEGGKAGQSSFLGRGSSSDYDSSTYSADMKKFRKVALDSHEYGASSEYGNTSEYGLDPSSSSSEEIRRGGANNNKTTPSRDH

SEQ ID NO: 73633 - protein, 482 aa, Arabidopsis thaliana
  peptide (1)..(482): Ceres Seq. ID no. 4973095
  misc_feature (119)..(318): Pfam Name: Protein kinase domain Pfam Description: Protein kinase domain
  misc_feature (1)..(480): Homolog of NCBI NO: 15222081 NR Description: hypothetical protein; protein id: At1g49270.1
  misc_feature (42)..(474): Homolog of NCBI NO: 30690042 NR Description: serine threonine protein kinase -related thaliana] >gi|26452004|dbj|BAC43092.1| putative serine/threonine kinase [Arabidopsis thaliana] >gi|29029022|gb|AAO64890.1|
  misc_feature (1)..(73): Homolog of NCBI NO: 30690042 NR Description: serine threonine protein kinase -related thaliana] >gi|26452004|dbj|BAC43092.1| putative serine/threonine kinase [Arabidopsis thaliana] >gi|29029022|gb|AAO64890.1|
  misc_feature (1)..(474): Homolog of NCBI NO: 7488206 NR Description: probable serine/threonine-specific protein kinase
  misc_feature (1)..(464): Homolog of NCBI NO: 13877617 NR Description: protein kinase-like protein [Arabidopsis thaliana]
  misc_feature (1)..(464): Homolog of NCBI NO: 15230130 NR Description: protein kinase, putative; protein id: supported by cDNA: 17909., supported by cDNA: gi_13877616,
  misc_feature (1)..(464): Homolog of NCBI NO: 13447449 NR Description: receptor protein kinase PERK1 [Brassica napus]
  misc_feature (1)..(462): Homolog of NCBI NO: 15224182 NR Description: putative protein kinase; protein id: At2g18470.1
  misc_feature (1)..(447): Homolog of NCBI NO: 34904234 NR Description: putative receptor protein kinase PERK1 [Oryza
  misc_feature (1)..(428): Homolog of NCBI NO: 37530386 NR Description: putative protein kinase [Oryza sativa (japonica group)] >gi|18542934|gb|AAK00425.2| Putative protein kinase sativa] >gi|31429780|gb|AAP51782.1| putative protein kinase
MPYYAGNGYATGKGDQYQQQQYNNQSDHVMNLSQQYPGSNGNNNWMNSPPPPPPGSWQPSPPPPPPPVSGGMNGNSSDFSSNYSGPHGPSVPPPHPSVALGFNKSTFTYDELAAATQGFSQSRLLGQGGFGYVHKGILPNGKEIAVKSLKAGSGQGEREFQAEVDIISRVHHRFLVSLVGYCIAGGQRMLVYEFLPNDTLEFHLHGKSGKVLDWPTRLKIALGSAKGLAYLHEDCHPRIIHRDIKASNILLDESFEAKVADFGLAKLSQDNVTHVSTRIMGTFGYLAPEYASSGKLTDRSDVFSFGVMLLELVTGRRPVDLTGEMEDSLVDWARPICLNAAQDGDYSELVDPRLENQYEPHEMAQMVACAAAAVRHSARRRPKMSQIVRALEGDATLDDLSEGGKAGQSSFLGRGSSSDYDSSTYSADMKKFRKVALDSHEYGASSEYGNTSEYGLDPSSSSSEEIRRGGANNNKTTPSRDH

SEQ ID NO: 73634 - DNA, 1320 bp, Arabidopsis thaliana
  misc_feature (1)..(1320): Ceres Seq. ID no. 4973202
  misc_feature: MA Experiment ID: 20000184 Result: Down-regulated in Transcription
  misc_feature: MA Experiment 20000184 PARAMETER Experiment Name: At_Shoots__P Parameter: Age (day) Value: 7
  misc_feature: MA Experiment 20000184 PARAMETER Experiment Name: At_Shoots__P Parameter: Tissue Value: Shoots vs. Whole Plant
  misc_feature: MA Experiment ID: 20000234 Result: Up-regulated in Transcription
  misc_feature: MA Experiment 20000234 PARAMETER Experiment Name: At_Siliques_P Parameter: Age (day) Value: 21
  misc_feature: MA Experiment 20000234 PARAMETER Experiment Name: At_Siliques_P Parameter: Organism Value: A. thaliana
  misc_feature: MA Experiment 20000234 PARAMETER Experiment Name: At_Siliques_P Parameter: Plant Line Value: WS
  misc_feature: MA Experiment 20000234 PARAMETER Experiment Name: At_Siliques_P Parameter: Tissue Value: Less Than 5mm Siliques vs. Whole Plant
  misc_feature: MA Experiment ID: 20000235 Result: Up-regulated in Transcription
  misc_feature: MA Experiment 20000235 PARAMETER Experiment Name: At_Siliques_P Parameter: Age (day) Value: 21
  misc_feature: MA Experiment 20000235 PARAMETER Experiment Name: At_Siliques_P Parameter: Organism Value: A. thaliana
  misc_feature: MA Experiment 20000235 PARAMETER Experiment Name: At_Siliques_P Parameter: Plant Line Value: WS
  misc_feature: MA Experiment 20000235 PARAMETER Experiment Name: At_Siliques_P Parameter: Tissue Value: 5-10mm Siliques vs. Whole Plant
  misc_feature: MA Experiment ID: 20000439 Result: Up-regulated in Transcription
  misc_feature: MA Experiment 20000439 PARAMETER Experiment Name: At_Roots__P Parameter: Age (day) Value: 14 vs. 21
  misc_feature: MA Experiment 20000439 PARAMETER Experiment Name: At_Roots__P Parameter: Organism Value: A. thaliana
  misc_feature: MA Experiment 20000439 PARAMETER Experiment Name: At_Roots__P Parameter: Tissue Value: Roots vs. Whole Plant
atgaacctagtccctcctaaggaagaagagaacctcatagtattcaacaaacaacttggagaagatagaagaattgtgatgtcacggagcaatttaaatgagctacttaaggcgcttgaggaaaacgagttattgtgcactgacttgtaccaagtgaacaccgatggcgtgatattgacaaagcaaagagcggagaaagttatcggttgggccagaaaccactatttatcttcttgtcctagcccatcgattaaagagggccgcctgattctcccccgtgaaagcattgagatttcagttaaaaggttaaaggcacaagaagatatttctcgaaagcccacacaaaacttgaagagatttttgtttttgcagaatattgcgaaggatgagtttgaaaccaattttgtctcagccgtggttgctcctggagaaattggggtaaagtttgacgacattggtgctcttgaacatgtgaaaaagacactaaatgagttagttattcttcccatgagaaggccagagcttttcacccgtggaaatctcttgcggccatgtaaaggcatattgctttttggtcctccgggtacgggtaaaacgctgcttgccaaggcgcttgcaacagaagctggggcaaacttcattagcataactggctcaacgcttacctcaaagtggtttggagatgcagagaagctcacgaaggctttgttctcttttgcaagcaaactagcccccgtcattatatttgttgatgaggttgacagtttgttgggtgctcgtggtggtgcttttgagcacgaggcaacacgaagaatgagaaatgagtttatggcagcttgggatggactcagatcaaaagatagccaaaggattctcattctcggtgccaccaaccgaccttttgatcttgatgacgctgtcattcgtaggctaccaagacggatatatgtggatttaccagatgcggaaaaccggttgaagatattgaagatatttctgacaccagaaaatcttgaaactggtttcgagtttgataaacttgcaaaggaaaccgaaggatattcaggaagcgatctaaagaatctatgcatagcagctgcatacagacctgttcaagaattgttacaagaagaaaacaaggactcggtaacaaatgcgtcccctgatctacgaccactgagtttggacgacttcattcaatccaaagctaaggtaagtccgtcagtggcatacgacgcgacgacaatgaacgaattgagaaaatggaacgagcaatacggtgaaggagggacccgaactaagtctcctttcggcttctaa

SEQ ID NO: 73635 - protein, 439 aa, Arabidopsis thaliana
  peptide (1)..(439): Ceres Seq. ID no. 4973203
  misc_feature (187)..(372): Pfam Name: ATPase family associated with various cellular Pfam Description: ATPase family associated with various cellular
  misc_feature (1)..(439): Homolog of NCBI NO: 15230942 NR Description: ATPase, putative; protein id: At3g19740.1
  misc_feature (1)..(439): Homolog of NCBI NO: 15222886 NR Description: hypothetical protein; protein id: At1g50140.1
  misc_feature (64)..(439): Homolog of NCBI NO: 25405352 NR Description: hypothetical protein F2J10.1 [imported] - thaliana >gi|8569089|gb|AAF76434.1|AC015445_1 Contains similarity p60 katanin from Chlamydomonas reinhardtii gb|AF205377 and
  misc_feature (170)..(439): Homolog of NCBI NO: 25454662 NR Description: hypothetical protein MMB12.22 [imported] - thaliana >gi|9294440|dbj|BAB02560.1| contains similarity to
  misc_feature (6)..(439): Homolog of NCBI NO: 30678418 NR Description: expressed protein [Arabidopsis thaliana]
  misc_feature (6)..(439): Homolog of NCBI NO: 20259341 NR Description: unknown protein [Arabidopsis thaliana]
  misc_feature (6)..(439): Homolog of NCBI NO: 30679158 NR Description: expressed protein [Arabidopsis thaliana]
  misc_feature (6)..(439): Homolog of NCBI NO: 33146850 NR Description: putative MSP1(mitochondrial sorting of proteins)
  misc_feature (79)..(439): Homolog of NCBI NO: 7487016 NR Description: hypothetical protein T14P8.7 - Arabidopsis >gi|3193292|gb|AAC19276.1| similar to ATPases associated with
  misc_feature (6)..(439): Homolog of NCBI NO: 15234019 NR Description: putative protein; protein id: At4g24850.1
MNLVPPKEEENLIVFNKQLGEDRRIVMSRSNLNELLKALEENELLCTDLYQVNTDGVILTKQRAEKVIGWARNHYLSSCPSPSIKEGRLILPRESIEISVKRLKAQEDISRKPTQNLKRFLFLQNIAKDEFETNFVSAVVAPGEIGVKFDDIGALEHVKKTLNELVILPMRRPELFTRGNLLRPCKGILLFGPPGTGKTLLAKALATEAGANFISITGSTLTSKWFGDAEKLTKALFSFASKLAPVIIFVDEVDSLLGARGGAFEHEATRRMRNEFMAAWDGLRSKDSQRILILGATNRPFDLDDAVIRRLPRRIYVDLPDAENRLKILKIFLTPENLETGFEFDKLAKETEGYSGSDLKNLCIAAAYRPVQELLQEENKDSVTNASPDLRPLSLDDFIQSKAKVSPSVAYDATTMNELRKWNEQYGEGGTRTKSPFGF

SEQ ID NO: 73636 - protein, 413 aa, Arabidopsis thaliana
  peptide (1)..(413): Ceres Seq. ID no. 4973204
  misc_feature (161)..(346): Pfam Name: ATPase family associated with various cellular Pfam Description: ATPase family associated with various cellular
  misc_feature (1)..(413): Homolog of NCBI NO: 15230942 NR Description: ATPase, putative; protein id: At3g19740.1
  misc_feature (1)..(413): Homolog of NCBI NO: 15222886 NR Description: hypothetical protein; protein id: At1g50140.1
  misc_feature (38)..(413): Homolog of NCBI NO: 25405352 NR Description: hypothetical protein F2J10.1 [imported] - thaliana >gi|8569089|gb|AAF76434.1|AC015445_1 Contains similarity p60 katanin from Chlamydomonas reinhardtii gb|AF205377 and
  misc_feature (144)..(413): Homolog of NCBI NO: 25454662 NR Description: hypothetical protein MMB12.22 [imported] - thaliana >gi|9294440|dbj|BAB02560.1| contains similarity to
  misc_feature (1)..(413): Homolog of NCBI NO: 30678418 NR Description: expressed protein [Arabidopsis thaliana]
  misc_feature (1)..(413): Homolog of NCBI NO: 20259341 NR Description: unknown protein [Arabidopsis thaliana]
  misc_feature (1)..(413): Homolog of NCBI NO: 30679158 NR Description: expressed protein [Arabidopsis thaliana]
  misc_feature (1)..(413): Homolog of NCBI NO: 33146850 NR Description: putative MSP1(mitochondrial sorting of proteins)
  misc_feature (53)..(413): Homolog of NCBI NO: 7487016 NR Description: hypothetical protein T14P8.7 - Arabidopsis >gi|3193292|gb|AAC19276.1| similar to ATPases associated with
  misc_feature (1)..(413): Homolog of NCBI NO: 15234019 NR Description: putative protein; protein id: At4g24850.1
MSRSNLNELLKALEENELLCTDLYQVNTDGVILTKQRAEKVIGWARNHYLSSCPSPSIKEGRLILPRESIEISVKRLKAQEDISRKPTQNLKRFLFLQNIAKDEFETNFVSAVVAPGEIGVKFDDIGALEHVKKTLNELVILPMRRPELFTRGNLLRPCKGILLFGPPGTGKTLLAKALATEAGANFISITGSTLTSKWFGDAEKLTKALFSFASKLAPVIIFVDEVDSLLGARGGAFEHEATRRMRNEFMAAWDGLRSKDSQRILILGATNRPFDLDDAVIRRLPRRIYVDLPDAENRLKILKIFLTPENLETGFEFDKLAKETEGYSGSDLKNLCIAAAYRPVQELLQEENKDSVTNASPDLRPLSLDDFIQSKAKVSPSVAYDATTMNELRKWNEQYGEGGTRTKSPFGF

SEQ ID NO: 73637 - protein, 270 aa, Arabidopsis thaliana
  peptide (1)..(270): Ceres Seq. ID no. 4973205
  misc_feature (18)..(203): Pfam Name: ATPase family associated with various cellular Pfam Description: ATPase family associated with various cellular
  misc_feature (1)..(270): Homolog of NCBI NO: 15230942 NR Description: ATPase, putative; protein id: At3g19740.1
  misc_feature (1)..(270): Homolog of NCBI NO: 15222886 NR Description: hypothetical protein; protein id: At1g50140.1
  misc_feature (1)..(270): Homolog of NCBI NO: 25405352 NR Description: hypothetical protein F2J10.1 [imported] - thaliana >gi|8569089|gb|AAF76434.1|AC015445_1 Contains similarity p60 katanin from Chlamydomonas reinhardtii gb|AF205377 and
  misc_feature (1)..(270): Homolog of NCBI NO: 25454662 NR Description: hypothetical protein MMB12.22 [imported] - thaliana >gi|9294440|dbj|BAB02560.1| contains similarity to
  misc_feature (1)..(270): Homolog of NCBI NO: 30678418 NR Description: expressed protein [Arabidopsis thaliana]
  misc_feature (1)..(270): Homolog of NCBI NO: 20259341 NR Description: unknown protein [Arabidopsis thaliana]
  misc_feature (1)..(270): Homolog of NCBI NO: 30679158 NR Description: expressed protein [Arabidopsis thaliana]
  misc_feature (1)..(270): Homolog of NCBI NO: 33146850 NR Description: putative MSP1(mitochondrial sorting of proteins)
  misc_feature (1)..(270): Homolog of NCBI NO: 7487016 NR Description: hypothetical protein T14P8.7 - Arabidopsis >gi|3193292|gb|AAC19276.1| similar to ATPases associated with
  misc_feature (1)..(270): Homolog of NCBI NO: 15234019 NR Description: putative protein; protein id: At4g24850.1
MRRPELFTRGNLLRPCKGILLFGPPGTGKTLLAKALATEAGANFISITGSTLTSKWFGDAEKLTKALFSFASKLAPVIIFVDEVDSLLGARGGAFEHEATRRMRNEFMAAWDGLRSKDSQRILILGATNRPFDLDDAVIRRLPRRIYVDLPDAENRLKILKIFLTPENLETGFEFDKLAKETEGYSGSDLKNLCIAAAYRPVQELLQEENKDSVTNASPDLRPLSLDDFIQSKAKVSPSVAYDATTMNELRKWNEQYGEGGTRTKSPFGF

SEQ ID NO: 73638 - DNA, 540 bp, Arabidopsis thaliana
  misc_feature (1)..(540): Ceres Seq. ID no. 4973596
  misc_feature: MA Experiment ID: 20000173 Result: Down-regulated in Transcription
  misc_feature: MA Experiment 20000173 PARAMETER Experiment Name: At_42deg_Heat_P Parameter: Age (day) Value: 14
  misc_feature: MA Experiment 20000173 PARAMETER Experiment Name: At_42deg_Heat_P Parameter: Organism Value: A. thaliana
  misc_feature: MA Experiment 20000173 PARAMETER Experiment Name: At_42deg_Heat_P Parameter: Plant Line Value: WS
  misc_feature: MA Experiment 20000173 PARAMETER Experiment Name: At_42deg_Heat_P Parameter: Temperature (deg C) Value: 42 vs. 22
  misc_feature: MA Experiment 20000173 PARAMETER Experiment Name: At_42deg_Heat_P Parameter: Timepoint (hr) Value: 6
  misc_feature: MA Experiment 20000173 PARAMETER Experiment Name: At_42deg_Heat_P Parameter: Tissue Value: Aerial
  misc_feature: MA Experiment ID: 20000184 Result: Up-regulated in Transcription
  misc_feature: MA Experiment 20000184 PARAMETER Experiment Name: At_Shoots__P Parameter: Age (day) Value: 7
  misc_feature: MA Experiment 20000184 PARAMETER Experiment Name: At_Shoots__P Parameter: Tissue Value: Shoots vs. Whole Plant
  misc_feature: MA Experiment ID: 20000227 Result: Down-regulated in Transcription
  misc_feature: MA Experiment 20000227 PARAMETER Experiment Name: At_Root-Tips-vs-Tops_P Parameter: Tissue Value: Root Tips vs. Root Tops
  misc_feature: MA Experiment ID: 20000265 Result: Down-regulated in Transcription
  misc_feature: MA Experiment 20000265 PARAMETER Experiment Name: At_Open_Flower_P Parameter: Age (day) Value: 21
  misc_feature: MA Experiment 20000265 PARAMETER Experiment Name: At_Open_Flower_P Parameter: Plant Line Value: WS
  misc_feature: MA Experiment 20000265 PARAMETER Experiment Name: At_Open_Flower_P Parameter: Tissue Value: Closed Flower vs. Whole Plant
  misc_feature: MA Experiment ID: 20000268 Result: Up-regulated in Transcription
  misc_feature: MA Experiment 20000268 PARAMETER Experiment Name: At_100mM_NaCl__P Parameter: Age (day) Value: 14
  misc_feature: MA Experiment 20000268 PARAMETER Experiment Name: At_100mM_NaCl__P Parameter: Organism Value: A. thaliana
  misc_feature: MA Experiment 20000268 PARAMETER Experiment Name: At_100mM_NaCl__P Parameter: Plant Line Value: WS
  misc_feature: MA Experiment 20000268 PARAMETER Experiment Name: At_100mM_NaCl__P Parameter: Timepoint (hr) Value: 6
  misc_feature: MA Experiment 20000268 PARAMETER Experiment Name: At_100mM_NaCl__P Parameter: Tissue Value: Whole Plant
  misc_feature: MA Experiment 20000268 PARAMETER Experiment Name: At_100mM_NaCl__P Parameter: Treatment Value: 100mM NaCl vs. No Treatment
  misc_feature: MA Experiment ID: 20000436 Result: Up-regulated in Transcription
  misc_feature: MA Experiment 20000436 PARAMETER Experiment Name: At_Drought_P Parameter: Age (day) Value: 7
  misc_feature: MA Experiment 20000436 PARAMETER Experiment Name: At_Drought_P Parameter: Organism Value: A. thaliana
  misc_feature: MA Experiment 20000436 PARAMETER Experiment Name: At_Drought_P Parameter: Plant Line Value: WS
  misc_feature: MA Experiment 20000436 PARAMETER Experiment Name: At_Drought_P Parameter: Timepoint (hr) Value: 12
  misc_feature: MA Experiment 20000436 PARAMETER Experiment Name: At_Drought_P Parameter: Tissue Value: Whole Plant
  misc_feature: MA Experiment 20000436 PARAMETER Experiment Name: At_Drought_P Parameter: Treatment Value: Drought vs. No Drought
  misc_feature: MA Experiment ID: 20000438 Result: Up-regulated in Transcription
  misc_feature: MA Experiment 20000438 PARAMETER Experiment Name: At_Shoots__P Parameter: Age (day) Value: 14
  misc_feature: MA Experiment 20000438 PARAMETER Experiment Name: At_Shoots__P Parameter: Tissue Value: Shoots vs. Whole Plant
  misc_feature: MA Experiment ID: 20000439 Result: Up-regulated in Transcription
  misc_feature: MA Experiment 20000439 PARAMETER Experiment Name: At_Roots__P Parameter: Age (day) Value: 14 vs. 21
  misc_feature: MA Experiment 20000439 PARAMETER Experiment Name: At_Roots__P Parameter: Organism Value: A. thaliana
  misc_feature: MA Experiment 20000439 PARAMETER Experiment Name: At_Roots__P Parameter: Tissue Value: Roots vs. Whole Plant
  misc_feature: MA Experiment ID: 20000451 Result: Down-regulated in Transcription
  misc_feature: MA Experiment 20000451 PARAMETER Experiment Name: At_CS6879_Shoots-Roots_P Parameter: Age (day) Value: 14
  misc_feature: MA Experiment 20000451 PARAMETER Experiment Name: At_CS6879_Shoots-Roots_P Parameter: Organism Value: A. thaliana
  misc_feature: MA Experiment 20000451 PARAMETER Experiment Name: At_CS6879_Shoots-Roots_P Parameter: Plant Line Value: CS6879 vs. WS
  misc_feature: MA Experiment 20000451 PARAMETER Experiment Name: At_CS6879_Shoots-Roots_P Parameter: Tissue Value: Roots
  misc_feature: MA Experiment ID: 20000573 Result: Down-regulated in Transcription
  misc_feature: MA Experiment 20000573 PARAMETER Experiment Name: At_100uM_ABA_Mutants__P Parameter: Organism Value: A. thaliana
  misc_feature: MA Experiment 20000573 PARAMETER Experiment Name: At_100uM_ABA_Mutants__P Parameter: Plant Line Value: CS22 vs. Ler wt
  misc_feature: MA Experiment 20000573 PARAMETER Experiment Name: At_100uM_ABA_Mutants__P Parameter: Timepoint (hr) Value: N/A
  misc_feature: MA Experiment 20000573 PARAMETER Experiment Name: At_100uM_ABA_Mutants__P Parameter: Tissue Value: Whole Plant
  misc_feature: MA Experiment 20000573 PARAMETER Experiment Name: At_100uM_ABA_Mutants__P Parameter: Treatment Value: None
  misc_feature: MA Experiment ID: 20000794 Result: Down-regulated in Transcription
  misc_feature: MA Experiment 20000794 PARAMETER Experiment Name: At_Petals_P Parameter: Age (day) Value: 23-25 days
  misc_feature: MA Experiment 20000794 PARAMETER Experiment Name: At_Petals_P Parameter: Plant Line Value: WS
  misc_feature: MA Experiment 20000794 PARAMETER Experiment Name: At_Petals_P Parameter: Tissue Value: Petals vs. Whole plant
  misc_feature: MA Experiment ID: 20001457 Result: Down-regulated in Transcription
  misc_feature: MA Experiment 20001457 PARAMETER Experiment Name: At_50mM_NH4NO3_L-to-H_P Parameter: Age (day) Value: Undefined
  misc_feature: MA Experiment 20001457 PARAMETER Experiment Name: At_50mM_NH4NO3_L-to-H_P Parameter: Organism Value: Undefined
  misc_feature: MA Experiment 20001457 PARAMETER Experiment Name: At_50mM_NH4NO3_L-to-H_P Parameter: Plant Line Value: Undefined
  misc_feature: MA Experiment 20001457 PARAMETER Experiment Name: At_50mM_NH4NO3_L-to-H_P Parameter: Timepoint (hr) Value: 0.5
  misc_feature: MA Experiment 20001457 PARAMETER Experiment Name: At_50mM_NH4NO3_L-to-H_P Parameter: Tissue Value: Siliques
  misc_feature: MA Experiment 20001457 PARAMETER Experiment Name: At_50mM_NH4NO3_L-to-H_P Parameter: Treatment Value: 50mM NH4NO3 vs. 100mM Manitol
  misc_feature: MA Experiment ID: 20001557 Result: Down-regulated in Transcription
  misc_feature: MA Experiment 20001557 PARAMETER Experiment Name: At_Drought_Soil_Dry_P Parameter: Age (day) Value: 27
  misc_feature: MA Experiment 20001557 PARAMETER Experiment Name: At_Drought_Soil_Dry_P Parameter: Organism Value: A. thaliana
  misc_feature: MA Experiment 20001557 PARAMETER Experiment Name: At_Drought_Soil_Dry_P Parameter: Plant Line Value: WS
  misc_feature: MA Experiment 20001557 PARAMETER Experiment Name: At_Drought_Soil_Dry_P Parameter: Post Timepoint (hr) Value: 3
  misc_feature: MA Experiment 20001557 PARAMETER Experiment Name: At_Drought_Soil_Dry_P Parameter: Post-Treatment Value: Re-Water vs. No Drought
  misc_feature: MA Experiment 20001557 PARAMETER Experiment Name: At_Drought_Soil_Dry_P Parameter: Timepoint (day) Value: 13
  misc_feature: MA Experiment 20001557 PARAMETER Experiment Name: At_Drought_Soil_Dry_P Parameter: Treatment Value: Drought vs. No Drought
  misc_feature: MA Experiment ID: 20001558 Result: Down-regulated in Transcription
  misc_feature: MA Experiment 20001558 PARAMETER Experiment Name: At_Drought_Soil_Dry_P Parameter: Age (day) Value: 27
  misc_feature: MA Experiment 20001558 PARAMETER Experiment Name: At_Drought_Soil_Dry_P Parameter: Organism Value: A. thaliana
  misc_feature: MA Experiment 20001558 PARAMETER Experiment Name: At_Drought_Soil_Dry_P Parameter: Plant Line Value: WS
  misc_feature: MA Experiment 20001558 PARAMETER Experiment Name: At_Drought_Soil_Dry_P Parameter: Post Timepoint (hr) Value: 6
  misc_feature: MA Experiment 20001558 PARAMETER Experiment Name: At_Drought_Soil_Dry_P Parameter: Post-Treatment Value: Re-Water vs. No Drought
  misc_feature: MA Experiment 20001558 PARAMETER Experiment Name: At_Drought_Soil_Dry_P Parameter: Timepoint (day) Value: 13
  misc_feature: MA Experiment 20001558 PARAMETER Experiment Name: At_Drought_Soil_Dry_P Parameter: Treatment Value: Drought vs. No Drought
atgcaagactcttcctctcacgaatcgcaacgtaacctccggtcaccggtgccggagaaaaccggaaagagttctaagactaaaaatgagcaaaaaggtgtttctaaacaaccaaattttcgtggggtcagaatgagacaatggggaaaatgggtgtctgaaattagagaaccaagaaagaaatcaagaatatggctcggtactttctctacgccggagatggcggcgcgtgcacacgacgtggcggctttagccatcaaaggtggctctgcccaccttaatttcccggagctagcttaccatttgccgagaccggctagcgcggaccctaaagacattcaagaagccgccgccgcagcagctgccgttgactggaaagcaccggagtctccgtctagcaccgtgacgtcatctccagtcgccgacgacgctttctccgatcttcctgatcttttgcttgacgtgaatgatcacaacaaaaacgatggattctgggactcgtttccgtacgaagatcctttcttcttggaaaattactag

SEQ ID NO: 73639 - protein, 179 aa, Arabidopsis thaliana; identical to SEQ ID NO: 70194
  peptide (1)..(179): Ceres Seq. ID no. 4973597
  misc_feature (37)..(101): Pfam Name: AP2 domain Pfam Description: AP2 domain
  misc_feature (1)..(179): Homolog of NCBI NO: 15235858 NR Description: AP2 domain TINY-related protein; protein id: [Arabidopsis thaliana] >gi|25350649|pir||F85186 apetala2 domain
  misc_feature (2)..(179): Homolog of NCBI NO: 15227471 NR Description: putative AP2 domain transcription factor; protein At2g35700.1 [Arabidopsis thaliana] >gi|25350648|pir||H84771
  misc_feature (15)..(139): Homolog of NCBI NO: 15223860 NR Description: transcription factor TINY, putative; protein id:
  misc_feature (22)..(144): Homolog of NCBI NO: 14140163 NR Description: putative AP2 domain containing protein [Oryza
  misc_feature (22)..(141): Homolog of NCBI NO: 37536842 NR Description: putative DNA binding protein [Oryza sativa
  misc_feature (21)..(157): Homolog of NCBI NO: 38605848 NR Description: OSJNBb0034G17.6 [Oryza sativa (japonica
  misc_feature (36)..(179): Homolog of NCBI NO: 38605844 NR Description: OSJNBb0034G17.2 [Oryza sativa (japonica
  misc_feature (23)..(143): Homolog of NCBI NO: 21908034 NR Description: DRE binding factor 2 [Zea mays]
  misc_feature (23)..(143): Homolog of NCBI NO: 25990951 NR Description: DREB-like protein [Zea mays]
  misc_feature (4)..(143): Homolog of NCBI NO: 38605845 NR Description: OSJNBb0034G17.3 [Oryza sativa (japonica

SEQ ID NO: 73640 - protein, 135 aa, Arabidopsis thaliana; identical to SEQ ID NO: 70195
  peptide (1)..(135): Ceres Seq. ID no. 4973598
  misc_feature (1)..(57): Pfam Name: AP2 domain Pfam Description: AP2 domain
  misc_feature (1)..(135): Homolog of NCBI NO: 15235858 NR Description: AP2 domain TINY-related protein; protein id: [Arabidopsis thaliana] >gi|25350649|pir||F85186 apetala2 domain
  misc_feature (1)..(135): Homolog of NCBI NO: 15227471 NR Description: putative AP2 domain transcription factor; protein At2g35700.1 [Arabidopsis thaliana] >gi|25350648|pir||H84771
  misc_feature (1)..(95): Homolog of NCBI NO: 15223860 NR Description: transcription factor TINY, putative; protein id:
  misc_feature (1)..(100): Homolog of NCBI NO: 14140163 NR Description: putative AP2 domain containing protein [Oryza
  misc_feature (1)..(97): Homolog of NCBI NO: 37536842 NR Description: putative DNA binding protein [Oryza sativa
  misc_feature (1)..(113): Homolog of NCBI NO: 38605848 NR Description: OSJNBb0034G17.6 [Oryza sativa (japonica
  misc_feature (1)..(135): Homolog of NCBI NO: 38605844 NR Description: OSJNBb0034G17.2 [Oryza sativa (japonica
  misc_feature (1)..(99): Homolog of NCBI NO: 21908034 NR Description: DRE binding factor 2 [Zea mays]
  misc_feature (1)..(99): Homolog of NCBI NO: 25990951 NR Description: DREB-like protein [Zea mays]
  misc_feature (1)..(99): Homolog of NCBI NO: 38605845 NR Description: OSJNBb0034G17.3 [Oryza sativa (japonica

SEQ ID NO: 73641 - protein, 106 aa, Arabidopsis thaliana
  peptide (1)..(106): Ceres Seq. ID no. 4973599
  misc_feature (1)..(106): Homolog of NCBI NO: 15235858 NR Description: AP2 domain TINY-related protein; protein id: [Arabidopsis thaliana] >gi|25350649|pir||F85186 apetala2 domain
  misc_feature (1)..(106): Homolog of NCBI NO: 15227471 NR Description: putative AP2 domain transcription factor; protein At2g35700.1 [Arabidopsis thaliana] >gi|25350648|pir||H84771
  misc_feature (1)..(66): Homolog of NCBI NO: 15223860 NR Description: transcription factor TINY, putative; protein id:
  misc_feature (1)..(71): Homolog of NCBI NO: 14140163 NR Description: putative AP2 domain containing protein [Oryza
  misc_feature (1)..(68): Homolog of NCBI NO: 37536842 NR Description: putative DNA binding protein [Oryza sativa
  misc_feature (1)..(84): Homolog of NCBI NO: 38605848 NR Description: OSJNBb0034G17.6 [Oryza sativa (japonica
  misc_feature (1)..(106): Homolog of NCBI NO: 38605844 NR Description: OSJNBb0034G17.2 [Oryza sativa (japonica
  misc_feature (1)..(70): Homolog of NCBI NO: 21908034 NR Description: DRE binding factor 2 [Zea mays]
  misc_feature (1)..(70): Homolog of NCBI NO: 25990951 NR Description: DREB-like protein [Zea mays]
  misc_feature (1)..(70): Homolog of NCBI NO: 38605845 NR Description: OSJNBb0034G17.3 [Oryza sativa (japonica
MAARAHDVAALAIKGGSAHLNFPELAYHLPRPASADPKDIQEAAAAAAAVDWKAPESPSSTVTSSPVADDAFSDLPDLLLDVNDHNKNDGFWDSFPYEDPFFLENY

SEQ ID NO: 73642 - DNA, 2640 bp, Arabidopsis thaliana
  misc_feature (1)..(2640): Ceres Seq. ID no. 4973674
  misc_feature: MA Experiment ID: 20000439 Result: Up-regulated in Transcription
  misc_feature: MA Experiment 20000439 PARAMETER Experiment Name: At_Roots__P Parameter: Age (day) Value: 14 vs. 21
  misc_feature: MA Experiment 20000439 PARAMETER Experiment Name: At_Roots__P Parameter: Organism Value: A. thaliana
  misc_feature: MA Experiment 20000439 PARAMETER Experiment Name: At_Roots__P Parameter: Tissue Value: Roots vs. Whole Plant
  misc_feature: Pfam Name: Pkinase Pfam Description: Protein kinase domain
atgctcttttgggttttgctcagtagtttctgtgtgttttgtttctccagtccagatggtttcttgagcttatcatgtggcggctcaagttacaccgctgcttataacatctcatgggtttcagacaacgattatatcgaaacaggtaacactaccacggttacttacgccgaggggaattctacttccagtgttcccatcagattattcccggatcctcaaggtcgccaatgttacaagttacctgtgaggaaagacttgtcttcagttctgattcgtgctacattcgtttatagaaactatgatagccagaatagtcctccagcatttcatgtctctcttggaaggagaatcactagtactgttgatcttagaaccaatgatccttggattgaagagttagtttggccagtcaacaatgattctcttttgctttgcttgcttgcggttaaaggaagaggtattccggttatctcttctctagaagtacggccacttcctttaggttcttacaaatacagcctggagggttcaccagatataattctcaggagaagttaccgaatcaatagcggatacacaaatgggactatccggtatccttcagatccatttgatcgaatatgggatccggatcaaagttattcaccgtttcacgcctcttggagcttcaatggactcacaaaattgaattccttcaatattactgagaatccaccagcttctgttcttaagacagcaagaattcttgctcgcaaagaaagtctttcatatactctttctctacatacaccaggggactactacattatcctctactttgctgggatactctcactctccccttcttttagtgtgacgatcaatgatgaagtcaaacaatctgattacaccgtaactagctcagaagctggtaccttgtactttacgcaaaaaggaatcagtaagttaaacatcaccctcagaaaaatcaagttcaatcctcaagtgagtgctcttgaggtatatgaaatcctccaaatccctcctgaagcttcttctaccacagtttcggcacttaaagtcatagagcaatttaccgggcaagaccttggatggcaagacgacccatgcacaccgcttccttggaaccacatcgaatgtgaaggaaaccgtgttacatcattgttcctttcaaaaatcaacctgaggtccattagtccaacattcggagacttgctcgatctcaaaacactcgacttgcataatacatcacttacaggagcaatacagaatgtaggcagccttaaggatctccagaaactgaatttgagcttcaatcagttagaatcttttggctccgagctggaagatctggttaaccttgaagttctggacctgcaaaacaacagcttacaaggatcagttcctgaaacattaggaaagctgaagaaacttcgtctcctgaatctggaaaacaataacttagtaggtcccttgccacagtctcttaacataacgggtctggaagtcaggataacgggaaatccatgcctttcgttctcttcaatatcatgcaacaatgtgtcttcaacaattgacacaccacaagtcactatccctatcaataagaaacaaagaaaacagaaccgtatagcgatcttgcttggagtttctggtggagccttgtttgccacctttcttgtctttgttttcatgtcgatcttcacgaggagacagagaaacaaagagagagatataaccagagcacaactgaaaatgcagaactggaacgcttcaagaatcttttctcacaaagagatcaagtcagctactagaaatttcaaggaagtgattggtcgtggaagttttggagctgtataccgtggaaaactaccagatggaaaacaagttgcggtcaaagtgcaccttttgtctcagatccgccaccaaaatctagtttcatttgagggcttctgctatgaaccaaaacgtcaaatactggtgtatgagtatctgtctggtggatccttagctgatcacctttacggtccacgtagcaaaaggcattcattgaactgggtttcaagactaaaagttgctgttgatgctgcaaaaggattggactacctgcataatggaagtgagccgagaattatacatcgggatgtaaagagcagtaacatacttttagacaaggatatgaacgcgaaagtttctgattttggcctgtcaaaacaatttacaaaagcagatgcatctcatattactactgttgttaaaggcaccgcaggctaccttgaccccgaatattactctaccctgcagctgacagagaaaagtgatgtctatagctttggtgtggttctgttggagcttatctgtggaagagaacccttaagtcactcaggatcaccagattcgtttaacttggtcttatgggctaggccaaacttacaagcaggagcttttgagattgtggatgatatcttgaaggagacatttgatccagcgagcatgaaaaaagctgcttcgattgctataagatgtgtgggaagagatgcatctggaagaccgtctatcgccgaagttttgactaaactgaaagaagcgtacagtcttcaactctcatatctagctgcttcagcacatacagactga

SEQ ID NO: 73643 - protein, 879 aa, Arabidopsis thaliana
  peptide (1)..(879): Ceres Seq. ID no. 4973675
  misc_feature: Pfam Name: Pkinase Pfam Description: Protein kinase domain
  misc_feature (2)..(487): Homolog of NCBI NO: 15222042 NR Description: light repressible receptor protein kinase,
  misc_feature (20)..(459): Homolog of NCBI NO: 15225949 NR Description: putative receptor-like protein kinase; protein id:
  misc_feature (435)..(870): Homolog of NCBI NO: 15222042 NR Description: light repressible receptor protein kinase,
  misc_feature (435)..(867): Homolog of NCBI NO: 15225949 NR Description: putative receptor-like protein kinase; protein id:
  misc_feature (7)..(442): Homolog of NCBI NO: 9758831 NR Description: receptor-like protein kinase [Arabidopsis
  misc_feature (435)..(863): Homolog of NCBI NO: 9758831 NR Description: receptor-like protein kinase [Arabidopsis
  misc_feature (2)..(487): Homolog of NCBI NO: 7770331 NR Description: F27J15.13 [Arabidopsis thaliana]
  misc_feature (435)..(870): Homolog of NCBI NO: 7770331 NR Description: F27J15.13 [Arabidopsis thaliana]
  misc_feature (2)..(489): Homolog of NCBI NO: 15238489 NR Description: serine/threonine-specific protein kinase - like;
  misc_feature (435)..(863): Homolog of NCBI NO: 15238489 NR Description: serine/threonine-specific protein kinase - like;
MLFWVLLSSFCVFCFSSPDGFLSLSCGGSSYTAAYNISWVSDNDYIETGNTTTVTYAEGNSTSSVPIRLFPDPQGRQCYKLPVRKDLSSVLIRATFVYRNYDSQNSPPAFHVSLGRRITSTVDLRTNDPWIEELVWPVNNDSLLLCLLAVKGRGIPVISSLEVRPLPLGSYKYSLEGSPDIILRRSYRINSGYTNGTIRYPSDPFDRIWDPDQSYSPFHASWSFNGLTKLNSFNITENPPASVLKTARILARKESLSYTLSLHTPGDYYIILYFAGILSLSPSFSVTINDEVKQSDYTVTSSEAGTLYFTQKGISKLNITLRKIKFNPQVSALEVYEILQIPPEASSTTVSALKVIEQFTGQDLGWQDDPCTPLPWNHIECEGNRVTSLFLSKINLRSISPTFGDLLDLKTLDLHNTSLTGAIQNVGSLKDLQKLNLSFNQLESFGSELEDLVNLEVLDLQNNSLQGSVPETLGKLKKLRLLNLENNNLVGPLPQSLNITGLEVRITGNPCLSFSSISCNNVSSTIDTPQVTIPINKKQRKQNRIAILLGVSGGALFATFLVFVFMSIFTRRQRNKERDITRAQLKMQNWNASRIFSHKEIKSATRNFKEVIGRGSFGAVYRGKLPDGKQVAVKVHLLSQIRHQNLVSFEGFCYEPKRQILVYEYLSGGSLADHLYGPRSKRHSLNWVSRLKVAVDAAKGLDYLHNGSEPRIIHRDVKSSNILLDKDMNAKVSDFGLSKQFTKADASHITTVVKGTAGYLDPEYYSTLQLTEKSDVYSFGVVLLELICGREPLSHSGSPDSFNLVLWARPNLQAGAFEIVDDILKETFDPASMKKAASIAIRCVGRDASGRPSIAEVLTKLKEAYSLQLSYLAASAHTD

SEQ ID NO: 73644 - DNA, 981 bp, Arabidopsis thaliana
  misc_feature (1)..(981): Ceres Seq. ID no. 4973692
  misc_feature: MA Experiment ID: 20000179 Result: Up-regulated in Transcription
  misc_feature: MA Experiment 20000179 PARAMETER Experiment Name: At_Germinating_Seeds_P Parameter: Age (hr) Value: 6 vs. 0
  misc_feature: MA Experiment 20000179 PARAMETER Experiment Name: At_Germinating_Seeds_P Parameter: Tissue Value: Germinating Seeds
  misc_feature: MA Experiment ID: 20000182 Result: Down-regulated in Transcription
  misc_feature: MA Experiment 20000182 PARAMETER Experiment Name: At_2mM_SA_P Parameter: Age (day) Value: 14
  misc_feature: MA Experiment 20000182 PARAMETER Experiment Name: At_2mM_SA_P Parameter: Organism Value: A. thaliana
  misc_feature: MA Experiment 20000182 PARAMETER Experiment Name: At_2mM_SA_P Parameter: Plant Line Value: WS
  misc_feature: MA Experiment 20000182 PARAMETER Experiment Name: At_2mM_SA_P Parameter: Timepoint (hr) Value: 6
  misc_feature: MA Experiment 20000182 PARAMETER Experiment Name: At_2mM_SA_P Parameter: Tissue Value: Aerial
  misc_feature: MA Experiment 20000182 PARAMETER Experiment Name: At_2mM_SA_P Parameter: Treatment Value: 2mM SA vs. No Treatment
  misc_feature: MA Experiment ID: 20000185 Result: Up-regulated in Transcription
  misc_feature: MA Experiment 20000185 PARAMETER Experiment Name: At_Roots__P Parameter: Age (day) Value: 7 vs. 21
  misc_feature: MA Experiment 20000185 PARAMETER Experiment Name: At_Roots__P Parameter: Organism Value: A. thaliana
  misc_feature: MA Experiment 20000185 PARAMETER Experiment Name: At_Roots__P Parameter: Tissue Value: Roots vs. Whole Plant
  misc_feature: MA Experiment ID: 20000234 Result: Up-regulated in Transcription
  misc_feature: MA Experiment 20000234 PARAMETER Experiment Name: At_Siliques_P Parameter: Age (day) Value: 21
  misc_feature: MA Experiment 20000234 PARAMETER Experiment Name: At_Siliques_P Parameter: Organism Value: A. thaliana
  misc_feature: MA Experiment 20000234 PARAMETER Experiment Name: At_Siliques_P Parameter: Plant Line Value: WS
  misc_feature: MA Experiment 20000234 PARAMETER Experiment Name: At_Siliques_P Parameter: Tissue Value: Less Than 5mm Siliques vs. Whole Plant
  misc_feature: MA Experiment ID: 20000235 Result: Up-regulated in Transcription
  misc_feature: MA Experiment 20000235 PARAMETER Experiment Name: At_Siliques_P Parameter: Age (day) Value: 21
  misc_feature: MA Experiment 20000235 PARAMETER Experiment Name: At_Siliques_P Parameter: Organism Value: A. thaliana
  misc_feature: MA Experiment 20000235 PARAMETER Experiment Name: At_Siliques_P Parameter: Plant Line Value: WS
  misc_feature: MA Experiment 20000235 PARAMETER Experiment Name: At_Siliques_P Parameter: Tissue Value: 5-10mm Siliques vs. Whole Plant
  misc_feature: MA Experiment ID: 20000439 Result: Up-regulated in Transcription
  misc_feature: MA Experiment 20000439 PARAMETER Experiment Name: At_Roots__P Parameter: Age (day) Value: 14 vs. 21
  misc_feature: MA Experiment 20000439 PARAMETER Experiment Name: At_Roots__P Parameter: Organism Value: A. thaliana
  misc_feature: MA Experiment 20000439 PARAMETER Experiment Name: At_Roots__P Parameter: Tissue Value: Roots vs. Whole Plant
  misc_feature: MA Experiment ID: 20000443 Result: Down-regulated in Transcription
  misc_feature: MA Experiment 20000443 PARAMETER Experiment Name: At_1uM_BR-BRZ__P Parameter: Tissue Value: Shoot Apices
  misc_feature: MA Experiment 20000443 PARAMETER Experiment Name: At_1uM_BR-BRZ__P Parameter: Treatment Value: 1uM BRZ vs. No Treatment
  misc_feature: MA Experiment ID: 20000451 Result: Up-regulated in Transcription
  misc_feature: MA Experiment 20000451 PARAMETER Experiment Name: At_CS6879_Shoots-Roots_P Parameter: Age (day) Value: 14
  misc_feature: MA Experiment 20000451 PARAMETER Experiment Name: At_CS6879_Shoots-Roots_P Parameter: Organism Value: A. thaliana
  misc_feature: MA Experiment 20000451 PARAMETER Experiment Name: At_CS6879_Shoots-Roots_P Parameter: Plant Line Value: CS6879 vs. WS
  misc_feature: MA Experiment 20000451 PARAMETER Experiment Name: At_CS6879_Shoots-Roots_P Parameter: Tissue Value: Roots
  misc_feature: MA Experiment ID: 20000453 Result: Up-regulated in Transcription
  misc_feature: MA Experiment 20000453 PARAMETER Experiment Name: At_100uM_ABA_P Parameter: Age (day) Value: 15
  misc_feature: MA Experiment 20000453 PARAMETER Experiment Name: At_100uM_ABA_P Parameter: Organism Value: A. thaliana
  misc_feature: MA Experiment 20000453 PARAMETER Experiment Name: At_100uM_ABA_P Parameter: Plant Line Value: WS
  misc_feature: MA Experiment 20000453 PARAMETER Experiment Name: At_100uM_ABA_P Parameter: Timepoint (hr) Value: 24
  misc_feature: MA Experiment 20000453 PARAMETER Experiment Name: At_100uM_ABA_P Parameter: Tissue Value: Aerial
  misc_feature: MA Experiment 20000453 PARAMETER Experiment Name: At_100uM_ABA_P Parameter: Treatment Value: 100uM ABA vs. No Treatment
  misc_feature: MA Experiment ID: 20000460 Result: Down-regulated in Transcription
  misc_feature: MA Experiment 20000460 PARAMETER Experiment Name: At_10percent_PEG_P Parameter: Age (day) Value: 12
  misc_feature: MA Experiment 20000460 PARAMETER Experiment Name: At_10percent_PEG_P Parameter: Organism Value: A. thaliana
  misc_feature: MA Experiment 20000460 PARAMETER Experiment Name: At_10percent_PEG_P Parameter: Plant Line Value: WS
  misc_feature: MA Experiment 20000460 PARAMETER Experiment Name: At_10percent_PEG_P Parameter: Timepoint (day) Value: 12
  misc_feature: MA Experiment 20000460 PARAMETER Experiment Name: At_10percent_PEG_P Parameter: Tissue Value: Whole Plant
  misc_feature: MA Experiment 20000460 PARAMETER Experiment Name: At_10percent_PEG_P Parameter: Treatment Value: 10percent PEG vs. No Treatment
  misc_feature: MA Experiment ID: 20000527 Result: Down-regulated in Transcription
  misc_feature: MA Experiment 20000527 PARAMETER Experiment Name: At_10percent_PEG_P Parameter: Age (day) Value: 20
  misc_feature: MA Experiment 20000527 PARAMETER Experiment Name: At_10percent_PEG_P Parameter: Organism Value: A. thaliana
  misc_feature: MA Experiment 20000527 PARAMETER Experiment Name: At_10percent_PEG_P Parameter: Plant Line Value: WS
  misc_feature: MA Experiment 20000527 PARAMETER Experiment Name: At_10percent_PEG_P Parameter: Timepoint (day) Value: 20
  misc_feature: MA Experiment 20000527 PARAMETER Experiment Name: At_10percent_PEG_P Parameter: Tissue Value: Whole Plant
  misc_feature: MA Experiment 20000527 PARAMETER Experiment Name: At_10percent_PEG_P Parameter: Treatment Value: 10percent PEG vs. No Treatment
  misc_feature: MA Experiment ID: 20000573 Result: Down-regulated in Transcription
  misc_feature: MA Experiment 20000573 PARAMETER Experiment Name: At_100uM_ABA_Mutants__P Parameter: Organism Value: A. thaliana
  misc_feature: MA Experiment 20000573 PARAMETER Experiment Name: At_100uM_ABA_Mutants__P Parameter: Plant Line Value: CS22 vs. Ler wt
  misc_feature: MA Experiment 20000573 PARAMETER Experiment Name: At_100uM_ABA_Mutants__P Parameter: Timepoint (hr) Value: N/A
  misc_feature: MA Experiment 20000573 PARAMETER Experiment Name: At_100uM_ABA_Mutants__P Parameter: Tissue Value: Whole Plant
  misc_feature: MA Experiment 20000573 PARAMETER Experiment Name: At_100uM_ABA_Mutants__P Parameter: Treatment Value: None
  misc_feature: MA Experiment ID: 20000574 Result: Down-regulated in Transcription
  misc_feature: MA Experiment 20000574 PARAMETER Experiment Name: At_100uM_ABA_Mutants__P Parameter: Organism Value: A. thaliana
  misc_feature: MA Experiment 20000574 PARAMETER Experiment Name: At_100uM_ABA_Mutants__P Parameter: Plant Line Value: CS23 vs. Ler wt
  misc_feature: MA Experiment 20000574 PARAMETER Experiment Name: At_100uM_ABA_Mutants__P Parameter: Timepoint (hr) Value: N/A
  misc_feature: MA Experiment 20000574 PARAMETER Experiment Name: At_100uM_ABA_Mutants__P Parameter: Tissue Value: Whole Plant
  misc_feature: MA Experiment 20000574 PARAMETER Experiment Name: At_100uM_ABA_Mutants__P Parameter: Treatment Value: None
  misc_feature: MA Experiment ID: 20000606 Result: Up-regulated in Transcription
  misc_feature: MA Experiment 20000606 PARAMETER Experiment Name: At_CS8548_Mutant_P Parameter: Age (day) Value: 14
  misc_feature: MA Experiment 20000606 PARAMETER Experiment Name: At_CS8548_Mutant_P Parameter: Plant Line Value: CS8548 vs. wt
  misc_feature: MA Experiment 20000606 PARAMETER Experiment Name: At_CS8548_Mutant_P Parameter: Tissue Value: Whole Plant
  misc_feature: MA Experiment ID: 20001450 Result: Down-regulated in Transcription
  misc_feature: MA Experiment 20001450 PARAMETER Experiment Name: At_Far-red-induction_P Parameter: Age (day) Value: 7
  misc_feature: MA Experiment 20001450 PARAMETER Experiment Name: At_Far-red-induction_P Parameter: Light Value: Far-red vs. White
  misc_feature: MA Experiment 20001450 PARAMETER Experiment Name: At_Far-red-induction_P Parameter: Organism Value: A. thaliana
  misc_feature: MA Experiment 20001450 PARAMETER Experiment Name: At_Far-red-induction_P Parameter: Plant Line Value: Columbia
  misc_feature: MA Experiment 20001450 PARAMETER Experiment Name: At_Far-red-induction_P Parameter: Timepoint (hr) Value: 8
  misc_feature: MA Experiment 20001450 PARAMETER Experiment Name: At_Far-red-induction_P Parameter: Tissue Value: Whole Plant
  misc_feature: MA Experiment ID: 20001458 Result: Up-regulated in Transcription
  misc_feature: MA Experiment 20001458 PARAMETER Experiment Name: At_50mM_NH4NO3_L-to-H_P Parameter: Age (day) Value: Undefined
  misc_feature: MA Experiment 20001458 PARAMETER Experiment Name: At_50mM_NH4NO3_L-to-H_P Parameter: Organism Value: Undefined
  misc_feature: MA Experiment 20001458 PARAMETER Experiment Name: At_50mM_NH4NO3_L-to-H_P Parameter: Plant Line Value: Undefined
  misc_feature: MA Experiment 20001458 PARAMETER Experiment Name: At_50mM_NH4NO3_L-to-H_P Parameter: Timepoint (hr) Value: 2
  misc_feature: MA Experiment 20001458 PARAMETER Experiment Name: At_50mM_NH4NO3_L-to-H_P Parameter: Tissue Value: Siliques
  misc_feature: MA Experiment 20001458 PARAMETER Experiment Name: At_50mM_NH4NO3_L-to-H_P Parameter: Treatment Value: 50mM NH4NO3 vs. 100mM Manitol
  misc_feature: MA Experiment ID: 20001459 Result: Up-regulated in Transcription
  misc_feature: MA Experiment 20001459 PARAMETER Experiment Name: At_50mM_NH4NO3_L-to-H_P Parameter: Age (day) Value: Undefined
  misc_feature: MA Experiment 20001459 PARAMETER Experiment Name: At_50mM_NH4NO3_L-to-H_P Parameter: Organism Value: Undefined
  misc_feature: MA Experiment 20001459 PARAMETER Experiment Name: At_50mM_NH4NO3_L-to-H_P Parameter: Plant Line Value: Undefined
  misc_feature: MA Experiment 20001459 PARAMETER Experiment Name: At_50mM_NH4NO3_L-to-H_P Parameter: Timepoint (hr) Value: 4
  misc_feature: MA Experiment 20001459 PARAMETER Experiment Name: At_50mM_NH4NO3_L-to-H_P Parameter: Tissue Value: Siliques
  misc_feature: MA Experiment 20001459 PARAMETER Experiment Name: At_50mM_NH4NO3_L-to-H_P Parameter: Treatment Value: 50mM NH4NO3 vs. 100mM Manitol
  misc_feature: MA Experiment ID: 20001554 Result: Up-regulated in Transcription
  misc_feature: MA Experiment 20001554 PARAMETER Experiment Name: At_Drought_Soil_Dry_P Parameter: Age (day) Value: 21
  misc_feature: MA Experiment 20001554 PARAMETER Experiment Name: At_Drought_Soil_Dry_P Parameter: Organism Value: A. thaliana
  misc_feature: MA Experiment 20001554 PARAMETER Experiment Name: At_Drought_Soil_Dry_P Parameter: Plant Line Value: WS
  misc_feature: MA Experiment 20001554 PARAMETER Experiment Name: At_Drought_Soil_Dry_P Parameter: Post Timepoint (hr) Value: None
  misc_feature: MA Experiment 20001554 PARAMETER Experiment Name: At_Drought_Soil_Dry_P Parameter: Post-Treatment Value: None
  misc_feature: MA Experiment 20001554 PARAMETER Experiment Name: At_Drought_Soil_Dry_P Parameter: Timepoint (day) Value: 7
  misc_feature: MA Experiment 20001554 PARAMETER Experiment Name: At_Drought_Soil_Dry_P Parameter: Treatment Value: Drought vs. No Drought
  misc_feature: MA Experiment ID: 20001555 Result: Up-regulated in Transcription
  misc_feature: MA Experiment 20001555 PARAMETER Experiment Name: At_Drought_Soil_Dry_P Parameter: Age (day) Value: 24
  misc_feature: MA Experiment 20001555 PARAMETER Experiment Name: At_Drought_Soil_Dry_P Parameter: Organism Value: A. thaliana
  misc_feature: MA Experiment 20001555 PARAMETER Experiment Name: At_Drought_Soil_Dry_P Parameter: Plant Line Value: WS
  misc_feature: MA Experiment 20001555 PARAMETER Experiment Name: At_Drought_Soil_Dry_P Parameter: Post Timepoint (hr) Value: None
  misc_feature: MA Experiment 20001555 PARAMETER Experiment Name: At_Drought_Soil_Dry_P Parameter: Post-Treatment Value: None
  misc_feature: MA Experiment 20001555 PARAMETER Experiment Name: At_Drought_Soil_Dry_P Parameter: Timepoint (day) Value: 10
  misc_feature: MA Experiment 20001555 PARAMETER Experiment Name: At_Drought_Soil_Dry_P Parameter: Treatment Value: Drought vs. No Drought
  misc_feature: MA Experiment ID: 20001556 Result: Up-regulated in Transcription
  misc_feature: MA Experiment 20001556 PARAMETER Experiment Name: At_Drought_Soil_Dry_P Parameter: Age (day) Value: 26
  misc_feature: MA Experiment 20001556 PARAMETER Experiment Name: At_Drought_Soil_Dry_P Parameter: Organism Value: A. thaliana
  misc_feature: MA Experiment 20001556 PARAMETER Experiment Name: At_Drought_Soil_Dry_P Parameter: Plant Line Value: WS
  misc_feature: MA Experiment 20001556 PARAMETER Experiment Name: At_Drought_Soil_Dry_P Parameter: Post Timepoint (hr) Value: None
  misc_feature: MA Experiment 20001556 PARAMETER Experiment Name: At_Drought_Soil_Dry_P Parameter: Post-Treatment Value: None
  misc_feature: MA Experiment 20001556 PARAMETER Experiment Name: At_Drought_Soil_Dry_P Parameter: Timepoint (day) Value: 12
  misc_feature: MA Experiment 20001556 PARAMETER Experiment Name: At_Drought_Soil_Dry_P Parameter: Treatment Value: Drought vs. No Drought
  misc_feature: MA Experiment ID: 20001558 Result: Down-regulated in Transcription
  misc_feature: MA Experiment 20001558 PARAMETER Experiment Name: At_Drought_Soil_Dry_P Parameter: Age (day) Value: 27
  misc_feature: MA Experiment 20001558 PARAMETER Experiment Name: At_Drought_Soil_Dry_P Parameter: Organism Value: A. thaliana
  misc_feature: MA Experiment 20001558 PARAMETER Experiment Name: At_Drought_Soil_Dry_P Parameter: Plant Line Value: WS
  misc_feature: MA Experiment 20001558 PARAMETER Experiment Name: At_Drought_Soil_Dry_P Parameter: Post Timepoint (hr) Value: 6
  misc_feature: MA Experiment 20001558 PARAMETER Experiment Name: At_Drought_Soil_Dry_P Parameter: Post-Treatment Value: Re-Water vs. No Drought
  misc_feature: MA Experiment 20001558 PARAMETER Experiment Name: At_Drought_Soil_Dry_P Parameter: Timepoint (day) Value: 13
  misc_feature: MA Experiment 20001558 PARAMETER Experiment Name: At_Drought_Soil_Dry_P Parameter: Treatment Value: Drought vs. No Drought
  misc_feature: MA Experiment ID: 20001559 Result: Up-regulated in Transcription
  misc_feature: MA Experiment 20001559 PARAMETER Experiment Name: At_Drought_Soil_Dry_P Parameter: Age (day) Value: 28
  misc_feature: MA Experiment 20001559 PARAMETER Experiment Name: At_Drought_Soil_Dry_P Parameter: Organism Value: A. thaliana
  misc_feature: MA Experiment 20001559 PARAMETER Experiment Name: At_Drought_Soil_Dry_P Parameter: Plant Line Value: WS
  misc_feature: MA Experiment 20001559 PARAMETER Experiment Name: At_Drought_Soil_Dry_P Parameter: Post Timepoint (hr) Value: 29
  misc_feature: MA Experiment 20001559 PARAMETER Experiment Name: At_Drought_Soil_Dry_P Parameter: Post-Treatment Value: Re-Water vs. No Drought
  misc_feature: MA Experiment 20001559 PARAMETER Experiment Name: At_Drought_Soil_Dry_P Parameter: Timepoint (day) Value: 14
  misc_feature: MA Experiment 20001559 PARAMETER Experiment Name: At_Drought_Soil_Dry_P Parameter: Treatment Value: Drought vs. No Drought
  misc_feature: MA Experiment ID: 20001560 Result: Down-regulated in Transcription
  misc_feature: MA Experiment 20001560 PARAMETER Experiment Name: At_Drought_Soil_Dry_P Parameter: Age (day) Value: 28
  misc_feature: MA Experiment 20001560 PARAMETER Experiment Name: At_Drought_Soil_Dry_P Parameter: Organism Value: A. thaliana
  misc_feature: MA Experiment 20001560 PARAMETER Experiment Name: At_Drought_Soil_Dry_P Parameter: Plant Line Value: WS
  misc_feature: MA Experiment 20001560 PARAMETER Experiment Name: At_Drought_Soil_Dry_P Parameter: Post Timepoint (hr) Value: None
  misc_feature: MA Experiment 20001560 PARAMETER Experiment Name: At_Drought_Soil_Dry_P Parameter: Post-Treatment Value: None
  misc_feature: MA Experiment 20001560 PARAMETER Experiment Name: At_Drought_Soil_Dry_P Parameter: Timepoint (day) Value: 14
  misc_feature: MA Experiment 20001560 PARAMETER Experiment Name: At_Drought_Soil_Dry_P Parameter: Treatment Value: Drought vs. No Drought
  misc_feature: MA Experiment ID: 20001756 Result: Up-regulated in Transcription
  misc_feature: MA Experiment 20001756 PARAMETER Experiment Name: At_50mM_NH4NO3_L-to-H_P Parameter: Timepoint (hr) Value: 4
  misc_feature: MA Experiment 20001756 PARAMETER Experiment Name: At_50mM_NH4NO3_L-to-H_P Parameter: Tissue Value: Leaf
  misc_feature: MA Experiment 20001756 PARAMETER Experiment Name: At_50mM_NH4NO3_L-to-H_P Parameter: Treatment Value: 50mM NH4NO3 vs 100mM Mannitol
  misc_feature: MA Experiment ID: 20001761 Result: Up-regulated in Transcription
  misc_feature: MA Experiment 20001761 PARAMETER Experiment Name: At_50mM_NH4NO3_L-to-H_P Parameter: Timepoint (hr) Value: 4
  misc_feature: MA Experiment 20001761 PARAMETER Experiment Name: At_50mM_NH4NO3_L-to-H_P Parameter: Tissue Value: Siliques
  misc_feature: MA Experiment 20001761 PARAMETER Experiment Name: At_50mM_NH4NO3_L-to-H_P Parameter: Treatment Value: 50mM NH4NO3 vs 100mM Mannitol
  misc_feature: MA Experiment ID: 20001771 Result: Up-regulated in Transcription
  misc_feature: MA Experiment 20001771 PARAMETER Experiment Name: At_Far-red-enriched-adult_P Parameter: Age (day) Value: 28
  misc_feature: MA Experiment 20001771 PARAMETER Experiment Name: At_Far-red-enriched-adult_P Parameter: Light Value: Far-red enriched vs. White
  misc_feature: MA Experiment 20001771 PARAMETER Experiment Name: At_Far-red-enriched-adult_P Parameter: Organism Value: A. thaliana
  misc_feature: MA Experiment 20001771 PARAMETER Experiment Name: At_Far-red-enriched-adult_P Parameter: Plant Line Value: Columbia
  misc_feature: MA Experiment 20001771 PARAMETER Experiment Name: At_Far-red-enriched-adult_P Parameter: Timepoint (hr) Value: 16
  misc_feature: MA Experiment 20001771 PARAMETER Experiment Name: At_Far-red-enriched-adult_P Parameter: Tissue Value: Aerial
  misc_feature: MA Experiment ID: 20001906 Result: Up-regulated in Transcription
  misc_feature: MA Experiment 20001906 PARAMETER Experiment Name: At_Drought_Reproduction_P Parameter: Age (day) Value: 35
  misc_feature: MA Experiment 20001906 PARAMETER Experiment Name: At_Drought_Reproduction_P Parameter: Organism Value: A. thaliana
  misc_feature: MA Experiment 20001906 PARAMETER Experiment Name: At_Drought_Reproduction_P Parameter: Plant Line Value: WS
  misc_feature: MA Experiment 20001906 PARAMETER Experiment Name: At_Drought_Reproduction_P Parameter: Timepoint (day) Value: 5
  misc_feature: MA Experiment 20001906 PARAMETER Experiment Name: At_Drought_Reproduction_P Parameter: Tissue Value: Siliques
  misc_feature: MA Experiment 20001906 PARAMETER Experiment Name: At_Drought_Reproduction_P Parameter: Treatment Value: Drought vs. No Drought
  misc_feature: MA Experiment ID: 20001911 Result: Down-regulated in Transcription
  misc_feature: MA Experiment 20001911 PARAMETER Experiment Name: At_Drought_Reproduction_P Parameter: Age (day) Value: 40
  misc_feature: MA Experiment 20001911 PARAMETER Experiment Name: At_Drought_Reproduction_P Parameter: Organism Value: A. thaliana
  misc_feature: MA Experiment 20001911 PARAMETER Experiment Name: At_Drought_Reproduction_P Parameter: Plant Line Value: WS
  misc_feature: MA Experiment 20001911 PARAMETER Experiment Name: At_Drought_Reproduction_P Parameter: Timepoint (day) Value: 10
  misc_feature: MA Experiment 20001911 PARAMETER Experiment Name: At_Drought_Reproduction_P Parameter: Tissue Value: Flowers
  misc_feature: MA Experiment 20001911 PARAMETER Experiment Name: At_Drought_Reproduction_P Parameter: Treatment Value: Drought vs. No Drought
atgaacagagacgaaatattgtccaaattcatttcttacagtaacaaacaggaaaaaaagatggagagaagcttgaagaagacgaagaacaattataacaactccataaagagcaatcttatgaaagatgatgaattgtttcatgtgattcacaaagttccctgtggagacactccttatgtcagagccaaacatgctcagttgatagagaagaacccggagatggcaatagtgtggttttggaaagccatcaacactggagacagagtagacagtgccctcaaggacatggctgttgtaatgaaacaacttgaccgttctgaagaagctattgaagctatcaaatctttccgtcctcgttgttccaagaattcccaagattcccttgacaatgtcctcatcgacttatacaagaaatgtgggagaatggaggagcaagttgagttgttgaagaggaaattaaggcagatctatcaaggagaagctttcaatggtaaacctaccaaaaccgctcgctcccacggaaaaaagtttcaagtgactgttcaacaagaaatctcaagattactgggtaacttggggtgggcatatatgcaacaagccaagtacttatcggccgaagcggtatacagaaaagcccagatggttgagccagatgctaacaaatcgtgcaaccttgcgatgtgccttatcaaacaaggcaggtttgaggagggaagattggttcttgacgatgttctcgagtatagggttttgggtgcggatgattgtagaacaaggcaacgggccgaagagcttctgagtgaattagagtcttcgctgccacggatgcgagatgctgagatggaggatgtcttgggaaatatcttagacgatgactttgttcttgggcttgaagagatgacatccactagttttaaatctaagagactcccaatcttcgaacagatctcgtcttttagaaatacattagtttgctag

SEQ ID NO: 73645 - protein, 326 aa, Arabidopsis thaliana
  peptide (1)..(326): Ceres Seq. ID no. 4973693
  misc_feature (187)..(220): Pfam Name: TPR Domain Pfam Description: TPR Domain
  misc_feature (1)..(326): Homolog of NCBI NO: 9758884 NR Description: gb|AAC72543.1~gene_id:K24G6.19~similar to unknown
  misc_feature (21)..(326): Homolog of NCBI NO: 30695554 NR Description: male sterility MS5 family [Arabidopsis thaliana] unknown protein [Arabidopsis thaliana]
  misc_feature (45)..(326): Homolog of NCBI NO: 3859116 NR Description: unknown [Oryza sativa]
  misc_feature (47)..(326): Homolog of NCBI NO: 25406811 NR Description: hypothetical protein [imported] - Arabidopsis
  misc_feature (47)..(326): Homolog of NCBI NO: 30678993 NR Description: male sterility MS5 family [Arabidopsis thaliana] unknown protein [Arabidopsis thaliana]
  misc_feature (45)..(276): Homolog of NCBI NO: 15230439 NR Description: MS5-like protein; protein id: At3g51280.1
  misc_feature (47)..(275): Homolog of NCBI NO: 3859112 NR Description: male sterility MS5 [Arabidopsis thaliana]
  misc_feature (47)..(275): Homolog of NCBI NO: 4028970 NR Description: pollenless3 [Arabidopsis thaliana]
  misc_feature (57)..(272): Homolog of NCBI NO: 29467532 NR Description: P0582D05.25 [Oryza sativa (japonica
  misc_feature (47)..(246): Homolog of NCBI NO: 15233432 NR Description: putative protein; protein id: At4g20900.1
MNRDEILSKFISYSNKQEKKMERSLKKTKNNYNNSIKSNLMKDDELFHVIHKVPCGDTPYVRAKHAQLIEKNPEMAIVWFWKAINTGDRVDSALKDMAVVMKQLDRSEEAIEAIKSFRPRCSKNSQDSLDNVLIDLYKKCGRMEEQVELLKRKLRQIYQGEAFNGKPTKTARSHGKKFQVTVQQEISRLLGNLGWAYMQQAKYLSAEAVYRKAQMVEPDANKSCNLAMCLIKQGRFEEGRLVLDDVLEYRVLGADDCRTRQRAEELLSELESSLPRMRDAEMEDVLGNILDDDFVLGLEEMTSTSFKSKRLPIFEQISSFRNTLVC

SEQ ID NO: 73646 - protein, 306 aa, Arabidopsis thaliana; identical to SEQ ID NO: 71121
  peptide (1)..(306): Ceres Seq. ID no. 4973694
  misc_feature (167)..(200): Pfam Name: TPR Domain Pfam Description: TPR Domain
  misc_feature (1)..(306): Homolog of NCBI NO: 9758884 NR Description: gb|AAC72543.1~gene_id:K24G6.19~similar to unknown
  misc_feature (1)..(306): Homolog of NCBI NO: 30695554 NR Description: male sterility MS5 family [Arabidopsis thaliana] unknown protein [Arabidopsis thaliana]
  misc_feature (25)..(306): Homolog of NCBI NO: 3859116 NR Description: unknown [Oryza sativa]
  misc_feature (27)..(306): Homolog of NCBI NO: 25406811 NR Description: hypothetical protein [imported] - Arabidopsis
  misc_feature (27)..(306): Homolog of NCBI NO: 30678993 NR Description: male sterility MS5 family [Arabidopsis thaliana] unknown protein [Arabidopsis thaliana]
  misc_feature (25)..(256): Homolog of NCBI NO: 15230439 NR Description: MS5-like protein; protein id: At3g51280.1
  misc_feature (27)..(255): Homolog of NCBI NO: 3859112 NR Description: male sterility MS5 [Arabidopsis thaliana]
  misc_feature (27)..(255): Homolog of NCBI NO: 4028970 NR Description: pollenless3 [Arabidopsis thaliana]
  misc_feature (37)..(252): Homolog of NCBI NO: 29467532 NR Description: P0582D05.25 [Oryza sativa (japonica
  misc_feature (27)..(226): Homolog of NCBI NO: 15233432 NR Description: putative protein; protein id: At4g20900.1

SEQ ID NO: 73647 - protein, 286 aa, Arabidopsis thaliana; identical to SEQ ID NO: 71122
  peptide (1)..(286): Ceres Seq. ID no. 4973695
  misc_feature (147)..(180): Pfam Name: TPR Domain Pfam Description: TPR Domain
  misc_feature (1)..(286): Homolog of NCBI NO: 9758884 NR Description: gb|AAC72543.1~gene_id:K24G6.19~similar to unknown
  misc_feature (1)..(286): Homolog of NCBI NO: 30695554 NR Description: male sterility MS5 family [Arabidopsis thaliana] unknown protein [Arabidopsis thaliana]
  misc_feature (5)..(286): Homolog of NCBI NO: 3859116 NR Description: unknown [Oryza sativa]
  misc_feature (7)..(286): Homolog of NCBI NO: 25406811 NR Description: hypothetical protein [imported] - Arabidopsis
  misc_feature (7)..(286): Homolog of NCBI NO: 30678993 NR Description: male sterility MS5 family [Arabidopsis thaliana] unknown protein [Arabidopsis thaliana]
  misc_feature (5)..(236): Homolog of NCBI NO: 15230439 NR Description: MS5-like protein; protein id: At3g51280.1
  misc_feature (7)..(235): Homolog of NCBI NO: 3859112 NR Description: male sterility MS5 [Arabidopsis thaliana]
  misc_feature (7)..(235): Homolog of NCBI NO: 4028970 NR Description: pollenless3 [Arabidopsis thaliana]
  misc_feature (17)..(232): Homolog of NCBI NO: 29467532 NR Description: P0582D05.25 [Oryza sativa (japonica
  misc_feature (7)..(206): Homolog of NCBI NO: 15233432 NR Description: putative protein; protein id: At4g20900.1

SEQ ID NO: 73648 - DNA, 663 bp, Arabidopsis thaliana
  misc_feature (1)..(663): Ceres Seq. ID no. 4973726
  misc_feature: MA Experiment ID: 20000185 Result: Up-regulated in Transcription
  misc_feature: MA Experiment 20000185 PARAMETER Experiment Name: At_Roots__P Parameter: Age (day) Value: 7 vs. 21
  misc_feature: MA Experiment 20000185 PARAMETER Experiment Name: At_Roots__P Parameter: Organism Value: A. thaliana
  misc_feature: MA Experiment 20000185 PARAMETER Experiment Name: At_Roots__P Parameter: Tissue Value: Roots vs. Whole Plant
  misc_feature: MA Experiment ID: 20000439 Result: Up-regulated in Transcription
  misc_feature: MA Experiment 20000439 PARAMETER Experiment Name: At_Roots__P Parameter: Age (day) Value: 14 vs. 21
  misc_feature: MA Experiment 20000439 PARAMETER Experiment Name: At_Roots__P Parameter: Organism Value: A. thaliana
  misc_feature: MA Experiment 20000439 PARAMETER Experiment Name: At_Roots__P Parameter: Tissue Value: Roots vs. Whole Plant
atggagtttatgggtactataaacttgcaacaatatagcaacaagcaaaaaatacttttggtcggagaaggagacttttcgttttctttgtctctagccagagtttttggttctgccacaaacatcactgcgacctctcttgacactcgagaggagctagggattaagtacactgatggaaaagcaaatgtggaagggttggagttgtttgggtgcacagtggtccacggtgttaacgtccactccatgtcctcagactatcgcttaggtcgatacgatagaatcatctttaattttccccattcaggattaggttttggttcagagcacgacatcttcttcattatgttacaccaaggactcgtcagaggatttctggagagtgcaagaaagatgctgaaagatgaagatggagagattcatgtgacacataagacaacagacccatttaacaggtgggggattgagactctagctggagaaaagggtttgcgtctaatcggggagatcgaatttcacaaatgggcatttccaggttactccaacaagaaaggaggtggaagtaactgtaactctacctttctgttaagaaggatactttccttactagattatcatgtatattctagtgtatattcctttagaatatacatgataatctag

SEQ ID NO: 73649 - protein, 220 aa, Arabidopsis thaliana
  peptide (1)..(220): Ceres Seq. ID no. 4973727
  misc_feature (1)..(220): Homolog of NCBI NO: 15241118 NR Description: putative protein; protein id: At5g56060.1 thaliana] >gi|9758626|dbj|BAB09288.1|
  misc_feature (1)..(191): Homolog of NCBI NO: 15238688 NR Description: putative protein; protein id: At5g25030.1
  misc_feature (6)..(194): Homolog of NCBI NO: 22327873 NR Description: similar to KH domain protein; protein id:
  misc_feature (9)..(196): Homolog of NCBI NO: 18405537 NR Description: hypothetical protein; protein id: At1g55790.1
  misc_feature (9)..(117): Homolog of NCBI NO: 8778493 NR Description: F20N2.17 [Arabidopsis thaliana]
  misc_feature (118)..(196): Homolog of NCBI NO: 8778493 NR Description: F20N2.17 [Arabidopsis thaliana]
  misc_feature (41)..(187): Homolog of NCBI NO: 15236738 NR Description: KH domain protein; protein id: At4g26480.1
  misc_feature (9)..(111): Homolog of NCBI NO: 8778331 NR Description: F14J16.3 [Arabidopsis thaliana]
  misc_feature (118)..(196): Homolog of NCBI NO: 8778331 NR Description: F14J16.3 [Arabidopsis thaliana]
  misc_feature (56)..(196): Homolog of NCBI NO: 8778492 NR Description: F20N2.18 [Arabidopsis thaliana]
MEFMGTINLQQYSNKQKILLVGEGDFSFSLSLARVFGSATNITATSLDTREELGIKYTDGKANVEGLELFGCTVVHGVNVHSMSSDYRLGRYDRIIFNFPHSGLGFGSEHDIFFIMLHQGLVRGFLESARKMLKDEDGEIHVTHKTTDPFNRWGIETLAGEKGLRLIGEIEFHKWAFPGYSNKKGGGSNCNSTFLLRRILSLLDYHVYSSVYSFRIYMII

SEQ ID NO: 73650 - protein, 217 aa, Arabidopsis thaliana
  peptide (1)..(217): Ceres Seq. ID no. 4973728
  misc_feature (1)..(217): Homolog of NCBI NO: 15241118 NR Description: putative protein; protein id: At5g56060.1 thaliana] >gi|9758626|dbj|BAB09288.1|
  misc_feature (1)..(188): Homolog of NCBI NO: 15238688 NR Description: putative protein; protein id: At5g25030.1
  misc_feature (3)..(191): Homolog of NCBI NO: 22327873 NR Description: similar to KH domain protein; protein id:
  misc_feature (6)..(193): Homolog of NCBI NO: 18405537 NR Description: hypothetical protein; protein id: At1g55790.1
  misc_feature (6)..(114): Homolog of NCBI NO: 8778493 NR Description: F20N2.17 [Arabidopsis thaliana]
  misc_feature (115)..(193): Homolog of NCBI NO: 8778493 NR Description: F20N2.17 [Arabidopsis thaliana]
  misc_feature (38)..(184): Homolog of NCBI NO: 15236738 NR Description: KH domain protein; protein id: At4g26480.1
  misc_feature (6)..(108): Homolog of NCBI NO: 8778331 NR Description: F14J16.3 [Arabidopsis thaliana]
  misc_feature (115)..(193): Homolog of NCBI NO: 8778331 NR Description: F14J16.3 [Arabidopsis thaliana]
  misc_feature (53)..(193): Homolog of NCBI NO: 8778492 NR Description: F20N2.18 [Arabidopsis thaliana]
MGTINLQQYSNKQKILLVGEGDFSFSLSLARVFGSATNITATSLDTREELGIKYTDGKANVEGLELFGCTVVHGVNVHSMSSDYRLGRYDRIIFNFPHSGLGFGSEHDIFFIMLHQGLVRGFLESARKMLKDEDGEIHVTHKTTDPFNRWGIETLAGEKGLRLIGEIEFHKWAFPGYSNKKGGGSNCNSTFLLRRILSLLDYHVYSSVYSFRIYMII

SEQ ID NO: 73651 - protein, 138 aa, Arabidopsis thaliana
  peptide (1)..(138): Ceres Seq. ID no. 4973729
  misc_feature (1)..(138): Homolog of NCBI NO: 15241118 NR Description: putative protein; protein id: At5g56060.1 thaliana] >gi|9758626|dbj|BAB09288.1|
  misc_feature (1)..(109): Homolog of NCBI NO: 15238688 NR Description: putative protein; protein id: At5g25030.1
  misc_feature (1)..(112): Homolog of NCBI NO: 22327873 NR Description: similar to KH domain protein; protein id:
  misc_feature (1)..(114): Homolog of NCBI NO: 18405537 NR Description: hypothetical protein; protein id: At1g55790.1
  misc_feature (1)..(35): Homolog of NCBI NO: 8778493 NR Description: F20N2.17 [Arabidopsis thaliana]
  misc_feature (36)..(114): Homolog of NCBI NO: 8778493 NR Description: F20N2.17 [Arabidopsis thaliana]
  misc_feature (1)..(105): Homolog of NCBI NO: 15236738 NR Description: KH domain protein; protein id: At4g26480.1
  misc_feature (1)..(29): Homolog of NCBI NO: 8778331 NR Description: F14J16.3 [Arabidopsis thaliana]
  misc_feature (36)..(114): Homolog of NCBI NO: 8778331 NR Description: F14J16.3 [Arabidopsis thaliana]
  misc_feature (1)..(114): Homolog of NCBI NO: 8778492 NR Description: F20N2.18 [Arabidopsis thaliana]
MSSDYRLGRYDRIIFNFPHSGLGFGSEHDIFFIMLHQGLVRGFLESARKMLKDEDGEIHVTHKTTDPFNRWGIETLAGEKGLRLIGEIEFHKWAFPGYSNKKGGGSNCNSTFLLRRILSLLDYHVYSSVYSFRIYMII

SEQ ID NO: 73652 - DNA, 663 bp, Arabidopsis thaliana
  misc_feature (1)..(663): Ceres Seq. ID no. 4973949
  misc_feature: MA Experiment ID: 20000264 Result: Up-regulated in Transcription
  misc_feature: MA Experiment 20000264 PARAMETER Experiment Name: At_Open_Flower_P Parameter: Age (day) Value: 21
  misc_feature: MA Experiment 20000264 PARAMETER Experiment Name: At_Open_Flower_P Parameter: Plant Line Value: WS
  misc_feature: MA Experiment 20000264 PARAMETER Experiment Name: At_Open_Flower_P Parameter: Tissue Value: Open Flower vs. Whole Plant
  misc_feature: MA Experiment ID: 20000286 Result: Up-regulated in Transcription
  misc_feature: MA Experiment 20000286 PARAMETER Experiment Name: At_Open_Flower_P Parameter: Age (day) Value: 21
  misc_feature: MA Experiment 20000286 PARAMETER Experiment Name: At_Open_Flower_P Parameter: Plant Line Value: WS
  misc_feature: MA Experiment 20000286 PARAMETER Experiment Name: At_Open_Flower_P Parameter: Tissue Value: Half Open vs. Whole Plant
atgtctgccatggtctcggccttgacacaggtggtttctgctcgctctcagactgaggctgaaggtgctcactctcagactgaggctgaaggtgctcactcttcttcctcttcggctggacataaaagaggatggcttggaatcgattctgctcctattccctcatcatttgctcgtgtagactcttcacataatccgatcgaggaagcaagggagaaaaaaaggaggtacagaggagtaaggcagagaccatggggcaaatgggcagctgagatacgtgatccacatagagccgctagggtttggctcgggacgtttgatacagcggaggccgcggctagagcctacgacgaggctgcactccggttccgtggaaataaagcaaagctaaatttcccagaggatgtaaggattcttcctcctccccctcctcttcttcgttcaccagctgacacggtggcgaataaagcagaagaggatctgataaattattggagttatacaaagttgttgcaaagttcaggccaacggtcatttctcgagcgaggacaagaagagagtagtaacatatttgaacattcaccaatggaacaacctctgcctccttcaagttctggtccaagttcctctaattttcctgcaccttctctacctaatacatag

SEQ ID NO: 73653 - protein, 220 aa, Arabidopsis thaliana
  peptide (1)..(220): Ceres Seq. ID no. 4973950
  misc_feature (74)..(138): Pfam Name: AP2 domain Pfam Description: AP2 domain
  misc_feature (1)..(220): Homolog of NCBI NO: 15240610 NR Description: putative protein; protein id: At5g50080.1 thaliana] >gi|10177219|dbj|BAB10294.1| contains similarity to AP2
  misc_feature (1)..(220): Homolog of NCBI NO: 34221731 NR Description: putative AP2 domain transcription factor
  misc_feature (55)..(172): Homolog of NCBI NO: 34908616 NR Description: P0677H08.8 [Oryza sativa (japonica
  misc_feature (72)..(171): Homolog of NCBI NO: 15238232 NR Description: putative protein; protein id: At5g64750.1 thaliana] >gi|10177206|dbj|BAB10308.1| contains similarity to factor~gene_id:MVP7.8 [Arabidopsis thaliana]
  misc_feature (52)..(150): Homolog of NCBI NO: 15226153 NR Description: putative AP2 domain transcription factor; protein At2g33710.1 [Arabidopsis thaliana] >gi|25408300|pir||F84748
  misc_feature (28)..(136): Homolog of NCBI NO: 15218275 NR Description: AP2 domain protein RAP2.6; protein id: supported by cDNA: gi_17065541 [Arabidopsis thaliana]
  misc_feature (72)..(136): Homolog of NCBI NO: 2281637 NR Description: AP2 domain containing protein RAP2.6 [Arabidopsis
  misc_feature (4)..(137): Homolog of NCBI NO: 38347164 NR Description: OSJNBa0039C07.10 [Oryza sativa (japonica
  misc_feature (2)..(136): Homolog of NCBI NO: 33519168 NR Description: AP2 domain-containing protein AP29 [Oryza sativa
  misc_feature (71)..(163): Homolog of NCBI NO: 10798644 NR Description: AP2 domain-containing transcription factor
MSAMVSALTQVVSARSQTEAEGAHSQTEAEGAHSSSSSAGHKRGWLGIDSAPIPSSFARVDSSHNPIEEAREKKRRYRGVRQRPWGKWAAEIRDPHRAARVWLGTFDTAEAAARAYDEAALRFRGNKAKLNFPEDVRILPPPPPLLRSPADTVANKAEEDLINYWSYTKLLQSSGQRSFLERGQEESSNIFEHSPMEQPLPPSSSGPSSSNFPAPSLPNT

SEQ ID NO: 73654 - protein, 217 aa, Arabidopsis thaliana
  peptide (1)..(217): Ceres Seq. ID no. 4973951
  misc_feature (71)..(135): Pfam Name: AP2 domain Pfam Description: AP2 domain
  misc_feature (1)..(217): Homolog of NCBI NO: 15240610 NR Description: putative protein; protein id: At5g50080.1 thaliana] >gi|10177219|dbj|BAB10294.1| contains similarity to AP2
  misc_feature (1)..(217): Homolog of NCBI NO: 34221731 NR Description: putative AP2 domain transcription factor
  misc_feature (52)..(169): Homolog of NCBI NO: 34908616 NR Description: P0677H08.8 [Oryza sativa (japonica
  misc_feature (69)..(168): Homolog of NCBI NO: 15238232 NR Description: putative protein; protein id: At5g64750.1 thaliana] >gi|10177206|dbj|BAB10308.1| contains similarity to factor~gene_id:MVP7.8 [Arabidopsis thaliana]
  misc_feature (49)..(147): Homolog of NCBI NO: 15226153 NR Description: putative AP2 domain transcription factor; protein At2g33710.1 [Arabidopsis thaliana] >gi|25408300|pir||F84748
  misc_feature (25)..(133): Homolog of NCBI NO: 15218275 NR Description: AP2 domain protein RAP2.6; protein id: supported by cDNA: gi_17065541 [Arabidopsis thaliana]
  misc_feature (69)..(133): Homolog of NCBI NO: 2281637 NR Description: AP2 domain containing protein RAP2.6 [Arabidopsis
  misc_feature (1)..(134): Homolog of NCBI NO: 38347164 NR Description: OSJNBa0039C07.10 [Oryza sativa (japonica
  misc_feature (1)..(133): Homolog of NCBI NO: 33519168 NR Description: AP2 domain-containing protein AP29 [Oryza sativa
  misc_feature (68)..(160): Homolog of NCBI NO: 10798644 NR Description: AP2 domain-containing transcription factor
MVSALTQVVSARSQTEAEGAHSQTEAEGAHSSSSSAGHKRGWLGIDSAPIPSSFARVDSSHNPIEEAREKKRRYRGVRQRPWGKWAAEIRDPHRAARVWLGTFDTAEAAARAYDEAALRFRGNKAKLNFPEDVRILPPPPPLLRSPADTVANKAEEDLINYWSYTKLLQSSGQRSFLERGQEESSNIFEHSPMEQPLPPSSSGPSSSNFPAPSLPNT

SEQ ID NO: 73655 - DNA, 810 bp, Arabidopsis thaliana
  misc_feature (1)..(810): Ceres Seq. ID no. 4973980
  misc_feature: MA Experiment ID: 20000169 Result: Up-regulated in Transcription
  misc_feature: MA Experiment 20000169 PARAMETER Experiment Name: At_100uM_ABA_P Parameter: Age (day) Value: 14
  misc_feature: MA Experiment 20000169 PARAMETER Experiment Name: At_100uM_ABA_P Parameter: Organism Value: A. thaliana
  misc_feature: MA Experiment 20000169 PARAMETER Experiment Name: At_100uM_ABA_P Parameter: Plant Line Value: WS
  misc_feature: MA Experiment 20000169 PARAMETER Experiment Name: At_100uM_ABA_P Parameter: Timepoint (hr) Value: 6
  misc_feature: MA Experiment 20000169 PARAMETER Experiment Name: At_100uM_ABA_P Parameter: Tissue Value: Aerial
  misc_feature: MA Experiment 20000169 PARAMETER Experiment Name: At_100uM_ABA_P Parameter: Treatment Value: 100uM ABA vs. No Treatment
  misc_feature: MA Experiment ID: 20000171 Result: Up-regulated in Transcription
  misc_feature: MA Experiment 20000171 PARAMETER Experiment Name: At_42deg_Heat_P Parameter: Age (day) Value: 14
  misc_feature: MA Experiment 20000171 PARAMETER Experiment Name: At_42deg_Heat_P Parameter: Organism Value: A. thaliana
  misc_feature: MA Experiment 20000171 PARAMETER Experiment Name: At_42deg_Heat_P Parameter: Plant Line Value: WS
  misc_feature: MA Experiment 20000171 PARAMETER Experiment Name: At_42deg_Heat_P Parameter: Temperature (deg C) Value: 42 vs. 22
  misc_feature: MA Experiment 20000171 PARAMETER Experiment Name: At_42deg_Heat_P Parameter: Timepoint (hr) Value: 1
  misc_feature: MA Experiment 20000171 PARAMETER Experiment Name: At_42deg_Heat_P Parameter: Tissue Value: Aerial
  misc_feature: MA Experiment ID: 20000173 Result: Up-regulated in Transcription
  misc_feature: MA Experiment 20000173 PARAMETER Experiment Name: At_42deg_Heat_P Parameter: Age (day) Value: 14
  misc_feature: MA Experiment 20000173 PARAMETER Experiment Name: At_42deg_Heat_P Parameter: Organism Value: A. thaliana
  misc_feature: MA Experiment 20000173 PARAMETER Experiment Name: At_42deg_Heat_P Parameter: Plant Line Value: WS
  misc_feature: MA Experiment 20000173 PARAMETER Experiment Name: At_42deg_Heat_P Parameter: Temperature (deg C) Value: 42 vs. 22
  misc_feature: MA Experiment 20000173 PARAMETER Experiment Name: At_42deg_Heat_P Parameter: Timepoint (hr) Value: 6
  misc_feature: MA Experiment 20000173 PARAMETER Experiment Name: At_42deg_Heat_P Parameter: Tissue Value: Aerial
  misc_feature: MA Experiment ID: 20000227 Result: Down-regulated in Transcription
  misc_feature: MA Experiment 20000227 PARAMETER Experiment Name: At_Root-Tips-vs-Tops_P Parameter: Tissue Value: Root Tips vs. Root Tops
  misc_feature: MA Experiment ID: 20000234 Result: Down-regulated in Transcription
  misc_feature: MA Experiment 20000234 PARAMETER Experiment Name: At_Siliques_P Parameter: Age (day) Value: 21
  misc_feature: MA Experiment 20000234 PARAMETER Experiment Name: At_Siliques_P Parameter: Organism Value: A. thaliana
  misc_feature: MA Experiment 20000234 PARAMETER Experiment Name: At_Siliques_P Parameter: Plant Line Value: WS
  misc_feature: MA Experiment 20000234 PARAMETER Experiment Name: At_Siliques_P Parameter: Tissue Value: Less Than 5mm Siliques vs. Whole Plant
  misc_feature: MA Experiment ID: 20000235 Result: Down-regulated in Transcription
  misc_feature: MA Experiment 20000235 PARAMETER Experiment Name: At_Siliques_P Parameter: Age (day) Value: 21
  misc_feature: MA Experiment 20000235 PARAMETER Experiment Name: At_Siliques_P Parameter: Organism Value: A. thaliana
  misc_feature: MA Experiment 20000235 PARAMETER Experiment Name: At_Siliques_P Parameter: Plant Line Value: WS
  misc_feature: MA Experiment 20000235 PARAMETER Experiment Name: At_Siliques_P Parameter: Tissue Value: 5-10mm Siliques vs. Whole Plant
  misc_feature: MA Experiment ID: 20000264 Result: Down-regulated in Transcription
  misc_feature: MA Experiment 20000264 PARAMETER Experiment Name: At_Open_Flower_P Parameter: Age (day) Value: 21
  misc_feature: MA Experiment 20000264 PARAMETER Experiment Name: At_Open_Flower_P Parameter: Plant Line Value: WS
  misc_feature: MA Experiment 20000264 PARAMETER Experiment Name: At_Open_Flower_P Parameter: Tissue Value: Open Flower vs. Whole Plant
  misc_feature: MA Experiment ID: 20000265 Result: Down-regulated in Transcription
  misc_feature: MA Experiment 20000265 PARAMETER Experiment Name: At_Open_Flower_P Parameter: Age (day) Value: 21
  misc_feature: MA Experiment 20000265 PARAMETER Experiment Name: At_Open_Flower_P Parameter: Plant Line Value: WS
  misc_feature: MA Experiment 20000265 PARAMETER Experiment Name: At_Open_Flower_P Parameter: Tissue Value: Closed Flower vs. Whole Plant
  misc_feature: MA Experiment ID: 20000267 Result: Up-regulated in Transcription
  misc_feature: MA Experiment 20000267 PARAMETER Experiment Name: At_Drought_P Parameter: Age (day) Value: 7
  misc_feature: MA Experiment 20000267 PARAMETER Experiment Name: At_Drought_P Parameter: Organism Value: A. thaliana
  misc_feature: MA Experiment 20000267 PARAMETER Experiment Name: At_Drought_P Parameter: Plant Line Value: WS
  misc_feature: MA Experiment 20000267 PARAMETER Experiment Name: At_Drought_P Parameter: Timepoint (hr) Value: 6
  misc_feature: MA Experiment 20000267 PARAMETER Experiment Name: At_Drought_P Parameter: Tissue Value: Whole Plant
  misc_feature: MA Experiment 20000267 PARAMETER Experiment Name: At_Drought_P Parameter: Treatment Value: Drought vs. No Drought
  misc_feature: MA Experiment ID: 20000286 Result: Down-regulated in Transcription
  misc_feature: MA Experiment 20000286 PARAMETER Experiment Name: At_Open_Flower_P Parameter: Age (day) Value: 21
  misc_feature: MA Experiment 20000286 PARAMETER Experiment Name: At_Open_Flower_P Parameter: Plant Line Value: WS
  misc_feature: MA Experiment 20000286 PARAMETER Experiment Name: At_Open_Flower_P Parameter: Tissue Value: Half Open vs. Whole Plant
  misc_feature: MA Experiment ID: 20000436 Result: Up-regulated in Transcription
  misc_feature: MA Experiment 20000436 PARAMETER Experiment Name: At_Drought_P Parameter: Age (day) Value: 7
  misc_feature: MA Experiment 20000436 PARAMETER Experiment Name: At_Drought_P Parameter: Organism Value: A. thaliana
  misc_feature: MA Experiment 20000436 PARAMETER Experiment Name: At_Drought_P Parameter: Plant Line Value: WS
  misc_feature: MA Experiment 20000436 PARAMETER Experiment Name: At_Drought_P Parameter: Timepoint (hr) Value: 12
  misc_feature: MA Experiment 20000436 PARAMETER Experiment Name: At_Drought_P Parameter: Tissue Value: Whole Plant
  misc_feature: MA Experiment 20000436 PARAMETER Experiment Name: At_Drought_P Parameter: Treatment Value: Drought vs. No Drought
  misc_feature: MA Experiment ID: 20000437 Result: Up-regulated in Transcription
  misc_feature: MA Experiment 20000437 PARAMETER Experiment Name: At_Drought_P Parameter: Age (day) Value: 8
  misc_feature: MA Experiment 20000437 PARAMETER Experiment Name: At_Drought_P Parameter: Organism Value: A. thaliana
  misc_feature: MA Experiment 20000437 PARAMETER Experiment Name: At_Drought_P Parameter: Plant Line Value: WS
  misc_feature: MA Experiment 20000437 PARAMETER Experiment Name: At_Drought_P Parameter: Timepoint (hr) Value: 24
  misc_feature: MA Experiment 20000437 PARAMETER Experiment Name: At_Drought_P Parameter: Tissue Value: Whole Plant
  misc_feature: MA Experiment 20000437 PARAMETER Experiment Name: At_Drought_P Parameter: Treatment Value: Drought vs. No Drought
  misc_feature: MA Experiment ID: 20000441 Result: Down-regulated in Transcription
  misc_feature: MA Experiment 20000441 PARAMETER Experiment Name: At_1uM_BR-BRZ__P Parameter: Tissue Value: Shoot Apices
  misc_feature: MA Experiment 20000441 PARAMETER Experiment Name: At_1uM_BR-BRZ__P Parameter: Treatment Value: 1uM BR vs. No Treatment
  misc_feature: MA Experiment ID: 20000451 Result: Down-regulated in Transcription
  misc_feature: MA Experiment 20000451 PARAMETER Experiment Name: At_CS6879_Shoots-Roots_P Parameter: Age (day) Value: 14
  misc_feature: MA Experiment 20000451 PARAMETER Experiment Name: At_CS6879_Shoots-Roots_P Parameter: Organism Value: A. thaliana
  misc_feature: MA Experiment 20000451 PARAMETER Experiment Name: At_CS6879_Shoots-Roots_P Parameter: Plant Line Value: CS6879 vs. WS
  misc_feature: MA Experiment 20000451 PARAMETER Experiment Name: At_CS6879_Shoots-Roots_P Parameter: Tissue Value: Roots
  misc_feature: MA Experiment ID: 20000452 Result: Up-regulated in Transcription
  misc_feature: MA Experiment 20000452 PARAMETER Experiment Name: At_CS6879_Shoots-Roots_P Parameter: Age (day) Value: 14
  misc_feature: MA Experiment 20000452 PARAMETER Experiment Name: At_CS6879_Shoots-Roots_P Parameter: Organism Value: A. thaliana
  misc_feature: MA Experiment 20000452 PARAMETER Experiment Name: At_CS6879_Shoots-Roots_P Parameter: Plant Line Value: CS6879 vs. WS
  misc_feature: MA Experiment 20000452 PARAMETER Experiment Name: At_CS6879_Shoots-Roots_P Parameter: Tissue Value: Shoots
  misc_feature: MA Experiment ID: 20000453 Result: Up-regulated in Transcription
  misc_feature: MA Experiment 20000453 PARAMETER Experiment Name: At_100uM_ABA_P Parameter: Age (day) Value: 15
  misc_feature: MA Experiment 20000453 PARAMETER Experiment Name: At_100uM_ABA_P Parameter: Organism Value: A. thaliana
  misc_feature: MA Experiment 20000453 PARAMETER Experiment Name: At_100uM_ABA_P Parameter: Plant Line Value: WS
  misc_feature: MA Experiment 20000453 PARAMETER Experiment Name: At_100uM_ABA_P Parameter: Timepoint (hr) Value: 24
  misc_feature: MA Experiment 20000453 PARAMETER Experiment Name: At_100uM_ABA_P Parameter: Tissue Value: Aerial
  misc_feature: MA Experiment 20000453 PARAMETER Experiment Name: At_100uM_ABA_P Parameter: Treatment Value: 100uM ABA vs. No Treatment
  misc_feature: MA Experiment ID: 20000573 Result: Down-regulated in Transcription
  misc_feature: MA Experiment 20000573 PARAMETER Experiment Name: At_100uM_ABA_Mutants__P Parameter: Organism Value: A. thaliana
  misc_feature: MA Experiment 20000573 PARAMETER Experiment Name: At_100uM_ABA_Mutants__P Parameter: Plant Line Value: CS22 vs. Ler wt
  misc_feature: MA Experiment 20000573 PARAMETER Experiment Name: At_100uM_ABA_Mutants__P Parameter: Timepoint (hr) Value: N/A
  misc_feature: MA Experiment 20000573 PARAMETER Experiment Name: At_100uM_ABA_Mutants__P Parameter: Tissue Value: Whole Plant
  misc_feature: MA Experiment 20000573 PARAMETER Experiment Name: At_100uM_ABA_Mutants__P Parameter: Treatment Value: None
  misc_feature: MA Experiment ID: 20000574 Result: Down-regulated in Transcription
  misc_feature: MA Experiment 20000574 PARAMETER Experiment Name: At_100uM_ABA_Mutants__P Parameter: Organism Value: A. thaliana
  misc_feature: MA Experiment 20000574 PARAMETER Experiment Name: At_100uM_ABA_Mutants__P Parameter: Plant Line Value: CS23 vs. Ler wt
  misc_feature: MA Experiment 20000574 PARAMETER Experiment Name: At_100uM_ABA_Mutants__P Parameter: Timepoint (hr) Value: N/A
  misc_feature: MA Experiment 20000574 PARAMETER Experiment Name: At_100uM_ABA_Mutants__P Parameter: Tissue Value: Whole Plant
  misc_feature: MA Experiment 20000574 PARAMETER Experiment Name: At_100uM_ABA_Mutants__P Parameter: Treatment Value: None
  misc_feature: MA Experiment ID: 20001248 Result: Down-regulated in Transcription
  misc_feature: MA Experiment 20001248 PARAMETER Experiment Name: At_Far-red-induction_P Parameter: Age (day) Value: 7
  misc_feature: MA Experiment 20001248 PARAMETER Experiment Name: At_Far-red-induction_P Parameter: Light Value: Far-red vs. White
  misc_feature: MA Experiment 20001248 PARAMETER Experiment Name: At_Far-red-induction_P Parameter: Organism Value: A. thaliana
  misc_feature: MA Experiment 20001248 PARAMETER Experiment Name: At_Far-red-induction_P Parameter: Plant Line Value: Columbia
  misc_feature: MA Experiment 20001248 PARAMETER Experiment Name: At_Far-red-induction_P Parameter: Timepoint (hr) Value: 4
  misc_feature: MA Experiment 20001248 PARAMETER Experiment Name: At_Far-red-induction_P Parameter: Tissue Value: Whole Plant
  misc_feature: MA Experiment ID: 20001554 Result: Up-regulated in Transcription
  misc_feature: MA Experiment 20001554 PARAMETER Experiment Name: At_Drought_Soil_Dry_P Parameter: Age (day) Value: 21
  misc_feature: MA Experiment 20001554 PARAMETER Experiment Name: At_Drought_Soil_Dry_P Parameter: Organism Value: A. thaliana
  misc_feature: MA Experiment 20001554 PARAMETER Experiment Name: At_Drought_Soil_Dry_P Parameter: Plant Line Value: WS
  misc_feature: MA Experiment 20001554 PARAMETER Experiment Name: At_Drought_Soil_Dry_P Parameter: Post Timepoint (hr) Value: None
  misc_feature: MA Experiment 20001554 PARAMETER Experiment Name: At_Drought_Soil_Dry_P Parameter: Post-Treatment Value: None
  misc_feature: MA Experiment 20001554 PARAMETER Experiment Name: At_Drought_Soil_Dry_P Parameter: Timepoint (day) Value: 7
  misc_feature: MA Experiment 20001554 PARAMETER Experiment Name: At_Drought_Soil_Dry_P Parameter: Treatment Value: Drought vs. No Drought
  misc_feature: MA Experiment ID: 20001555 Result: Up-regulated in Transcription
  misc_feature: MA Experiment 20001555 PARAMETER Experiment Name: At_Drought_Soil_Dry_P Parameter: Age (day) Value: 24
  misc_feature: MA Experiment 20001555 PARAMETER Experiment Name: At_Drought_Soil_Dry_P Parameter: Organism Value: A. thaliana
  misc_feature: MA Experiment 20001555 PARAMETER Experiment Name: At_Drought_Soil_Dry_P Parameter: Plant Line Value: WS
  misc_feature: MA Experiment 20001555 PARAMETER Experiment Name: At_Drought_Soil_Dry_P Parameter: Post Timepoint (hr) Value: None
  misc_feature: MA Experiment 20001555 PARAMETER Experiment Name: At_Drought_Soil_Dry_P Parameter: Post-Treatment Value: None
  misc_feature: MA Experiment 20001555 PARAMETER Experiment Name: At_Drought_Soil_Dry_P Parameter: Timepoint (day) Value: 10
  misc_feature: MA Experiment 20001555 PARAMETER Experiment Name: At_Drought_Soil_Dry_P Parameter: Treatment Value: Drought vs. No Drought
  misc_feature: MA Experiment ID: 20001556 Result: Up-regulated in Transcription
  misc_feature: MA Experiment 20001556 PARAMETER Experiment Name: At_Drought_Soil_Dry_P Parameter: Age (day) Value: 26
  misc_feature: MA Experiment 20001556 PARAMETER Experiment Name: At_Drought_Soil_Dry_P Parameter: Organism Value: A. thaliana
  misc_feature: MA Experiment 20001556 PARAMETER Experiment Name: At_Drought_Soil_Dry_P Parameter: Plant Line Value: WS
  misc_feature: MA Experiment 20001556 PARAMETER Experiment Name: At_Drought_Soil_Dry_P Parameter: Post Timepoint (hr) Value: None
  misc_feature: MA Experiment 20001556 PARAMETER Experiment Name: At_Drought_Soil_Dry_P Parameter: Post-Treatment Value: None
  misc_feature: MA Experiment 20001556 PARAMETER Experiment Name: At_Drought_Soil_Dry_P Parameter: Timepoint (day) Value: 12
  misc_feature: MA Experiment 20001556 PARAMETER Experiment Name: At_Drought_Soil_Dry_P Parameter: Treatment Value: Drought vs. No Drought
  misc_feature: MA Experiment ID: 20001557 Result: Down-regulated in Transcription
  misc_feature: MA Experiment 20001557 PARAMETER Experiment Name: At_Drought_Soil_Dry_P Parameter: Age (day) Value: 27
  misc_feature: MA Experiment 20001557 PARAMETER Experiment Name: At_Drought_Soil_Dry_P Parameter: Organism Value: A. thaliana
  misc_feature: MA Experiment 20001557 PARAMETER Experiment Name: At_Drought_Soil_Dry_P Parameter: Plant Line Value: WS
  misc_feature: MA Experiment 20001557 PARAMETER Experiment Name: At_Drought_Soil_Dry_P Parameter: Post Timepoint (hr) Value: 3
  misc_feature: MA Experiment 20001557 PARAMETER Experiment Name: At_Drought_Soil_Dry_P Parameter: Post-Treatment Value: Re-Water vs. No Drought
  misc_feature: MA Experiment 20001557 PARAMETER Experiment Name: At_Drought_Soil_Dry_P Parameter: Timepoint (day) Value: 13
  misc_feature: MA Experiment 20001557 PARAMETER Experiment Name: At_Drought_Soil_Dry_P Parameter: Treatment Value: Drought vs. No Drought
  misc_feature: MA Experiment ID: 20001558 Result: Down-regulated in Transcription
  misc_feature: MA Experiment 20001558 PARAMETER Experiment Name: At_Drought_Soil_Dry_P Parameter: Age (day) Value: 27
  misc_feature: MA Experiment 20001558 PARAMETER Experiment Name: At_Drought_Soil_Dry_P Parameter: Organism Value: A. thaliana
  misc_feature: MA Experiment 20001558 PARAMETER Experiment Name: At_Drought_Soil_Dry_P Parameter: Plant Line Value: WS
  misc_feature: MA Experiment 20001558 PARAMETER Experiment Name: At_Drought_Soil_Dry_P Parameter: Post Timepoint (hr) Value: 6
  misc_feature: MA Experiment 20001558 PARAMETER Experiment Name: At_Drought_Soil_Dry_P Parameter: Post-Treatment Value: Re-Water vs. No Drought
  misc_feature: MA Experiment 20001558 PARAMETER Experiment Name: At_Drought_Soil_Dry_P Parameter: Timepoint (day) Value: 13
  misc_feature: MA Experiment 20001558 PARAMETER Experiment Name: At_Drought_Soil_Dry_P Parameter: Treatment Value: Drought vs. No Drought
  misc_feature: MA Experiment ID: 20001904 Result: Up-regulated in Transcription
  misc_feature: MA Experiment 20001904 PARAMETER Experiment Name: At_Drought_Reproduction_P Parameter: Age (day) Value: 37
  misc_feature: MA Experiment 20001904 PARAMETER Experiment Name: At_Drought_Reproduction_P Parameter: Organism Value: A. thaliana
  misc_feature: MA Experiment 20001904 PARAMETER Experiment Name: At_Drought_Reproduction_P Parameter: Plant Line Value: WS
  misc_feature: MA Experiment 20001904 PARAMETER Experiment Name: At_Drought_Reproduction_P Parameter: Timepoint (day) Value: 7
  misc_feature: MA Experiment 20001904 PARAMETER Experiment Name: At_Drought_Reproduction_P Parameter: Tissue Value: Rosettes
  misc_feature: MA Experiment 20001904 PARAMETER Experiment Name: At_Drought_Reproduction_P Parameter: Treatment Value: Drought vs. No Drought
  misc_feature: MA Experiment ID: 20001906 Result: Up-regulated in Transcription
  misc_feature: MA Experiment 20001906 PARAMETER Experiment Name: At_Drought_Reproduction_P Parameter: Age (day) Value: 35
  misc_feature: MA Experiment 20001906 PARAMETER Experiment Name: At_Drought_Reproduction_P Parameter: Organism Value: A. thaliana
  misc_feature: MA Experiment 20001906 PARAMETER Experiment Name: At_Drought_Reproduction_P Parameter: Plant Line Value: WS
  misc_feature: MA Experiment 20001906 PARAMETER Experiment Name: At_Drought_Reproduction_P Parameter: Timepoint (day) Value: 5
  misc_feature: MA Experiment 20001906 PARAMETER Experiment Name: At_Drought_Reproduction_P Parameter: Tissue Value: Siliques
  misc_feature: MA Experiment 20001906 PARAMETER Experiment Name: At_Drought_Reproduction_P Parameter: Treatment Value: Drought vs. No Drought
  misc_feature: MA Experiment ID: 20001907 Result: Up-regulated in Transcription
  misc_feature: MA Experiment 20001907 PARAMETER Experiment Name: At_Drought_Reproduction_P Parameter: Age (day) Value: 37
  misc_feature: MA Experiment 20001907 PARAMETER Experiment Name: At_Drought_Reproduction_P Parameter: Organism Value: A. thaliana
  misc_feature: MA Experiment 20001907 PARAMETER Experiment Name: At_Drought_Reproduction_P Parameter: Plant Line Value: WS
  misc_feature: MA Experiment 20001907 PARAMETER Experiment Name: At_Drought_Reproduction_P Parameter: Timepoint (day) Value: 7
  misc_feature: MA Experiment 20001907 PARAMETER Experiment Name: At_Drought_Reproduction_P Parameter: Tissue Value: Siliques
  misc_feature: MA Experiment 20001907 PARAMETER Experiment Name: At_Drought_Reproduction_P Parameter: Treatment Value: Drought vs. No Drought
  misc_feature: MA Experiment ID: 20001910 Result: Up-regulated in Transcription
  misc_feature: MA Experiment 20001910 PARAMETER Experiment Name: At_Drought_Reproduction_P Parameter: Age (day) Value: 37
  misc_feature: MA Experiment 20001910 PARAMETER Experiment Name: At_Drought_Reproduction_P Parameter: Organism Value: A. thaliana
  misc_feature: MA Experiment 20001910 PARAMETER Experiment Name: At_Drought_Reproduction_P Parameter: Plant Line Value: WS
  misc_feature: MA Experiment 20001910 PARAMETER Experiment Name: At_Drought_Reproduction_P Parameter: Timepoint (day) Value: 7
  misc_feature: MA Experiment 20001910 PARAMETER Experiment Name: At_Drought_Reproduction_P Parameter: Tissue Value: Flowers
  misc_feature: MA Experiment 20001910 PARAMETER Experiment Name: At_Drought_Reproduction_P Parameter: Treatment Value: Drought vs. No Drought
  misc_feature: MA Experiment ID: 20001911 Result: Up-regulated in Transcription
  misc_feature: MA Experiment 20001911 PARAMETER Experiment Name: At_Drought_Reproduction_P Parameter: Age (day) Value: 40
  misc_feature: MA Experiment 20001911 PARAMETER Experiment Name: At_Drought_Reproduction_P Parameter: Organism Value: A. thaliana
  misc_feature: MA Experiment 20001911 PARAMETER Experiment Name: At_Drought_Reproduction_P Parameter: Plant Line Value: WS
  misc_feature: MA Experiment 20001911 PARAMETER Experiment Name: At_Drought_Reproduction_P Parameter: Timepoint (day) Value: 10
  misc_feature: MA Experiment 20001911 PARAMETER Experiment Name: At_Drought_Reproduction_P Parameter: Tissue Value: Flowers
  misc_feature: MA Experiment 20001911 PARAMETER Experiment Name: At_Drought_Reproduction_P Parameter: Treatment Value: Drought vs. No Drought
atgaacacgaacacacaaacagaacaacagatcatcagagaagaaactagaattgacaaaattattaaaaagcgaaaaaagaaaatgagagctcaggttttattatgtccaacaataacagcttatggtcgtctctattgtgcgccacgtagacttcaccgctacaattcatcatcatcatcatctcagtttctgaatctcaatctctctcgcttctccggtgctctcttcttccacatggaggtatgttctcttgccaggaatctctgcttcagtttattctcaacacataagacgatttttaatatgttgatggtgttagcaattccagagtggaactggctcgagcggcaagagagggatggtggaaaatttgaagcgcttatgtttgtaggaaccgggtacttgactggctgttttgctttgatggttggagctgagggacgtgttgttggcgtggatcatatccctgaattggttgatatgtctatcaagaatatcgaaaagagtgttgctgcttcctttcttaagaaaggatctctctccttacatgttggggatggaagaaaaggttggcaagagtttgcaccgtatgatgcaatacacgtaggagcagcggcatcagaaatccctcagccccttttggatcagctaaaacccggtggacgaatggtgattccactaggaacctattttcaagagctcaaggtaatcgacaaaaacgaggatggttcaatcaaggtacataccgaaacttcagtccggtatgtgcccctcactagccgtgtcgaacagttaggaggattttga

SEQ ID NO: 73656 - protein, 269 aa, Arabidopsis thaliana
  peptide (1)..(269): Ceres Seq. ID no. 4973981
  misc_feature (80)..(264): Pfam Name: Protein-L-isoaspartate(D-aspartate) Pfam Description: Protein-L-isoaspartate(D-aspartate)
  misc_feature (1)..(269): Homolog of NCBI NO: 15240639 NR Description: putative protein; protein id: At5g50240.1
  misc_feature (132)..(269): Homolog of NCBI NO: 26451260 NR Description: unknown protein [Arabidopsis thaliana]
  misc_feature (132)..(268): Homolog of NCBI NO: 1322021 NR Description: L-isoaspartyl methyltransferase
  misc_feature (132)..(268): Homolog of NCBI NO: 22331684 NR Description: similar to protein-L-isoaspartate(D-aspartate);
  misc_feature (132)..(266): Homolog of NCBI NO: 38345249 NR Description: OSJNBb0011N17.10 [Oryza sativa (japonica
  misc_feature (132)..(266): Homolog of NCBI NO: 2499570 NR Description: PROTEIN-L-ISOASPARTATE O-METHYLTRANSFERASE
  misc_feature (132)..(265): Homolog of NCBI NO: 2507187 NR Description: Protein-L-isoaspartate(D-aspartate)
  misc_feature (132)..(265): Homolog of NCBI NO: 88512 NR Description: protein-L-isoaspartate(D-aspartate)
  misc_feature (132)..(265): Homolog of NCBI NO: 20150076 NR Description: Chain A, Human Protein L-Isoaspartate
  misc_feature (132)..(265): Homolog of NCBI NO: 107476 NR Description: protein-L-isoaspartate(D-aspartate)
MNTNTQTEQQIIREETRIDKIIKKRKKKMRAQVLLCPTITAYGRLYCAPRRLHRYNSSSSSSQFLNLNLSRFSGALFFHMEVCSLARNLCFSLFSTHKTIFNMLMVLAIPEWNWLERQERDGGKFEALMFVGTGYLTGCFALMVGAEGRVVGVDHIPELVDMSIKNIEKSVAASFLKKGSLSLHVGDGRKGWQEFAPYDAIHVGAAASEIPQPLLDQLKPGGRMVIPLGTYFQELKVIDKNEDGSIKVHTETSVRYVPLTSRVEQLGGF

SEQ ID NO: 73657 - protein, 241 aa, Arabidopsis thaliana
  peptide (1)..(241): Ceres Seq. ID no. 4973982
  misc_feature (52)..(236): Pfam Name: Protein-L-isoaspartate(D-aspartate) Pfam Description: Protein-L-isoaspartate(D-aspartate)
  misc_feature (1)..(241): Homolog of NCBI NO: 15240639 NR Description: putative protein; protein id: At5g50240.1
  misc_feature (104)..(241): Homolog of NCBI NO: 26451260 NR Description: unknown protein [Arabidopsis thaliana]
  misc_feature (104)..(240): Homolog of NCBI NO: 1322021 NR Description: L-isoaspartyl methyltransferase
  misc_feature (104)..(240): Homolog of NCBI NO: 22331684 NR Description: similar to protein-L-isoaspartate(D-aspartate);
  misc_feature (104)..(238): Homolog of NCBI NO: 38345249 NR Description: OSJNBb0011N17.10 [Oryza sativa (japonica
  misc_feature (104)..(238): Homolog of NCBI NO: 2499570 NR Description: PROTEIN-L-ISOASPARTATE O-METHYLTRANSFERASE
  misc_feature (104)..(237): Homolog of NCBI NO: 2507187 NR Description: Protein-L-isoaspartate(D-aspartate)
  misc_feature (104)..(237): Homolog of NCBI NO: 88512 NR Description: protein-L-isoaspartate(D-aspartate)
  misc_feature (104)..(237): Homolog of NCBI NO: 4885539 NR Description: protein-L-isoaspartate (D-aspartate) [Homo sapiens] >gi|1332399|dbj|BAA05028.1| PIMT isozyme I [Homo
  misc_feature (104)..(237): Homolog of NCBI NO: 107476 NR Description: protein-L-isoaspartate(D-aspartate)
MRAQVLLCPTITAYGRLYCAPRRLHRYNSSSSSSQFLNLNLSRFSGALFFHMEVCSLARNLCFSLFSTHKTIFNMLMVLAIPEWNWLERQERDGGKFEALMFVGTGYLTGCFALMVGAEGRVVGVDHIPELVDMSIKNIEKSVAASFLKKGSLSLHVGDGRKGWQEFAPYDAIHVGAAASEIPQPLLDQLKPGGRMVIPLGTYFQELKVIDKNEDGSIKVHTETSVRYVPLTSRVEQLGGF

SEQ ID NO: 73658 - protein, 190 aa, Arabidopsis thaliana
  peptide (1)..(190): Ceres Seq. ID no. 4973983
  misc_feature (1)..(185): Pfam Name: Protein-L-isoaspartate(D-aspartate) Pfam Description: Protein-L-isoaspartate(D-aspartate)
  misc_feature (1)..(190): Homolog of NCBI NO: 15240639 NR Description: putative protein; protein id: At5g50240.1
  misc_feature (53)..(190): Homolog of NCBI NO: 26451260 NR Description: unknown protein [Arabidopsis thaliana]
  misc_feature (53)..(189): Homolog of NCBI NO: 1322021 NR Description: L-isoaspartyl methyltransferase
  misc_feature (53)..(189): Homolog of NCBI NO: 22331684 NR Description: similar to protein-L-isoaspartate(D-aspartate);
  misc_feature (53)..(187): Homolog of NCBI NO: 38345249 NR Description: OSJNBb0011N17.10 [Oryza sativa (japonica
  misc_feature (53)..(187): Homolog of NCBI NO: 2499570 NR Description: PROTEIN-L-ISOASPARTATE O-METHYLTRANSFERASE
  misc_feature (53)..(186): Homolog of NCBI NO: 2507187 NR Description: Protein-L-isoaspartate(D-aspartate)
  misc_feature (53)..(186): Homolog of NCBI NO: 88512 NR Description: protein-L-isoaspartate(D-aspartate)
  misc_feature (53)..(186): Homolog of NCBI NO: 4885539 NR Description: protein-L-isoaspartate (D-aspartate) [Homo sapiens] >gi|1332399|dbj|BAA05028.1| PIMT isozyme I [Homo
  misc_feature (53)..(186): Homolog of NCBI NO: 107476 NR Description: protein-L-isoaspartate(D-aspartate)
MEVCSLARNLCFSLFSTHKTIFNMLMVLAIPEWNWLERQERDGGKFEALMFVGTGYLTGCFALMVGAEGRVVGVDHIPELVDMSIKNIEKSVAASFLKKGSLSLHVGDGRKGWQEFAPYDAIHVGAAASEIPQPLLDQLKPGGRMVIPLGTYFQELKVIDKNEDGSIKVHTETSVRYVPLTSRVEQLGGF

SEQ ID NO: 73659 - DNA, 1434 bp, Arabidopsis thaliana
  misc_feature (1)..(1434): Ceres Seq. ID no. 4974020
  misc_feature: MA Experiment ID: 20000179 Result: Up-regulated in Transcription
  misc_feature: MA Experiment 20000179 PARAMETER Experiment Name: At_Germinating_Seeds_P Parameter: Age (hr) Value: 6 vs. 0
  misc_feature: MA Experiment 20000179 PARAMETER Experiment Name: At_Germinating_Seeds_P Parameter: Tissue Value: Germinating Seeds
  misc_feature: MA Experiment ID: 20000227 Result: Down-regulated in Transcription
  misc_feature: MA Experiment 20000227 PARAMETER Experiment Name: At_Root-Tips-vs-Tops_P Parameter: Tissue Value: Root Tips vs. Root Tops
  misc_feature: MA Experiment ID: 20000439 Result: Up-regulated in Transcription
  misc_feature: MA Experiment 20000439 PARAMETER Experiment Name: At_Roots__P Parameter: Age (day) Value: 14 vs. 21
  misc_feature: MA Experiment 20000439 PARAMETER Experiment Name: At_Roots__P Parameter: Organism Value: A. thaliana
  misc_feature: MA Experiment 20000439 PARAMETER Experiment Name: At_Roots__P Parameter: Tissue Value: Roots vs. Whole Plant
  misc_feature: Pfam Name: p450 Pfam Description: Cytochrome P450
atgtacatggcaatcatgattatcctcttccttagctccattcttctttctctcctattgctccttagaaaacatttgtcacacttctcctatcccaaccttcctcccggaaataccggccttcccttaatcggagagagtttctccttcctctctgctggccgtcaaggccatccagagaagttcatcactgaccgagttcgtcgtttctcctcctcctcctcatgtgtcttcaagacccacctctttgggtctcccaccgcggtggtgactggtgcatctgggaacaagtttctattcactaacgagaacaagcttgtggtctcgtggtggccagattccgttaataagatcttcccttcttcaatgcagacgagctccaaagaagaagccaggaagctgaggatgcttctttcgcagttcatgaagcccgaggctttgaggaggtatgttggtgttatggatgagattgctcaaagacattttgagacggaatgggccaatcaagatcaagtcattgtcttccctcttaccaaaaagttcacgttttcaatagcatgccgttcgttcctgagcatggaagatcccgcaagagtaaggcaactagaagagcaattcaatacggtagcggtagggatcttctcaatcccaatagacttgccaggaacacggtttaaccgagccatcaaggcgtcgaggttactcagaaaagaggtttccgctatcgtaaggcagaggaaagaagagctcaaagccgggaaagcattagaggagcacgacatattatctcacatgttgatgaatataggagagaccaaagacgaggatttggctgataaaattattggattgttaatcggaggacatgacacagctagtatcgtatgcactttcgttgtcaattatcttgctgaattccctcatgtctaccaacgtgtgctacaagagcaaaaggagatactaaaggagaaaaaagaaaaggaaggattaaggtgggaggacattgagaaaatgagatattcatggaatgttgcatgtgaagtgatgagaattgttcctcctctttctggcacttttcgtgaggccattgatcacttctcttttaagggtttttacattcccaaaggatggaagttatattggagtgccaccgcgacacatatgaatccagactacttcccagaaccagagagatttgagccaaaccgtttcgaaggaagtggtccgaagccttatacctatgttccatttggaggaggaccaagaatgtgtccagggaaagagtatgctcgtctagagattcttatattcatgcacaatcttgttaatagatttaagtgggaaaaagtgtttccaaatgaaaataaaatagttgttgatcccttaccaataccagacaaaggtctccctataagaatttttcctcaatcttga

SEQ ID NO: 73660 - protein, 477 aa, Arabidopsis thaliana
  peptide (1)..(477): Ceres Seq. ID no. 4974021
  misc_feature: Pfam Name: p450 Pfam Description: Cytochrome P450
  misc_feature (1)..(477): Homolog of NCBI NO: 15239304 NR Description: cytochrome p450 family; protein id: At5g36110.1
  misc_feature (1)..(315): Homolog of NCBI NO: 15239310 NR Description: putative protein; protein id: At5g36140.1 thaliana] >gi|8777299|dbj|BAA96889.1| contains similarity to
  misc_feature (6)..(473): Homolog of NCBI NO: 24745923 NR Description: cytochrome P450 [Solanum tuberosum]
  misc_feature (8)..(477): Homolog of NCBI NO: 28380196 NR Description: Taxane 13-alpha-hydroxylase
  misc_feature (6)..(477): Homolog of NCBI NO: 28380205 NR Description: Taxane 10-beta-hydroxylase
  misc_feature (6)..(477): Homolog of NCBI NO: 24266823 NR Description: 5-alpha-taxadienol-10-beta-hydroxylase [Taxus
  misc_feature (6)..(477): Homolog of NCBI NO: 34901946 NR Description: 5-alpha-taxadienol-10-beta-hydroxylase-like
  misc_feature (2)..(477): Homolog of NCBI NO: 30350220 NR Description: taxane 14b-hydroxylase [Taxus cuspidata]
  misc_feature (1)..(473): Homolog of NCBI NO: 33146520 NR Description: putative 5-alpha-taxadienol-10-beta-hydroxylase
  misc_feature (11)..(476): Homolog of NCBI NO: 34901930 NR Description: putative Cytochrome P450 85 (Dwarf protein)
MYMAIMIILFLSSILLSLLLLLRKHLSHFSYPNLPPGNTGLPLIGESFSFLSAGRQGHPEKFITDRVRRFSSSSSCVFKTHLFGSPTAVVTGASGNKFLFTNENKLVVSWWPDSVNKIFPSSMQTSSKEEARKLRMLLSQFMKPEALRRYVGVMDEIAQRHFETEWANQDQVIVFPLTKKFTFSIACRSFLSMEDPARVRQLEEQFNTVAVGIFSIPIDLPGTRFNRAIKASRLLRKEVSAIVRQRKEELKAGKALEEHDILSHMLMNIGETKDEDLADKIIGLLIGGHDTASIVCTFVVNYLAEFPHVYQRVLQEQKEILKEKKEKEGLRWEDIEKMRYSWNVACEVMRIVPPLSGTFREAIDHFSFKGFYIPKGWKLYWSATATHMNPDYFPEPERFEPNRFEGSGPKPYTYVPFGGGPRMCPGKEYARLEILIFMHNLVNRFKWEKVFPNENKIVVDPLPIPDKGLPIRIFPQS

SEQ ID NO: 73661 - protein, 475 aa, Arabidopsis thaliana
  peptide (1)..(475): Ceres Seq. ID no. 4974022
  misc_feature: Pfam Name: p450 Pfam Description: Cytochrome P450
  misc_feature (1)..(475): Homolog of NCBI NO: 15239304 NR Description: cytochrome p450 family; protein id: At5g36110.1
  misc_feature (1)..(313): Homolog of NCBI NO: 15239310 NR Description: putative protein; protein id: At5g36140.1 thaliana] >gi|8777299|dbj|BAA96889.1| contains similarity to
  misc_feature (4)..(471): Homolog of NCBI NO: 24745923 NR Description: cytochrome P450 [Solanum tuberosum]
  misc_feature (6)..(475): Homolog of NCBI NO: 28380196 NR Description: Taxane 13-alpha-hydroxylase
  misc_feature (4)..(475): Homolog of NCBI NO: 28380205 NR Description: Taxane 10-beta-hydroxylase
  misc_feature (4)..(475): Homolog of NCBI NO: 24266823 NR Description: 5-alpha-taxadienol-10-beta-hydroxylase [Taxus
  misc_feature (4)..(475): Homolog of NCBI NO: 34901946 NR Description: 5-alpha-taxadienol-10-beta-hydroxylase-like
  misc_feature (1)..(475): Homolog of NCBI NO: 30350220 NR Description: taxane 14b-hydroxylase [Taxus cuspidata]
  misc_feature (1)..(471): Homolog of NCBI NO: 33146520 NR Description: putative 5-alpha-taxadienol-10-beta-hydroxylase
  misc_feature (9)..(474): Homolog of NCBI NO: 34901930 NR Description: putative Cytochrome P450 85 (Dwarf protein)
MAIMIILFLSSILLSLLLLLRKHLSHFSYPNLPPGNTGLPLIGESFSFLSAGRQGHPEKFITDRVRRFSSSSSCVFKTHLFGSPTAVVTGASGNKFLFTNENKLVVSWWPDSVNKIFPSSMQTSSKEEARKLRMLLSQFMKPEALRRYVGVMDEIAQRHFETEWANQDQVIVFPLTKKFTFSIACRSFLSMEDPARVRQLEEQFNTVAVGIFSIPIDLPGTRFNRAIKASRLLRKEVSAIVRQRKEELKAGKALEEHDILSHMLMNIGETKDEDLADKIIGLLIGGHDTASIVCTFVVNYLAEFPHVYQRVLQEQKEILKEKKEKEGLRWEDIEKMRYSWNVACEVMRIVPPLSGTFREAIDHFSFKGFYIPKGWKLYWSATATHMNPDYFPEPERFEPNRFEGSGPKPYTYVPFGGGPRMCPGKEYARLEILIFMHNLVNRFKWEKVFPNENKIVVDPLPIPDKGLPIRIFPQS

SEQ ID NO: 73662 - protein, 472 aa, Arabidopsis thaliana
  peptide (1)..(472): Ceres Seq. ID no. 4974023
  misc_feature: Pfam Name: p450 Pfam Description: Cytochrome P450
  misc_feature (1)..(472): Homolog of NCBI NO: 15239304 NR Description: cytochrome p450 family; protein id: At5g36110.1
  misc_feature (1)..(310): Homolog of NCBI NO: 15239310 NR Description: putative protein; protein id: At5g36140.1 thaliana] >gi|8777299|dbj|BAA96889.1| contains similarity to
  misc_feature (1)..(468): Homolog of NCBI NO: 24745923 NR Description: cytochrome P450 [Solanum tuberosum]
  misc_feature (3)..(472): Homolog of NCBI NO: 28380196 NR Description: Taxane 13-alpha-hydroxylase
  misc_feature (1)..(472): Homolog of NCBI NO: 28380205 NR Description: Taxane 10-beta-hydroxylase
  misc_feature (1)..(472): Homolog of NCBI NO: 24266823 NR Description: 5-alpha-taxadienol-10-beta-hydroxylase [Taxus
  misc_feature (1)..(472): Homolog of NCBI NO: 34901946 NR Description: 5-alpha-taxadienol-10-beta-hydroxylase-like
  misc_feature (1)..(472): Homolog of NCBI NO: 30350220 NR Description: taxane 14b-hydroxylase [Taxus cuspidata]
  misc_feature (1)..(468): Homolog of NCBI NO: 33146520 NR Description: putative 5-alpha-taxadienol-10-beta-hydroxylase
  misc_feature (6)..(471): Homolog of NCBI NO: 34901930 NR Description: putative Cytochrome P450 85 (Dwarf protein)
MIILFLSSILLSLLLLLRKHLSHFSYPNLPPGNTGLPLIGESFSFLSAGRQGHPEKFITDRVRRFSSSSSCVFKTHLFGSPTAVVTGASGNKFLFTNENKLVVSWWPDSVNKIFPSSMQTSSKEEARKLRMLLSQFMKPEALRRYVGVMDEIAQRHFETEWANQDQVIVFPLTKKFTFSIACRSFLSMEDPARVRQLEEQFNTVAVGIFSIPIDLPGTRFNRAIKASRLLRKEVSAIVRQRKEELKAGKALEEHDILSHMLMNIGETKDEDLADKIIGLLIGGHDTASIVCTFVVNYLAEFPHVYQRVLQEQKEILKEKKEKEGLRWEDIEKMRYSWNVACEVMRIVPPLSGTFREAIDHFSFKGFYIPKGWKLYWSATATHMNPDYFPEPERFEPNRFEGSGPKPYTYVPFGGGPRMCPGKEYARLEILIFMHNLVNRFKWEKVFPNENKIVVDPLPIPDKGLPIRIFPQS

SEQ ID NO: 73663 - DNA, 1317 bp, Arabidopsis thaliana
  misc_feature (1)..(1317): Ceres Seq. ID no. 4974092
  misc_feature: MA Experiment ID: 20000173 Result: Down-regulated in Transcription
  misc_feature: MA Experiment 20000173 PARAMETER Experiment Name: At_42deg_Heat_P Parameter: Age (day) Value: 14
  misc_feature: MA Experiment 20000173 PARAMETER Experiment Name: At_42deg_Heat_P Parameter: Organism Value: A. thaliana
  misc_feature: MA Experiment 20000173 PARAMETER Experiment Name: At_42deg_Heat_P Parameter: Plant Line Value: WS
  misc_feature: MA Experiment 20000173 PARAMETER Experiment Name: At_42deg_Heat_P Parameter: Temperature (deg C) Value: 42 vs. 22
  misc_feature: MA Experiment 20000173 PARAMETER Experiment Name: At_42deg_Heat_P Parameter: Timepoint (hr) Value: 6
  misc_feature: MA Experiment 20000173 PARAMETER Experiment Name: At_42deg_Heat_P Parameter: Tissue Value: Aerial
  misc_feature: MA Experiment ID: 20000184 Result: Down-regulated in Transcription
  misc_feature: MA Experiment 20000184 PARAMETER Experiment Name: At_Shoots__P Parameter: Age (day) Value: 7
  misc_feature: MA Experiment 20000184 PARAMETER Experiment Name: At_Shoots__P Parameter: Tissue Value: Shoots vs. Whole Plant
  misc_feature: MA Experiment ID: 20000227 Result: Down-regulated in Transcription
  misc_feature: MA Experiment 20000227 PARAMETER Experiment Name: At_Root-Tips-vs-Tops_P Parameter: Tissue Value: Root Tips vs. Root Tops
  misc_feature: MA Experiment ID: 20000234 Result: Up-regulated in Transcription
  misc_feature: MA Experiment 20000234 PARAMETER Experiment Name: At_Siliques_P Parameter: Age (day) Value: 21
  misc_feature: MA Experiment 20000234 PARAMETER Experiment Name: At_Siliques_P Parameter: Organism Value: A. thaliana
  misc_feature: MA Experiment 20000234 PARAMETER Experiment Name: At_Siliques_P Parameter: Plant Line Value: WS
  misc_feature: MA Experiment 20000234 PARAMETER Experiment Name: At_Siliques_P Parameter: Tissue Value: Less Than 5mm Siliques vs. Whole Plant
  misc_feature: MA Experiment ID: 20000235 Result: Up-regulated in Transcription
  misc_feature: MA Experiment 20000235 PARAMETER Experiment Name: At_Siliques_P Parameter: Age (day) Value: 21
  misc_feature: MA Experiment 20000235 PARAMETER Experiment Name: At_Siliques_P Parameter: Organism Value: A. thaliana
  misc_feature: MA Experiment 20000235 PARAMETER Experiment Name: At_Siliques_P Parameter: Plant Line Value: WS
  misc_feature: MA Experiment 20000235 PARAMETER Experiment Name: At_Siliques_P Parameter: Tissue Value: 5-10mm Siliques vs. Whole Plant
  misc_feature: MA Experiment ID: 20000264 Result: Up-regulated in Transcription
  misc_feature: MA Experiment 20000264 PARAMETER Experiment Name: At_Open_Flower_P Parameter: Age (day) Value: 21
  misc_feature: MA Experiment 20000264 PARAMETER Experiment Name: At_Open_Flower_P Parameter: Plant Line Value: WS
  misc_feature: MA Experiment 20000264 PARAMETER Experiment Name: At_Open_Flower_P Parameter: Tissue Value: Open Flower vs. Whole Plant
  misc_feature: MA Experiment ID: 20000265 Result: Up-regulated in Transcription
  misc_feature: MA Experiment 20000265 PARAMETER Experiment Name: At_Open_Flower_P Parameter: Age (day) Value: 21
  misc_feature: MA Experiment 20000265 PARAMETER Experiment Name: At_Open_Flower_P Parameter: Plant Line Value: WS
  misc_feature: MA Experiment 20000265 PARAMETER Experiment Name: At_Open_Flower_P Parameter: Tissue Value: Closed Flower vs. Whole Plant
  misc_feature: MA Experiment ID: 20000286 Result: Up-regulated in Transcription
  misc_feature: MA Experiment 20000286 PARAMETER Experiment Name: At_Open_Flower_P Parameter: Age (day) Value: 21
  misc_feature: MA Experiment 20000286 PARAMETER Experiment Name: At_Open_Flower_P Parameter: Plant Line Value: WS
  misc_feature: MA Experiment 20000286 PARAMETER Experiment Name: At_Open_Flower_P Parameter: Tissue Value: Half Open vs. Whole Plant
  misc_feature: MA Experiment ID: 20000495 Result: Up-regulated in Transcription
  misc_feature: MA Experiment 20000495 PARAMETER Experiment Name: At_Guard_Cells_P Parameter: Harvest Date Value: 8/2/2002
  misc_feature: MA Experiment 20000495 PARAMETER Experiment Name: At_Guard_Cells_P Parameter: Organism Value: A. thaliana
  misc_feature: MA Experiment 20000495 PARAMETER Experiment Name: At_Guard_Cells_P Parameter: Tissue Value: Guard Cells vs. Leaves
  misc_feature: MA Experiment ID: 20000573 Result: Down-regulated in Transcription
  misc_feature: MA Experiment 20000573 PARAMETER Experiment Name: At_100uM_ABA_Mutants__P Parameter: Organism Value: A. thaliana
  misc_feature: MA Experiment 20000573 PARAMETER Experiment Name: At_100uM_ABA_Mutants__P Parameter: Plant Line Value: CS22 vs. Ler wt
  misc_feature: MA Experiment 20000573 PARAMETER Experiment Name: At_100uM_ABA_Mutants__P Parameter: Timepoint (hr) Value: N/A
  misc_feature: MA Experiment 20000573 PARAMETER Experiment Name: At_100uM_ABA_Mutants__P Parameter: Tissue Value: Whole Plant
  misc_feature: MA Experiment 20000573 PARAMETER Experiment Name: At_100uM_ABA_Mutants__P Parameter: Treatment Value: None
  misc_feature: MA Experiment ID: 20000794 Result: Up-regulated in Transcription
  misc_feature: MA Experiment 20000794 PARAMETER Experiment Name: At_Petals_P Parameter: Age (day) Value: 23-25 days
  misc_feature: MA Experiment 20000794 PARAMETER Experiment Name: At_Petals_P Parameter: Plant Line Value: WS
  misc_feature: MA Experiment 20000794 PARAMETER Experiment Name: At_Petals_P Parameter: Tissue Value: Petals vs. Whole plant
  misc_feature: MA Experiment ID: 20001557 Result: Down-regulated in Transcription
  misc_feature: MA Experiment 20001557 PARAMETER Experiment Name: At_Drought_Soil_Dry_P Parameter: Age (day) Value: 27
  misc_feature: MA Experiment 20001557 PARAMETER Experiment Name: At_Drought_Soil_Dry_P Parameter: Organism Value: A. thaliana
  misc_feature: MA Experiment 20001557 PARAMETER Experiment Name: At_Drought_Soil_Dry_P Parameter: Plant Line Value: WS
  misc_feature: MA Experiment 20001557 PARAMETER Experiment Name: At_Drought_Soil_Dry_P Parameter: Post Timepoint (hr) Value: 3
  misc_feature: MA Experiment 20001557 PARAMETER Experiment Name: At_Drought_Soil_Dry_P Parameter: Post-Treatment Value: Re-Water vs. No Drought
  misc_feature: MA Experiment 20001557 PARAMETER Experiment Name: At_Drought_Soil_Dry_P Parameter: Timepoint (day) Value: 13
  misc_feature: MA Experiment 20001557 PARAMETER Experiment Name: At_Drought_Soil_Dry_P Parameter: Treatment Value: Drought vs. No Drought
  misc_feature: MA Experiment ID: 20001558 Result: Down-regulated in Transcription
  misc_feature: MA Experiment 20001558 PARAMETER Experiment Name: At_Drought_Soil_Dry_P Parameter: Age (day) Value: 27
  misc_feature: MA Experiment 20001558 PARAMETER Experiment Name: At_Drought_Soil_Dry_P Parameter: Organism Value: A. thaliana
  misc_feature: MA Experiment 20001558 PARAMETER Experiment Name: At_Drought_Soil_Dry_P Parameter: Plant Line Value: WS
  misc_feature: MA Experiment 20001558 PARAMETER Experiment Name: At_Drought_Soil_Dry_P Parameter: Post Timepoint (hr) Value: 6
  misc_feature: MA Experiment 20001558 PARAMETER Experiment Name: At_Drought_Soil_Dry_P Parameter: Post-Treatment Value: Re-Water vs. No Drought
  misc_feature: MA Experiment 20001558 PARAMETER Experiment Name: At_Drought_Soil_Dry_P Parameter: Timepoint (day) Value: 13
  misc_feature: MA Experiment 20001558 PARAMETER Experiment Name: At_Drought_Soil_Dry_P Parameter: Treatment Value: Drought vs. No Drought
  misc_feature: MA Experiment ID: 20001911 Result: Up-regulated in Transcription
  misc_feature: MA Experiment 20001911 PARAMETER Experiment Name: At_Drought_Reproduction_P Parameter: Age (day) Value: 40
  misc_feature: MA Experiment 20001911 PARAMETER Experiment Name: At_Drought_Reproduction_P Parameter: Organism Value: A. thaliana
  misc_feature: MA Experiment 20001911 PARAMETER Experiment Name: At_Drought_Reproduction_P Parameter: Plant Line Value: WS
  misc_feature: MA Experiment 20001911 PARAMETER Experiment Name: At_Drought_Reproduction_P Parameter: Timepoint (day) Value: 10
  misc_feature: MA Experiment 20001911 PARAMETER Experiment Name: At_Drought_Reproduction_P Parameter: Tissue Value: Flowers
  misc_feature: MA Experiment 20001911 PARAMETER Experiment Name: At_Drought_Reproduction_P Parameter: Treatment Value: Drought vs. No Drought
atggattcagatgcatgggaaattatccatatacctgaaaagccttcattgtcacctgaccatcagcccactgtgaaggtatatgctagcctaatcaaacccagatttgccaatacgatagtgaggcatttatgtaagattgctcctctagaagatcttcgtcatgttaaaagggtgaagaagaagattctgccagattgcggtgaaactcagttgactgtcatcttatgtctagcacctgagcacaacgatcagttgagtgacatgccacctgatgtgcagagactcgttgatccctatgagttgagtccttttattacacaagtaggttatttttctcttatctcaccactatttgcttcaagggtttttgattcatttagcttccaagtatgcaaatatgctgcggtatccaaagaagagtgggaagaacaaacaatatatgtctttgtttatagtgcaacagtcaatgattttttactttttgcatttggcaatgatagcaatatagatggcatcggtgggttcagcgaggaggaaacacaatcaatctgcaagttcatgagagttgttattgatatggcagtatctggtcatacaccacttgtgaatgctgcagtgatagttgatccttcagttaggcgaataatagctagtgaaactgatcaagtatatgcatcatctgctcctcgtgacatgactagcgcagagaccaggcccttcgaggaaacaggggaaatatgtttaaatgacacacttgaaaaacagaatggttcattgtctgctctttcttgtctgaatccctggcaatggagtttgcagccgcatgacactgaaaattgtagccagtggcatcctcttaggcatgcttccatggttgccattgaatcctcttctgccagagatagaaatctgtttcccaatccatccaagatttttgatcaggatcatgttccgccctcaaatacagattctccggctaaaaagcagaaaacaagcagtcagagtccagacgtccaaaatgacagcagagaagagactgttagagatccttcaatggaaaggccgtacctctgcactggttatgacattttcctcctgttggagccttgtacaattcgtgatatgttcccaaggtgtgctatggcgcttgtgcatcaaagaataaaacggattttctatgcttttccaaacaccacggcaggtggtctcgggagtgttcatagacttcaaggggaaaagagtttgaaccatcattatgcagtgtttagagttttgctgcctgatgacgcacttagacaaatgaccacggtctaa

SEQ ID NO: 73664 - protein, 438 aa, Arabidopsis thaliana
  peptide (1)..(438): Ceres Seq. ID no. 4974093
  misc_feature (1)..(438): Homolog of NCBI NO: 9759207 NR Description: gene_id:MXC17.5~unknown protein [Arabidopsis
  misc_feature (1)..(438): Homolog of NCBI NO: 30689567 NR Description: expressed protein [Arabidopsis thaliana]
  misc_feature (356)..(425): Homolog of NCBI NO: 31199497 NR Description: ENSANGP00000021467 [Anopheles gambiae]
  misc_feature (356)..(430): Homolog of NCBI NO: 19922544 NR Description: CG10927-PA [Drosophila melanogaster]
  misc_feature (276)..(429): Homolog of NCBI NO: 19923945 NR Description: hypothetical protein BC011824 [Homo sapiens]
  misc_feature (255)..(426): Homolog of NCBI NO: 23508743 NR Description: hypothetical protein [Plasmodium falciparum 3D7]
  misc_feature (356)..(424): Homolog of NCBI NO: 22204218 NR Description: SI:dZ211O13.3 (novel protein) [Danio rerio]
  misc_feature (356)..(424): Homolog of NCBI NO: 22204386 NR Description: SI:dZ72B14.5 (novel protein) [Danio rerio]
  misc_feature (357)..(425): Homolog of NCBI NO: 25144639 NR Description: Cytidine, cytosine, dCTP et al deaminase elegans] >gi|19571667|emb|CAB55073.2| Hypothetical protein
MDSDAWEIIHIPEKPSLSPDHQPTVKVYASLIKPRFANTIVRHLCKIAPLEDLRHVKRVKKKILPDCGETQLTVILCLAPEHNDQLSDMPPDVQRLVDPYELSPFITQVGYFSLISPLFASRVFDSFSFQVCKYAAVSKEEWEEQTIYVFVYSATVNDFLLFAFGNDSNIDGIGGFSEEETQSICKFMRVVIDMAVSGHTPLVNAAVIVDPSVRRIIASETDQVYASSAPRDMTSAETRPFEETGEICLNDTLEKQNGSLSALSCLNPWQWSLQPHDTENCSQWHPLRHASMVAIESSSARDRNLFPNPSKIFDQDHVPPSNTDSPAKKQKTSSQSPDVQNDSREETVRDPSMERPYLCTGYDIFLLLEPCTIRDMFPRCAMALVHQRIKRIFYAFPNTTAGGLGSVHRLQGEKSLNHHYAVFRVLLPDDALRQMTTV

SEQ ID NO: 73665 - protein, 350 aa, Arabidopsis thaliana
  peptide (1)..(350): Ceres Seq. ID no. 4974094
  misc_feature (1)..(350): Homolog of NCBI NO: 9759207 NR Description: gene_id:MXC17.5~unknown protein [Arabidopsis
  misc_feature (1)..(350): Homolog of NCBI NO: 30689567 NR Description: expressed protein [Arabidopsis thaliana]
  misc_feature (268)..(337): Homolog of NCBI NO: 31199497 NR Description: ENSANGP00000021467 [Anopheles gambiae]
  misc_feature (268)..(342): Homolog of NCBI NO: 19922544 NR Description: CG10927-PA [Drosophila melanogaster]
  misc_feature (188)..(341): Homolog of NCBI NO: 19923945 NR Description: hypothetical protein BC011824 [Homo sapiens]
  misc_feature (167)..(338): Homolog of NCBI NO: 23508743 NR Description: hypothetical protein [Plasmodium falciparum 3D7]
  misc_feature (268)..(336): Homolog of NCBI NO: 22204218 NR Description: SI:dZ211O13.3 (novel protein) [Danio rerio]
  misc_feature (268)..(336): Homolog of NCBI NO: 22204386 NR Description: SI:dZ72B14.5 (novel protein) [Danio rerio]
  misc_feature (269)..(337): Homolog of NCBI NO: 25144639 NR Description: Cytidine, cytosine, dCTP et al deaminase elegans] >gi|19571667|emb|CAB55073.2| Hypothetical protein
MPPDVQRLVDPYELSPFITQVGYFSLISPLFASRVFDSFSFQVCKYAAVSKEEWEEQTIYVFVYSATVNDFLLFAFGNDSNIDGIGGFSEEETQSICKFMRVVIDMAVSGHTPLVNAAVIVDPSVRRIIASETDQVYASSAPRDMTSAETRPFEETGEICLNDTLEKQNGSLSALSCLNPWQWSLQPHDTENCSQWHPLRHASMVAIESSSARDRNLFPNPSKIFDQDHVPPSNTDSPAKKQKTSSQSPDVQNDSREETVRDPSMERPYLCTGYDIFLLLEPCTIRDMFPRCAMALVHQRIKRIFYAFPNTTAGGLGSVHRLQGEKSLNHHYAVFRVLLPDDALRQMTTV

SEQ ID NO: 73666 - protein, 251 aa, Arabidopsis thaliana
  peptide (1)..(251): Ceres Seq. ID no. 4974095
  misc_feature (1)..(251): Homolog of NCBI NO: 9759207 NR Description: gene_id:MXC17.5~unknown protein [Arabidopsis
  misc_feature (1)..(251): Homolog of NCBI NO: 30689567 NR Description: expressed protein [Arabidopsis thaliana]
  misc_feature (169)..(238): Homolog of NCBI NO: 31199497 NR Description: ENSANGP00000021467 [Anopheles gambiae]
  misc_feature (169)..(243): Homolog of NCBI NO: 19922544 NR Description: CG10927-PA [Drosophila melanogaster]
  misc_feature (89)..(242): Homolog of NCBI NO: 19923945 NR Description: hypothetical protein BC011824 [Homo sapiens]
  misc_feature (68)..(239): Homolog of NCBI NO: 23508743 NR Description: hypothetical protein [Plasmodium falciparum 3D7]
  misc_feature (169)..(237): Homolog of NCBI NO: 22204218 NR Description: SI:dZ211O13.3 (novel protein) [Danio rerio]
  misc_feature (169)..(237): Homolog of NCBI NO: 22204386 NR Description: SI:dZ72B14.5 (novel protein) [Danio rerio]
  misc_feature (170)..(238): Homolog of NCBI NO: 25144639 NR Description: Cytidine, cytosine, dCTP et al deaminase elegans] >gi|19571667|emb|CAB55073.2| Hypothetical protein
MRVVIDMAVSGHTPLVNAAVIVDPSVRRIIASETDQVYASSAPRDMTSAETRPFEETGEICLNDTLEKQNGSLSALSCLNPWQWSLQPHDTENCSQWHPLRHASMVAIESSSARDRNLFPNPSKIFDQDHVPPSNTDSPAKKQKTSSQSPDVQNDSREETVRDPSMERPYLCTGYDIFLLLEPCTIRDMFPRCAMALVHQRIKRIFYAFPNTTAGGLGSVHRLQGEKSLNHHYAVFRVLLPDDALRQMTTV

SEQ ID NO: 73667 - DNA, 1008 bp, Arabidopsis thaliana
  misc_feature (1)..(1008): Ceres Seq. ID no. 4974111
  misc_feature: MA Experiment ID: 20001451 Result: Up-regulated in Transcription
  misc_feature: MA Experiment 20001451 PARAMETER Experiment Name: At_Far-red-induction_P Parameter: Age (day) Value: 7
  misc_feature: MA Experiment 20001451 PARAMETER Experiment Name: At_Far-red-induction_P Parameter: Light Value: Far-red vs. White
  misc_feature: MA Experiment 20001451 PARAMETER Experiment Name: At_Far-red-induction_P Parameter: Organism Value: A. thaliana
  misc_feature: MA Experiment 20001451 PARAMETER Experiment Name: At_Far-red-induction_P Parameter: Plant Line Value: Columbia
  misc_feature: MA Experiment 20001451 PARAMETER Experiment Name: At_Far-red-induction_P Parameter: Timepoint (hr) Value: 24
  misc_feature: MA Experiment 20001451 PARAMETER Experiment Name: At_Far-red-induction_P Parameter: Tissue Value: Whole Plant
atgaaaatcttgatcttgattctatcctttgtgacactctttgagatttgcgttgtggacgcatgtcgatcatactgtggaaacataaccgttgattatccgtttgggatccgaaacggatgtgggcatccagggtatagagatctattgttttgtatgaacgatgtgttgatgtttcacataagttcaggttcttatagagttttggacatcgattacgcatatcagtccataacactgcatgatcctcacatgtcgaactgcgaaaccatcgtgctcggtggcaaaggcaatggctttgaagctgaggattggagaactccatatttcaatcctacctcagataatgtctttatgttgatcggatgttctcctaaatctcctatatttcaaggcttcccggaaaagaaagtgccgtgccgcaacatctctggaatgagctgcgaagaatacatgtcatgtccagcttgggacatggtcggatacagacaaccgggtatacattccgggtcaggtccacccatgtgttgtggggtcgggttcgaatccgtaaaagcgattaatctaagtaagttggagtgtgaaggatacagtagtgcgtataatctagcacccttgaaacttagaggaccctctgattgggcttatgggatacgtgttaagtatgaactccaaggaagtgatgcgttttgtcgtgcgtgtgttgcaacttctgggacttgtggctatgaacctgctgatggtggagggcttagacatgtttgcatgtgtgacaaccataattccactacaaactgtgattcagttatatcaccaaccggtgcatcatcaagtgttcgaccaaaagctatcggatgtaagtttcaaaatgcatttacgtgtactctagtttttgtacagatttatttgactttaaccgtacctaaattactaccctttttttttgttgcagcactgatcatctacttcatagctatgaacataggctttcagagaagacagcgatga

SEQ ID NO: 73668 - protein, 335 aa, Arabidopsis thaliana
  peptide (1)..(335): Ceres Seq. ID no. 4974112
  misc_feature (1)..(335): Homolog of NCBI NO: 15240650 NR Description: unknown protein; protein id: At5g50290.1 thaliana] >gi|9759031|dbj|BAB09400.1| gene_id:K6A12.15~unknown
  misc_feature (5)..(272): Homolog of NCBI NO: 15229029 NR Description: unknown protein; protein id: At3g17350.1 thaliana] >gi|11994552|dbj|BAB02739.1|
  misc_feature (5)..(266): Homolog of NCBI NO: 18391149 NR Description: Expressed protein; protein id: At1g10380.1, by cDNA: 156978., supported by cDNA: gi_16323146 [Arabidopsis >gi|16323147|gb|AAL15308.1| At1g10380/F14N23_32 [Arabidopsis
  misc_feature (5)..(266): Homolog of NCBI NO: 25372857 NR Description: protein F14N23.27 [imported] - Arabidopsis >gi|4914341|gb|AAD32889.1|AC005489_27 F14N23.27 [Arabidopsis
  misc_feature (22)..(266): Homolog of NCBI NO: 18391330 NR Description: Expressed protein; protein id: At1g11915.1, by cDNA: gi_13507566, supported by cDNA: gi_15293302 [Arabidopsis
MKILILILSFVTLFEICVVDACRSYCGNITVDYPFGIRNGCGHPGYRDLLFCMNDVLMFHISSGSYRVLDIDYAYQSITLHDPHMSNCETIVLGGKGNGFEAEDWRTPYFNPTSDNVFMLIGCSPKSPIFQGFPEKKVPCRNISGMSCEEYMSCPAWDMVGYRQPGIHSGSGPPMCCGVGFESVKAINLSKLECEGYSSAYNLAPLKLRGPSDWAYGIRVKYELQGSDAFCRACVATSGTCGYEPADGGGLRHVCMCDNHNSTTNCDSVISPTGASSSVRPKAIGCKFQNAFTCTLVFVQIYLTLTVPKLLPFFFVAALIIYFIAMNIGFQRRQR

SEQ ID NO: 73669 - protein, 283 aa, Arabidopsis thaliana
  peptide (1)..(283): Ceres Seq. ID no. 4974113
  misc_feature (1)..(283): Homolog of NCBI NO: 15240650 NR Description: unknown protein; protein id: At5g50290.1 thaliana] >gi|9759031|dbj|BAB09400.1| gene_id:K6A12.15~unknown
  misc_feature (1)..(220): Homolog of NCBI NO: 15229029 NR Description: unknown protein; protein id: At3g17350.1 thaliana] >gi|11994552|dbj|BAB02739.1|
  misc_feature (1)..(214): Homolog of NCBI NO: 18391149 NR Description: Expressed protein; protein id: At1g10380.1, by cDNA: 156978., supported by cDNA: gi_16323146 [Arabidopsis >gi|16323147|gb|AAL15308.1| At1g10380/F14N23_32 [Arabidopsis
  misc_feature (1)..(214): Homolog of NCBI NO: 25372857 NR Description: protein F14N23.27 [imported] - Arabidopsis >gi|4914341|gb|AAD32889.1|AC005489_27 F14N23.27 [Arabidopsis
  misc_feature (1)..(214): Homolog of NCBI NO: 18391330 NR Description: Expressed protein; protein id: At1g11915.1, by cDNA: gi_13507566, supported by cDNA: gi_15293302 [Arabidopsis
MNDVLMFHISSGSYRVLDIDYAYQSITLHDPHMSNCETIVLGGKGNGFEAEDWRTPYFNPTSDNVFMLIGCSPKSPIFQGFPEKKVPCRNISGMSCEEYMSCPAWDMVGYRQPGIHSGSGPPMCCGVGFESVKAINLSKLECEGYSSAYNLAPLKLRGPSDWAYGIRVKYELQGSDAFCRACVATSGTCGYEPADGGGLRHVCMCDNHNSTTNCDSVISPTGASSSVRPKAIGCKFQNAFTCTLVFVQIYLTLTVPKLLPFFFVAALIIYFIAMNIGFQRRQR

SEQ ID NO: 73670 - protein, 278 aa, Arabidopsis thaliana
  peptide (1)..(278): Ceres Seq. ID no. 4974114
  misc_feature (1)..(278): Homolog of NCBI NO: 15240650 NR Description: unknown protein; protein id: At5g50290.1 thaliana] >gi|9759031|dbj|BAB09400.1| gene_id:K6A12.15~unknown
  misc_feature (1)..(215): Homolog of NCBI NO: 15229029 NR Description: unknown protein; protein id: At3g17350.1 thaliana] >gi|11994552|dbj|BAB02739.1|
  misc_feature (1)..(209): Homolog of NCBI NO: 18391149 NR Description: Expressed protein; protein id: At1g10380.1, by cDNA: 156978., supported by cDNA: gi_16323146 [Arabidopsis >gi|16323147|gb|AAL15308.1| At1g10380/F14N23_32 [Arabidopsis
  misc_feature (1)..(209): Homolog of NCBI NO: 25372857 NR Description: protein F14N23.27 [imported] - Arabidopsis >gi|4914341|gb|AAD32889.1|AC005489_27 F14N23.27 [Arabidopsis
  misc_feature (1)..(209): Homolog of NCBI NO: 18391330 NR Description: Expressed protein; protein id: At1g11915.1, by cDNA: gi_13507566, supported by cDNA: gi_15293302 [Arabidopsis
MFHISSGSYRVLDIDYAYQSITLHDPHMSNCETIVLGGKGNGFEAEDWRTPYFNPTSDNVFMLIGCSPKSPIFQGFPEKKVPCRNISGMSCEEYMSCPAWDMVGYRQPGIHSGSGPPMCCGVGFESVKAINLSKLECEGYSSAYNLAPLKLRGPSDWAYGIRVKYELQGSDAFCRACVATSGTCGYEPADGGGLRHVCMCDNHNSTTNCDSVISPTGASSSVRPKAIGCKFQNAFTCTLVFVQIYLTLTVPKLLPFFFVAALIIYFIAMNIGFQRRQR

SEQ ID NO: 73671 - DNA, 1914 bp, Arabidopsis thaliana
  misc_feature (1)..(1914): Ceres Seq. ID no. 4974139
  misc_feature: MA Experiment ID: 20000171 Result: Down-regulated in Transcription
  misc_feature: MA Experiment 20000171 PARAMETER Experiment Name: At_42deg_Heat_P Parameter: Age (day) Value: 14
  misc_feature: MA Experiment 20000171 PARAMETER Experiment Name: At_42deg_Heat_P Parameter: Organism Value: A. thaliana
  misc_feature: MA Experiment 20000171 PARAMETER Experiment Name: At_42deg_Heat_P Parameter: Plant Line Value: WS
  misc_feature: MA Experiment 20000171 PARAMETER Experiment Name: At_42deg_Heat_P Parameter: Temperature (deg C) Value: 42 vs. 22
  misc_feature: MA Experiment 20000171 PARAMETER Experiment Name: At_42deg_Heat_P Parameter: Timepoint (hr) Value: 1
  misc_feature: MA Experiment 20000171 PARAMETER Experiment Name: At_42deg_Heat_P Parameter: Tissue Value: Aerial
  misc_feature: MA Experiment ID: 20000173 Result: Down-regulated in Transcription
  misc_feature: MA Experiment 20000173 PARAMETER Experiment Name: At_42deg_Heat_P Parameter: Age (day) Value: 14
  misc_feature: MA Experiment 20000173 PARAMETER Experiment Name: At_42deg_Heat_P Parameter: Organism Value: A. thaliana
  misc_feature: MA Experiment 20000173 PARAMETER Experiment Name: At_42deg_Heat_P Parameter: Plant Line Value: WS
  misc_feature: MA Experiment 20000173 PARAMETER Experiment Name: At_42deg_Heat_P Parameter: Temperature (deg C) Value: 42 vs. 22
  misc_feature: MA Experiment 20000173 PARAMETER Experiment Name: At_42deg_Heat_P Parameter: Timepoint (hr) Value: 6
  misc_feature: MA Experiment 20000173 PARAMETER Experiment Name: At_42deg_Heat_P Parameter: Tissue Value: Aerial
  misc_feature: MA Experiment ID: 20000496 Result: Down-regulated in Transcription
  misc_feature: MA Experiment 20000496 PARAMETER Experiment Name: At_Guard_Cells_P Parameter: Harvest Date Value: 7/19/2002
  misc_feature: MA Experiment 20000496 PARAMETER Experiment Name: At_Guard_Cells_P Parameter: Organism Value: Canola
  misc_feature: MA Experiment 20000496 PARAMETER Experiment Name: At_Guard_Cells_P Parameter: Tissue Value: Guard Cells vs. Leaves
  misc_feature: MA Experiment ID: 20000794 Result: Up-regulated in Transcription
  misc_feature: MA Experiment 20000794 PARAMETER Experiment Name: At_Petals_P Parameter: Age (day) Value: 23-25 days
  misc_feature: MA Experiment 20000794 PARAMETER Experiment Name: At_Petals_P Parameter: Plant Line Value: WS
  misc_feature: MA Experiment 20000794 PARAMETER Experiment Name: At_Petals_P Parameter: Tissue Value: Petals vs. Whole plant
atgttacttatcttctcaagcttcgataaccgtttatcaaatatcaaaaccgcgatgacgaaccaggaagagaatcaaaacgacgctcttgtggcgcgtttagaggctgcagaatcggttattcatcggtgggatggtggtaatgattcttctcgtcactcgtcttcgtcttctggtaactatcgttcctcttcgttttctctttcgtttgatgaatctccggaggaagctaccgagtttctttcagctgttgatgagattatctctttgcttgaggatctttcgtctgagaataagcctgatatggtggatagagctgatagtgctttgcagatggctatgtctcagcttgaagatgaatttagacggattttgattcgtaacactgttcctttagacgctgagcgactctatggctcgatgcggcgtgtttcgttgtcctttgctgatggtgatgttgttgaggattttgagaattttggtttggttgctgatggagatggtagtgggagtaggaggaggttgtttcatgagagaggagggagtatagggtgtgatctttgggttgatttgattaatccaactgctgttgaagatttgaaggagattgcagagcggatgattcgcgctggttatgagaaggagtgtgttcaggtttatagttcggttaggcgtgatgctttggatgattgtttgatgattcttggtgttgagaagctgagtatagaagaagttcagaagattgattggaagtctatggatgagaagatgaagaagtggattcaagctgtgaagattactgttagggttcttcttgttggtgagaaaaagatatgtgatgagatctttagcagttcggagtcgagtaaagaggtttgctttaacgagacaactaaaagctgtgtgatgcagttgttgaatttcggagaggctgtggcgattggtagaagatcatcagagaagttgtttaggattctggacatgtatgatgcgttggctaatgtgttgcagactttagaggtgatggtcactgactgttttgtgtgtaatgagaccaagggggtgttggaagcactgggtgatgctgcgagggggacttttgttgagtttgagaataatgttcggaatgagacatcaaagagaccgacgacaaatggtgaggttcatccaatgatacgttatgtgatgaattacatgaaattgattgtggattatgcggtgaccttaaattcgcttctggagagtaatgagtcaagtggcgtatctggtgatgatagtacagaagagatgtctcctcttgcgaaaagaatattggggttgattacgtcgttggaatcaaatcttgaagataaatcaaagttgtatgaagatggtgggctgcaacatgtgttcatgatgaacaacatttactacatagttcagaaggtgaaggattctgagcttggtaaactcttgggtgatgattgggttagaaaacgaagagggcagatacgtcaatatgctaccggttacctcagggcttcctggagcagggtgctatctgctttgagggacgaaagtatgggtggaagttcaagtggtagtccgagttatggacaaagaagcaacaattcttccaagatggcgttaaaagagagattcagaggttttaatgccagctttgaagagttatacaggctgcaaacggcttggaaggtcccggatcctcaacttcgtgaagaactgagaatatctatatcagagaaagtaatcccggcttaccgggctttcttcggaaggaataggagtcaactagaaggtggtaggcatgctggaaagtacataaagtacacaccagatgacctggagagttacttaccagacctatttgaaggaaatcaattggttattcaccacccgagaaggaaaagttaa

SEQ ID NO: 73672 - protein, 637 aa, Arabidopsis thaliana; identical to SEQ ID NO: 70035
  peptide (1)..(637): Ceres Seq. ID no. 4974140
  misc_feature (72)..(636): Homolog of NCBI NO: 38346639 NR Description: OSJNBa0072D21.9 [Oryza sativa (japonica
  misc_feature (1)..(627): Homolog of NCBI NO: 19386798 NR Description: putative leucine zipper protein [Oryza sativa
  misc_feature (24)..(635): Homolog of NCBI NO: 30682979 NR Description: exocyst subunit EXO70 family [Arabidopsis >gi|9294634|dbj|BAB02973.1| gb|AAD25781.1~gene_id:MAG2.5~strong
  misc_feature (189)..(637): Homolog of NCBI NO: 15218495 NR Description: unknown protein; protein id: At1g72470.1
  misc_feature (74)..(137): Homolog of NCBI NO: 15218495 NR Description: unknown protein; protein id: At1g72470.1
  misc_feature (34)..(631): Homolog of NCBI NO: 15221040 NR Description: hypothetical protein; protein id: At1g54090.1, by cDNA: gi_20260593 [Arabidopsis thaliana]
  misc_feature (166)..(635): Homolog of NCBI NO: 23270388 NR Description: unknown protein [Arabidopsis thaliana]
  misc_feature (70)..(626): Homolog of NCBI NO: 100226 NR Description: tomato leucine zipper-containing protein - tomato protein of unknown function [Lycopersicon esculentum]
  misc_feature (62)..(627): Homolog of NCBI NO: 34909792 NR Description: P0403C05.2 [Oryza sativa (japonica
  misc_feature (74)..(625): Homolog of NCBI NO: 15237198 NR Description: leucine zipper-containing protein; protein id: supported by cDNA: gi_20453215 [Arabidopsis thaliana] leucine zipper protein [Arabidopsis thaliana]

SEQ ID NO: 73673 - protein, 619 aa, Arabidopsis thaliana
  peptide (1)..(619): Ceres Seq. ID no. 4974141
  misc_feature (54)..(618): Homolog of NCBI NO: 38346639 NR Description: OSJNBa0072D21.9 [Oryza sativa (japonica
  misc_feature (1)..(609): Homolog of NCBI NO: 19386798 NR Description: putative leucine zipper protein [Oryza sativa
  misc_feature (6)..(617): Homolog of NCBI NO: 30682979 NR Description: exocyst subunit EXO70 family [Arabidopsis >gi|9294634|dbj|BAB02973.1| gb|AAD25781.1~gene_id:MAG2.5~strong
  misc_feature (171)..(619): Homolog of NCBI NO: 15218495 NR Description: unknown protein; protein id: At1g72470.1
  misc_feature (56)..(119): Homolog of NCBI NO: 15218495 NR Description: unknown protein; protein id: At1g72470.1
  misc_feature (16)..(613): Homolog of NCBI NO: 15221040 NR Description: hypothetical protein; protein id: At1g54090.1, by cDNA: gi_20260593 [Arabidopsis thaliana]
  misc_feature (148)..(617): Homolog of NCBI NO: 23270388 NR Description: unknown protein [Arabidopsis thaliana]
  misc_feature (52)..(608): Homolog of NCBI NO: 100226 NR Description: tomato leucine zipper-containing protein - tomato protein of unknown function [Lycopersicon esculentum]
  misc_feature (44)..(609): Homolog of NCBI NO: 34909792 NR Description: P0403C05.2 [Oryza sativa (japonica
  misc_feature (56)..(607): Homolog of NCBI NO: 15237198 NR Description: leucine zipper-containing protein; protein id: supported by cDNA: gi_20453215 [Arabidopsis thaliana] leucine zipper protein [Arabidopsis thaliana]
MTNQEENQNDALVARLEAAESVIHRWDGGNDSSRHSSSSSGNYRSSSFSLSFDESPEEATEFLSAVDEIISLLEDLSSENKPDMVDRADSALQMAMSQLEDEFRRILIRNTVPLDAERLYGSMRRVSLSFADGDVVEDFENFGLVADGDGSGSRRRLFHERGGSIGCDLWVDLINPTAVEDLKEIAERMIRAGYEKECVQVYSSVRRDALDDCLMILGVEKLSIEEVQKIDWKSMDEKMKKWIQAVKITVRVLLVGEKKICDEIFSSSESSKEVCFNETTKSCVMQLLNFGEAVAIGRRSSEKLFRILDMYDALANVLQTLEVMVTDCFVCNETKGVLEALGDAARGTFVEFENNVRNETSKRPTTNGEVHPMIRYVMNYMKLIVDYAVTLNSLLESNESSGVSGDDSTEEMSPLAKRILGLITSLESNLEDKSKLYEDGGLQHVFMMNNIYYIVQKVKDSELGKLLGDDWVRKRRGQIRQYATGYLRASWSRVLSALRDESMGGSSSGSPSYGQRSNNSSKMALKERFRGFNASFEELYRLQTAWKVPDPQLREELRISISEKVIPAYRAFFGRNRSQLEGGRHAGKYIKYTPDDLESYLPDLFEGNQLVIHHPRRKS

SEQ ID NO: 73674 - protein, 536 aa, Arabidopsis thaliana
  peptide (1)..(536): Ceres Seq. ID no. 4974142
  misc_feature (1)..(535): Homolog of NCBI NO: 38346639 NR Description: OSJNBa0072D21.9 [Oryza sativa (japonica
  misc_feature (1)..(526): Homolog of NCBI NO: 19386798 NR Description: putative leucine zipper protein [Oryza sativa
  misc_feature (1)..(534): Homolog of NCBI NO: 30682979 NR Description: exocyst subunit EXO70 family [Arabidopsis >gi|9294634|dbj|BAB02973.1| gb|AAD25781.1~gene_id:MAG2.5~strong
  misc_feature (88)..(536): Homolog of NCBI NO: 15218495 NR Description: unknown protein; protein id: At1g72470.1
  misc_feature (1)..(36): Homolog of NCBI NO: 15218495 NR Description: unknown protein; protein id: At1g72470.1
  misc_feature (1)..(530): Homolog of NCBI NO: 15221040 NR Description: hypothetical protein; protein id: At1g54090.1, by cDNA: gi_20260593 [Arabidopsis thaliana]
  misc_feature (65)..(534): Homolog of NCBI NO: 23270388 NR Description: unknown protein [Arabidopsis thaliana]
  misc_feature (1)..(525): Homolog of NCBI NO: 100226 NR Description: tomato leucine zipper-containing protein - tomato protein of unknown function [Lycopersicon esculentum]
  misc_feature (1)..(526): Homolog of NCBI NO: 34909792 NR Description: P0403C05.2 [Oryza sativa (japonica
  misc_feature (1)..(524): Homolog of NCBI NO: 15237198 NR Description: leucine zipper-containing protein; protein id: supported by cDNA: gi_20453215 [Arabidopsis thaliana] leucine zipper protein [Arabidopsis thaliana]
MVDRADSALQMAMSQLEDEFRRILIRNTVPLDAERLYGSMRRVSLSFADGDVVEDFENFGLVADGDGSGSRRRLFHERGGSIGCDLWVDLINPTAVEDLKEIAERMIRAGYEKECVQVYSSVRRDALDDCLMILGVEKLSIEEVQKIDWKSMDEKMKKWIQAVKITVRVLLVGEKKICDEIFSSSESSKEVCFNETTKSCVMQLLNFGEAVAIGRRSSEKLFRILDMYDALANVLQTLEVMVTDCFVCNETKGVLEALGDAARGTFVEFENNVRNETSKRPTTNGEVHPMIRYVMNYMKLIVDYAVTLNSLLESNESSGVSGDDSTEEMSPLAKRILGLITSLESNLEDKSKLYEDGGLQHVFMMNNIYYIVQKVKDSELGKLLGDDWVRKRRGQIRQYATGYLRASWSRVLSALRDESMGGSSSGSPSYGQRSNNSSKMALKERFRGFNASFEELYRLQTAWKVPDPQLREELRISISEKVIPAYRAFFGRNRSQLEGGRHAGKYIKYTPDDLESYLPDLFEGNQLVIHHPRRKS

SEQ ID NO: 73675 - DNA, 1029 bp, Arabidopsis thaliana
  misc_feature (1)..(1029): Ceres Seq. ID no. 4974190
  misc_feature: MA Experiment ID: 20000437 Result: Up-regulated in Transcription
  misc_feature: MA Experiment 20000437 PARAMETER Experiment Name: At_Drought_P Parameter: Age (day) Value: 8
  misc_feature: MA Experiment 20000437 PARAMETER Experiment Name: At_Drought_P Parameter: Organism Value: A. thaliana
  misc_feature: MA Experiment 20000437 PARAMETER Experiment Name: At_Drought_P Parameter: Plant Line Value: WS
  misc_feature: MA Experiment 20000437 PARAMETER Experiment Name: At_Drought_P Parameter: Timepoint (hr) Value: 24
  misc_feature: MA Experiment 20000437 PARAMETER Experiment Name: At_Drought_P Parameter: Tissue Value: Whole Plant
  misc_feature: MA Experiment 20000437 PARAMETER Experiment Name: At_Drought_P Parameter: Treatment Value: Drought vs. No Drought
  misc_feature: MA Experiment ID: 20001459 Result: Down-regulated in Transcription
  misc_feature: MA Experiment 20001459 PARAMETER Experiment Name: At_50mM_NH4NO3_L-to-H_P Parameter: Age (day) Value: Undefined
  misc_feature: MA Experiment 20001459 PARAMETER Experiment Name: At_50mM_NH4NO3_L-to-H_P Parameter: Organism Value: Undefined
  misc_feature: MA Experiment 20001459 PARAMETER Experiment Name: At_50mM_NH4NO3_L-to-H_P Parameter: Plant Line Value: Undefined
  misc_feature: MA Experiment 20001459 PARAMETER Experiment Name: At_50mM_NH4NO3_L-to-H_P Parameter: Timepoint (hr) Value: 4
  misc_feature: MA Experiment 20001459 PARAMETER Experiment Name: At_50mM_NH4NO3_L-to-H_P Parameter: Tissue Value: Siliques
  misc_feature: MA Experiment 20001459 PARAMETER Experiment Name: At_50mM_NH4NO3_L-to-H_P Parameter: Treatment Value: 50mM NH4NO3 vs. 100mM Manitol
  misc_feature: Pfam Name: adh_short Pfam Description: short chain dehydrogenase
atggattcaatcaacaagatcatcaacttcttgtttcctctcttaaccttgtatgcacttcttgtcttctacccaacttaccagaggctcaaatccgccgtctccatctgccggaatctgttctcggaaaatgtcgccggaaaagttgttgtcatcaccggagcagcttctggcatcggcgaggctttagcgtatgagtacgggaagaggggagcgtatttagcacttgttgacataagaggagaacctctcttccatgtagcggctctcgctgagctctatggctcccctgaagtcttgcccttagtagccgatgtttccaaactccaagactgcgagcgttttatccgagccacggttcttcattttggacgattggatcatctagtgacaaatgcaggagttgctccactctatttttttgcagacatcgaagatgtctctaaggcttcgccggctatggacatcaacttttggggatctgtgtattgcacattttttgcttctccatacctaaagaagtttagaggaaggattgtggtgattgcttctggatgtggatacattgcttcacctagactaagcttttactgtgcgagtaaagctgctgtgatcgccttttatgaaacactaagaactgagtttggatcagatattggggttaccattgtagcaccggggatcgtcgattcggaaatgagccgaggcaagttcatgacaaaggacggtaaacttgtcgtcgataaagagctcagagatgtgcaaatgagcgtattgccagtagaatcagccgagaggtgtgcgaaagcaataatgcggagcgtatgtagaggagataggtacttgttggaacccgactggataggttgtgtcatattgttgaaggttttttgttctgaggcaacagagtgggtagcccggtggctgctgatagccagaccaaaatttccaatgatggaggctcttagcaacaagatccttgatgtagcccatgcctttaattctttcttctcttttcctcattattag

SEQ ID NO: 73676 - protein, 342 aa, Arabidopsis thaliana
  peptide (1)..(342): Ceres Seq. ID no. 4974191
  misc_feature: Pfam Name: adh_short Pfam Description: short chain dehydrogenase
  misc_feature (1)..(342): Homolog of NCBI NO: 15241261 NR Description: putative protein; protein id: At5g50770.1 thaliana] >gi|8777400|dbj|BAA96990.1| contains similarity to
  misc_feature (1)..(328): Homolog of NCBI NO: 15824408 NR Description: steroleosin [Sesamum indicum]
  misc_feature (1)..(329): Homolog of NCBI NO: 18423187 NR Description: 11-beta-hydroxysteroid dehydrogenase-like; id: At5g50600.1, supported by cDNA: gi_15450584, supported by gi_17065383, supported by cDNA: gi_17386149, supported by cDNA:
  misc_feature (16)..(303): Homolog of NCBI NO: 21742781 NR Description: OSJNBa0055C08.3 [Oryza sativa (japonica
  misc_feature (1)..(316): Homolog of NCBI NO: 15232779 NR Description: putative protein; protein id: At3g47360.1
  misc_feature (1)..(315): Homolog of NCBI NO: 8777392 NR Description: 11-beta-hydroxysteroid dehydrogenase-like
  misc_feature (1)..(316): Homolog of NCBI NO: 15232777 NR Description: putative protein; protein id: At3g47350.1
  misc_feature (1)..(300): Homolog of NCBI NO: 15241203 NR Description: 11-beta-hydroxysteroid dehydrogenase-like;
  misc_feature (1)..(310): Homolog of NCBI NO: 21311775 NR Description: steroleosin-B [Sesamum indicum]
  misc_feature (1)..(310): Homolog of NCBI NO: 15234888 NR Description: putative oxidoreductase; protein id: At4g10020.1
MDSINKIINFLFPLLTLYALLVFYPTYQRLKSAVSICRNLFSENVAGKVVVITGAASGIGEALAYEYGKRGAYLALVDIRGEPLFHVAALAELYGSPEVLPLVADVSKLQDCERFIRATVLHFGRLDHLVTNAGVAPLYFFADIEDVSKASPAMDINFWGSVYCTFFASPYLKKFRGRIVVIASGCGYIASPRLSFYCASKAAVIAFYETLRTEFGSDIGVTIVAPGIVDSEMSRGKFMTKDGKLVVDKELRDVQMSVLPVESAERCAKAIMRSVCRGDRYLLEPDWIGCVILLKVFCSEATEWVARWLLIARPKFPMMEALSNKILDVAHAFNSFFSFPHY

SEQ ID NO: 73677 - protein, 189 aa, Arabidopsis thaliana
  peptide (1)..(189): Ceres Seq. ID no. 4974192
  misc_feature: Pfam Name: adh_short Pfam Description: short chain dehydrogenase
  misc_feature (1)..(189): Homolog of NCBI NO: 15241261 NR Description: putative protein; protein id: At5g50770.1 thaliana] >gi|8777400|dbj|BAA96990.1| contains similarity to
  misc_feature (1)..(175): Homolog of NCBI NO: 15824408 NR Description: steroleosin [Sesamum indicum]
  misc_feature (1)..(176): Homolog of NCBI NO: 18423187 NR Description: 11-beta-hydroxysteroid dehydrogenase-like; id: At5g50600.1, supported by cDNA: gi_15450584, supported by gi_17065383, supported by cDNA: gi_17386149, supported by cDNA:
  misc_feature (1)..(150): Homolog of NCBI NO: 21742781 NR Description: OSJNBa0055C08.3 [Oryza sativa (japonica
  misc_feature (1)..(163): Homolog of NCBI NO: 15232779 NR Description: putative protein; protein id: At3g47360.1
  misc_feature (1)..(162): Homolog of NCBI NO: 8777392 NR Description: 11-beta-hydroxysteroid dehydrogenase-like
  misc_feature (1)..(163): Homolog of NCBI NO: 15232777 NR Description: putative protein; protein id: At3g47350.1
  misc_feature (1)..(147): Homolog of NCBI NO: 15241203 NR Description: 11-beta-hydroxysteroid dehydrogenase-like;
  misc_feature (1)..(157): Homolog of NCBI NO: 21311775 NR Description: steroleosin-B [Sesamum indicum]
  misc_feature (1)..(157): Homolog of NCBI NO: 15234888 NR Description: putative oxidoreductase; protein id: At4g10020.1
MDINFWGSVYCTFFASPYLKKFRGRIVVIASGCGYIASPRLSFYCASKAAVIAFYETLRTEFGSDIGVTIVAPGIVDSEMSRGKFMTKDGKLVVDKELRDVQMSVLPVESAERCAKAIMRSVCRGDRYLLEPDWIGCVILLKVFCSEATEWVARWLLIARPKFPMMEALSNKILDVAHAFNSFFSFPHY

SEQ ID NO: 73678 - DNA, 1083 bp, Arabidopsis thaliana
  misc_feature (1)..(1083): Ceres Seq. ID no. 4974326
  misc_feature: MA Experiment ID: 20000182 Result: Up-regulated in Transcription
  misc_feature: MA Experiment 20000182 PARAMETER Experiment Name: At_2mM_SA_P Parameter: Age (day) Value: 14
  misc_feature: MA Experiment 20000182 PARAMETER Experiment Name: At_2mM_SA_P Parameter: Organism Value: A. thaliana
  misc_feature: MA Experiment 20000182 PARAMETER Experiment Name: At_2mM_SA_P Parameter: Plant Line Value: WS
  misc_feature: MA Experiment 20000182 PARAMETER Experiment Name: At_2mM_SA_P Parameter: Timepoint (hr) Value: 6
  misc_feature: MA Experiment 20000182 PARAMETER Experiment Name: At_2mM_SA_P Parameter: Tissue Value: Aerial
  misc_feature: MA Experiment 20000182 PARAMETER Experiment Name: At_2mM_SA_P Parameter: Treatment Value: 2mM SA vs. No Treatment
  misc_feature: MA Experiment ID: 20000227 Result: Down-regulated in Transcription
  misc_feature: MA Experiment 20000227 PARAMETER Experiment Name: At_Root-Tips-vs-Tops_P Parameter: Tissue Value: Root Tips vs. Root Tops
atggcagctccggcgatcctaaacggcggcgatgcgacggagagagaaacacgaatggctcactctgcaatgacattggttcaggtcataaatggaggataccatgtggttacgaaagtagctcttaacgttggtgtaaatcagctcgttttttgtgtctttcgcgatcttcttgctctctccattctcgcacctctcgcttttttccgtgaaaggatatttgggaaccagttactatttcttatgggtttatcttacacgaatccaacttatgctgctgctatacaaccatcaatccctgtctttacatttctcttggctgtcttgatgggtacagaaaaagtgaacttgttgaaagtcgagggccaaacgaaagttggaggtactcttgtttgtgtttcgggtgctatagcgatggctttgtttcgtggtccagccttgtttggaggtaaagatgcagcagattcagtgaaaagtgtaattattgatagaagtcaaccagagcttaatgggtggttagtctctagttttcttggtcttgggtttgatcaatggcacattggagttttatgtttgattggaaactgtatgtgtatggctgcttttctcgctgtccaagcaccggttttgaagaagtatcctgcctacctttcggttgctgcgtattcatacttcttcggtgcatcaataatgatcacaacagctatcttgtttgttagagagcctaaagattggagcttaacacaatctgaggttcttgctgttatattcgcaggagtgtttgcctcagctctaaactatggactcttgacttggtccaataaaattcttggagctgctttggtttccctatacaatcctcttcagcctgcaacatcggcctttttatcgacaattttcctcggcagcccgatctatcttggaagcgttttgggtggaatcctcatcatttgcgggctttatatggttacttgggcatcttacagagagcaacaaacaacatcagctgggaatgagattgcttcttctagtgatgtaagaatctcggaacctttcatttacagagatgagactggtaaataa

SEQ ID NO: 73679 - protein, 360 aa, Arabidopsis thaliana
  peptide (1)..(360): Ceres Seq. ID no. 4974327
  misc_feature (198)..(325): Pfam Name: Integral membrane protein DUF6 Pfam Description: Integral membrane protein DUF6
  misc_feature (1)..(360): Homolog of NCBI NO: 9758727 NR Description: nodulin-like protein [Arabidopsis thaliana]
  misc_feature (73)..(354): Homolog of NCBI NO: 18415262 NR Description: Expressed protein; protein id: At4g19185.1, by cDNA: 36576., supported by cDNA: gi_16974592 [Arabidopsis >gi|16974593|gb|AAL31201.1| AT4g19180/T18B16_150 [Arabidopsis
  misc_feature (1)..(72): Homolog of NCBI NO: 18415262 NR Description: Expressed protein; protein id: At4g19185.1, by cDNA: 36576., supported by cDNA: gi_16974592 [Arabidopsis >gi|16974593|gb|AAL31201.1| AT4g19180/T18B16_150 [Arabidopsis
  misc_feature (1)..(360): Homolog of NCBI NO: 30694751 NR Description: nodulin N21 family protein [Arabidopsis thaliana]
  misc_feature (73)..(354): Homolog of NCBI NO: 21593145 NR Description: unknown [Arabidopsis thaliana]
  misc_feature (24)..(72): Homolog of NCBI NO: 21593145 NR Description: unknown [Arabidopsis thaliana]
  misc_feature (205)..(360): Homolog of NCBI NO: 15231274 NR Description: putative protein; protein id: At3g45870.1
  misc_feature (66)..(153): Homolog of NCBI NO: 15231274 NR Description: putative protein; protein id: At3g45870.1
  misc_feature (14)..(72): Homolog of NCBI NO: 15231274 NR Description: putative protein; protein id: At3g45870.1
  misc_feature (205)..(308): Homolog of NCBI NO: 7487133 NR Description: hypothetical protein T18B16.150 - Arabidopsis >gi|2828293|emb|CAA16707.1| putative protein [Arabidopsis >gi|7268713|emb|CAB78920.1| putative protein [Arabidopsis
MAAPAILNGGDATERETRMAHSAMTLVQVINGGYHVVTKVALNVGVNQLVFCVFRDLLALSILAPLAFFRERIFGNQLLFLMGLSYTNPTYAAAIQPSIPVFTFLLAVLMGTEKVNLLKVEGQTKVGGTLVCVSGAIAMALFRGPALFGGKDAADSVKSVIIDRSQPELNGWLVSSFLGLGFDQWHIGVLCLIGNCMCMAAFLAVQAPVLKKYPAYLSVAAYSYFFGASIMITTAILFVREPKDWSLTQSEVLAVIFAGVFASALNYGLLTWSNKILGAALVSLYNPLQPATSAFLSTIFLGSPIYLGSVLGGILIICGLYMVTWASYREQQTTSAGNEIASSSDVRISEPFIYRDETGK

SEQ ID NO: 73680 - protein, 342 aa, Arabidopsis thaliana
  peptide (1)..(342): Ceres Seq. ID no. 4974328
  misc_feature (180)..(307): Pfam Name: Integral membrane protein DUF6 Pfam Description: Integral membrane protein DUF6
  misc_feature (1)..(342): Homolog of NCBI NO: 9758727 NR Description: nodulin-like protein [Arabidopsis thaliana]
  misc_feature (55)..(336): Homolog of NCBI NO: 18415262 NR Description: Expressed protein; protein id: At4g19185.1, by cDNA: 36576., supported by cDNA: gi_16974592 [Arabidopsis >gi|16974593|gb|AAL31201.1| AT4g19180/T18B16_150 [Arabidopsis
  misc_feature (1)..(54): Homolog of NCBI NO: 18415262 NR Description: Expressed protein; protein id: At4g19185.1, by cDNA: 36576., supported by cDNA: gi_16974592 [Arabidopsis >gi|16974593|gb|AAL31201.1| AT4g19180/T18B16_150 [Arabidopsis
  misc_feature (1)..(342): Homolog of NCBI NO: 30694751 NR Description: nodulin N21 family protein [Arabidopsis thaliana]
  misc_feature (55)..(336): Homolog of NCBI NO: 21593145 NR Description: unknown [Arabidopsis thaliana]
  misc_feature (6)..(54): Homolog of NCBI NO: 21593145 NR Description: unknown [Arabidopsis thaliana]
  misc_feature (187)..(342): Homolog of NCBI NO: 15231274 NR Description: putative protein; protein id: At3g45870.1
  misc_feature (48)..(135): Homolog of NCBI NO: 15231274 NR Description: putative protein; protein id: At3g45870.1
  misc_feature (1)..(54): Homolog of NCBI NO: 15231274 NR Description: putative protein; protein id: At3g45870.1
  misc_feature (187)..(290): Homolog of NCBI NO: 7487133 NR Description: hypothetical protein T18B16.150 - Arabidopsis >gi|2828293|emb|CAA16707.1| putative protein [Arabidopsis >gi|7268713|emb|CAB78920.1| putative protein [Arabidopsis
MAHSAMTLVQVINGGYHVVTKVALNVGVNQLVFCVFRDLLALSILAPLAFFRERIFGNQLLFLMGLSYTNPTYAAAIQPSIPVFTFLLAVLMGTEKVNLLKVEGQTKVGGTLVCVSGAIAMALFRGPALFGGKDAADSVKSVIIDRSQPELNGWLVSSFLGLGFDQWHIGVLCLIGNCMCMAAFLAVQAPVLKKYPAYLSVAAYSYFFGASIMITTAILFVREPKDWSLTQSEVLAVIFAGVFASALNYGLLTWSNKILGAALVSLYNPLQPATSAFLSTIFLGSPIYLGSVLGGILIICGLYMVTWASYREQQTTSAGNEIASSSDVRISEPFIYRDETGK

SEQ ID NO: 73681 - protein, 337 aa, Arabidopsis thaliana
  peptide (1)..(337): Ceres Seq. ID no. 4974329
  misc_feature (175)..(302): Pfam Name: Integral membrane protein DUF6 Pfam Description: Integral membrane protein DUF6
  misc_feature (1)..(337): Homolog of NCBI NO: 9758727 NR Description: nodulin-like protein [Arabidopsis thaliana]
  misc_feature (50)..(331): Homolog of NCBI NO: 18415262 NR Description: Expressed protein; protein id: At4g19185.1, by cDNA: 36576., supported by cDNA: gi_16974592 [Arabidopsis >gi|16974593|gb|AAL31201.1| AT4g19180/T18B16_150 [Arabidopsis
  misc_feature (1)..(49): Homolog of NCBI NO: 18415262 NR Description: Expressed protein; protein id: At4g19185.1, by cDNA: 36576., supported by cDNA: gi_16974592 [Arabidopsis >gi|16974593|gb|AAL31201.1| AT4g19180/T18B16_150 [Arabidopsis
  misc_feature (1)..(337): Homolog of NCBI NO: 30694751 NR Description: nodulin N21 family protein [Arabidopsis thaliana]
  misc_feature (50)..(331): Homolog of NCBI NO: 21593145 NR Description: unknown [Arabidopsis thaliana]
  misc_feature (1)..(49): Homolog of NCBI NO: 21593145 NR Description: unknown [Arabidopsis thaliana]
  misc_feature (182)..(337): Homolog of NCBI NO: 15231274 NR Description: putative protein; protein id: At3g45870.1
  misc_feature (43)..(130): Homolog of NCBI NO: 15231274 NR Description: putative protein; protein id: At3g45870.1
  misc_feature (1)..(49): Homolog of NCBI NO: 15231274 NR Description: putative protein; protein id: At3g45870.1
  misc_feature (182)..(285): Homolog of NCBI NO: 7487133 NR Description: hypothetical protein T18B16.150 - Arabidopsis >gi|2828293|emb|CAA16707.1| putative protein [Arabidopsis >gi|7268713|emb|CAB78920.1| putative protein [Arabidopsis
MTLVQVINGGYHVVTKVALNVGVNQLVFCVFRDLLALSILAPLAFFRERIFGNQLLFLMGLSYTNPTYAAAIQPSIPVFTFLLAVLMGTEKVNLLKVEGQTKVGGTLVCVSGAIAMALFRGPALFGGKDAADSVKSVIIDRSQPELNGWLVSSFLGLGFDQWHIGVLCLIGNCMCMAAFLAVQAPVLKKYPAYLSVAAYSYFFGASIMITTAILFVREPKDWSLTQSEVLAVIFAGVFASALNYGLLTWSNKILGAALVSLYNPLQPATSAFLSTIFLGSPIYLGSVLGGILIICGLYMVTWASYREQQTTSAGNEIASSSDVRISEPFIYRDETGK

SEQ ID NO: 73682 - DNA, 939 bp, Arabidopsis thaliana
  misc_feature (1)..(939): Ceres Seq. ID no. 4974638
  misc_feature: MA Experiment ID: 20000440 Result: Up-regulated in Transcription
  misc_feature: MA Experiment 20000440 PARAMETER Experiment Name: At_Closed-Flower__Sub_P Parameter: Tissue Value: Closed Flower vs. Whole Plant
  misc_feature: Pfam Name: Pkinase Pfam Description: Protein kinase domain
atgggaaactgtctaaagcatttcaaacaacaacttccttcaattgctcccaagcctctcattatccctccaatattttcagccagaaaacgagaatctgagagtcttcagattcgcggattgaagaaagcgacaaagaaattcagacaagacagggtcgtagaatgcgaggattactctgttcgaaaattctacaagggctacatagatgaaaccacatttgcaccatcaagagctggaaccggaatcgctgtttctgtcatggaatgtgatagttcacgctctttacaagactggatggcagtagtgaggtctcttggacagttgtctcatcagaatttggtcaatttcttgggttactgttgtgaagacaacaaaccattcttcttggtatttgaatactcgcacaaaggaagtttggacagtcacattttcggaaaagaagaagaggcattgccatgggaaatacgggttaagatagccattggaacagctcaaggtctcgcgtttcttcactcgatcaagaacagccccctaaaccgagaactcaggatgcataacattatgcttgacgaggtgcaatacaatgcaaaaactgttctatctcgaaccaaccaaacgaagcttggtattttggatatgacgaccgatgtttacatttttggtatgatcttgcttgaacttttaatgggttccaaggatagaaaaaagattaaggaagagcaaggcttagtagattactggacctcatctttcttgccagataattataagattgaggaaataatcgatccccgacttgggagcgattattctgcgaatgcggcgacacagatgggcacactcatcaaccgatgcacagcgcataatacaaagaaacggccattgatgcaacaagtattggatggtcttaatcatattgcagagattaaggactaa

SEQ ID NO: 73683 - protein, 312 aa, Arabidopsis thaliana
  peptide (1)..(312): Ceres Seq. ID no. 4974639
  misc_feature: Pfam Name: Pkinase Pfam Description: Protein kinase domain
  misc_feature (1)..(312): Homolog of NCBI NO: 15239043 NR Description: putative protein; protein id: At5g11400.1 thaliana] >gi|8953402|emb|CAB96675.1| putative protein
  misc_feature (1)..(222): Homolog of NCBI NO: 15239047 NR Description: putative protein; protein id: At5g11410.1 thaliana] >gi|8953403|emb|CAB96676.1| putative protein
  misc_feature (210)..(312): Homolog of NCBI NO: 15239047 NR Description: putative protein; protein id: At5g11410.1 thaliana] >gi|8953403|emb|CAB96676.1| putative protein
  misc_feature (41)..(198): Homolog of NCBI NO: 25287650 NR Description: hypothetical protein F15M4.14 [imported] -
  misc_feature (41)..(198): Homolog of NCBI NO: 30699159 NR Description: protein kinase, putative [Arabidopsis thaliana]
  misc_feature (175)..(312): Homolog of NCBI NO: 25287650 NR Description: hypothetical protein F15M4.14 [imported] -
  misc_feature (175)..(312): Homolog of NCBI NO: 30699159 NR Description: protein kinase, putative [Arabidopsis thaliana]
  misc_feature (27)..(218): Homolog of NCBI NO: 25287611 NR Description: protein kinase-like protein [imported] -
  misc_feature (210)..(307): Homolog of NCBI NO: 25287611 NR Description: protein kinase-like protein [imported] -
  misc_feature (27)..(218): Homolog of NCBI NO: 30690422 NR Description: protein kinase family [Arabidopsis thaliana] putative protein kinase [Arabidopsis thaliana]
MGNCLKHFKQQLPSIAPKPLIIPPIFSARKRESESLQIRGLKKATKKFRQDRVVECEDYSVRKFYKGYIDETTFAPSRAGTGIAVSVMECDSSRSLQDWMAVVRSLGQLSHQNLVNFLGYCCEDNKPFFLVFEYSHKGSLDSHIFGKEEEALPWEIRVKIAIGTAQGLAFLHSIKNSPLNRELRMHNIMLDEVQYNAKTVLSRTNQTKLGILDMTTDVYIFGMILLELLMGSKDRKKIKEEQGLVDYWTSSFLPDNYKIEEIIDPRLGSDYSANAATQMGTLINRCTAHNTKKRPLMQQVLDGLNHIAEIKD

SEQ ID NO: 73684 - protein, 225 aa, Arabidopsis thaliana
  peptide (1)..(225): Ceres Seq. ID no. 4974640
  misc_feature: Pfam Name: Pkinase Pfam Description: Protein kinase domain
  misc_feature (1)..(225): Homolog of NCBI NO: 15239043 NR Description: putative protein; protein id: At5g11400.1 thaliana] >gi|8953402|emb|CAB96675.1| putative protein
  misc_feature (1)..(135): Homolog of NCBI NO: 15239047 NR Description: putative protein; protein id: At5g11410.1 thaliana] >gi|8953403|emb|CAB96676.1| putative protein
  misc_feature (123)..(225): Homolog of NCBI NO: 15239047 NR Description: putative protein; protein id: At5g11410.1 thaliana] >gi|8953403|emb|CAB96676.1| putative protein
  misc_feature (1)..(111): Homolog of NCBI NO: 25287650 NR Description: hypothetical protein F15M4.14 [imported] -
  misc_feature (1)..(111): Homolog of NCBI NO: 30699159 NR Description: protein kinase, putative [Arabidopsis thaliana]
  misc_feature (88)..(225): Homolog of NCBI NO: 25287650 NR Description: hypothetical protein F15M4.14 [imported] -
  misc_feature (88)..(225): Homolog of NCBI NO: 30699159 NR Description: protein kinase, putative [Arabidopsis thaliana]
  misc_feature (1)..(131): Homolog of NCBI NO: 25287611 NR Description: protein kinase-like protein [imported] -
  misc_feature (123)..(220): Homolog of NCBI NO: 25287611 NR Description: protein kinase-like protein [imported] -
  misc_feature (1)..(131): Homolog of NCBI NO: 30690422 NR Description: protein kinase family [Arabidopsis thaliana] putative protein kinase [Arabidopsis thaliana]
MECDSSRSLQDWMAVVRSLGQLSHQNLVNFLGYCCEDNKPFFLVFEYSHKGSLDSHIFGKEEEALPWEIRVKIAIGTAQGLAFLHSIKNSPLNRELRMHNIMLDEVQYNAKTVLSRTNQTKLGILDMTTDVYIFGMILLELLMGSKDRKKIKEEQGLVDYWTSSFLPDNYKIEEIIDPRLGSDYSANAATQMGTLINRCTAHNTKKRPLMQQVLDGLNHIAEIKD

SEQ ID NO: 73685 - protein, 213 aa, Arabidopsis thaliana
  peptide (1)..(213): Ceres Seq. ID no. 4974641
  misc_feature: Pfam Name: Pkinase Pfam Description: Protein kinase domain
  misc_feature (1)..(213): Homolog of NCBI NO: 15239043 NR Description: putative protein; protein id: At5g11400.1 thaliana] >gi|8953402|emb|CAB96675.1| putative protein
  misc_feature (1)..(123): Homolog of NCBI NO: 15239047 NR Description: putative protein; protein id: At5g11410.1 thaliana] >gi|8953403|emb|CAB96676.1| putative protein
  misc_feature (111)..(213): Homolog of NCBI NO: 15239047 NR Description: putative protein; protein id: At5g11410.1 thaliana] >gi|8953403|emb|CAB96676.1| putative protein
  misc_feature (1)..(99): Homolog of NCBI NO: 25287650 NR Description: hypothetical protein F15M4.14 [imported] -
  misc_feature (1)..(99): Homolog of NCBI NO: 30699159 NR Description: protein kinase, putative [Arabidopsis thaliana]
  misc_feature (76)..(213): Homolog of NCBI NO: 25287650 NR Description: hypothetical protein F15M4.14 [imported] -
  misc_feature (76)..(213): Homolog of NCBI NO: 30699159 NR Description: protein kinase, putative [Arabidopsis thaliana]
  misc_feature (1)..(119): Homolog of NCBI NO: 25287611 NR Description: protein kinase-like protein [imported] -
  misc_feature (111)..(208): Homolog of NCBI NO: 25287611 NR Description: protein kinase-like protein [imported] -
  misc_feature (1)..(119): Homolog of NCBI NO: 30690422 NR Description: protein kinase family [Arabidopsis thaliana] putative protein kinase [Arabidopsis thaliana]
MAVVRSLGQLSHQNLVNFLGYCCEDNKPFFLVFEYSHKGSLDSHIFGKEEEALPWEIRVKIAIGTAQGLAFLHSIKNSPLNRELRMHNIMLDEVQYNAKTVLSRTNQTKLGILDMTTDVYIFGMILLELLMGSKDRKKIKEEQGLVDYWTSSFLPDNYKIEEIIDPRLGSDYSANAATQMGTLINRCTAHNTKKRPLMQQVLDGLNHIAEIKD

SEQ ID NO: 73686 - DNA, 1281 bp, Arabidopsis thaliana
  misc_feature (1)..(1281): Ceres Seq. ID no. 4974703
  misc_feature: MA Experiment ID: 108434 Result: Down-regulated in Transcription
  misc_feature: MA Experiment 108434 PARAMETER Experiment Name: At_Root_Tips_cDNA_P Parameter: Tissue Value: Root Tips
  misc_feature: MA Experiment ID: 108435 Result: Down-regulated in Transcription
  misc_feature: MA Experiment 108435 PARAMETER Experiment Name: At_stm_Mutants_cDNA_P Parameter: Plant Line Value: wt Landsburg vs stm
  misc_feature: MA Experiment 108435 PARAMETER Experiment Name: At_stm_Mutants_cDNA_P Parameter: Tissue Value: Shoot Apical Meristem Region
  misc_feature: MA Experiment ID: 108461 Result: Up-regulated in Transcription
  misc_feature: MA Experiment 108461 PARAMETER Experiment Name: At_Germinating_Seeds_cDNA_P Parameter: Age (day) Value: 1 vs. 0
  misc_feature: MA Experiment 108461 PARAMETER Experiment Name: At_Germinating_Seeds_cDNA_P Parameter: Tissue Value: Germinating Seeds
  misc_feature: MA Experiment ID: 108462 Result: Up-regulated in Transcription
  misc_feature: MA Experiment 108462 PARAMETER Experiment Name: At_Germinating_Seeds_cDNA_P Parameter: Age (day) Value: 2 vs. 0
  misc_feature: MA Experiment 108462 PARAMETER Experiment Name: At_Germinating_Seeds_cDNA_P Parameter: Tissue Value: Germinating Seeds
  misc_feature: MA Experiment ID: 108463 Result: Up-regulated in Transcription
  misc_feature: MA Experiment 108463 PARAMETER Experiment Name: At_Germinating_Seeds_cDNA_P Parameter: Age (day) Value: 3 vs. 0
  misc_feature: MA Experiment 108463 PARAMETER Experiment Name: At_Germinating_Seeds_cDNA_P Parameter: Tissue Value: Germinating Seeds
  misc_feature: MA Experiment ID: 108488 Result: Up-regulated in Transcription
  misc_feature: MA Experiment ID: 108489 Result: Down-regulated in Transcription
  misc_feature: MA Experiment ID: 108573 Result: Up-regulated in Transcription
  misc_feature: MA Experiment 108573 PARAMETER Experiment Name: At_Drought_cDNA_P Parameter: Timepoint (hr) Value: 6
  misc_feature: MA Experiment 108573 PARAMETER Experiment Name: At_Drought_cDNA_P Parameter: Tissue Value: Aerial
  misc_feature: MA Experiment 108573 PARAMETER Experiment Name: At_Drought_cDNA_P Parameter: Treatment Value: Drought vs. No Drought
  misc_feature: MA Experiment ID: 108594 Result: Down-regulated in Transcription
  misc_feature: MA Experiment 108594 PARAMETER Experiment Name: At_Ler-rhl_Root_cDNA_P Parameter: Plant Line Value: null
  misc_feature: MA Experiment ID: 108595 Result: Down-regulated in Transcription
  misc_feature: MA Experiment 108595 PARAMETER Experiment Name: At_Ler-pi_Ovule_cDNA_P Parameter: Plant Line Value: null
  misc_feature: MA Experiment ID: 20000113 Result: Down-regulated in Transcription
  misc_feature: MA Experiment 20000113 PARAMETER Experiment Name: At_42deg_Heat_cDNA_P Parameter: Temperature (deg C) Value: 42 vs. 22
  misc_feature: MA Experiment 20000113 PARAMETER Experiment Name: At_42deg_Heat_cDNA_P Parameter: Timepoint (hr) Value: 8
  misc_feature: MA Experiment 20000113 PARAMETER Experiment Name: At_42deg_Heat_cDNA_P Parameter: Tissue Value: Aerial
atggagtcacgcgtgctgttacgcgccaccgcgaatgtcgttggaattccgaaattgagacgaccaatcggagcgatccaccgtcaattcagcactgcatcgtcttcctcgttctcggttaaaccaatcggaggaatcggagagggagcgaatctgatctccggtcgtcagcttcgtccaattcttcttctcgattcgtcggcgatcaacggaggagagaaaagagaaattctcaaaccggttaaagccgccgctgctgaaggtggagataccgctggggatgctaaagttggattcctcgccaagtatccatggctagtcactggattcttcttcttcatgtggtacttcttgaatgtgattttcaacatccttaacaagaagatctataattacttcccttatccctattttgtatcggtgatacacttgttcgtgggagttgtttactgcttgatcagctggtccgtgggtcttcctaaacgtgccccgattgactcgaacctcctcaaggtattgataccagtcgcagtctgtcacgccttaggccatgtcactagcaatgtctctttcgctgcggttgctgtctccttcactcacaccatcaaagcacttgagccattcttcaatgcggctgcttctcaattcattatgggacaatccatccccataacactatggttgtctctagctcctgttgttcttggtgttgcaatggcttcactaactgagctatcattcaactggctcggtttcatcagtgctatgatatcaaacatttctttcacttaccgaagcatcttctccaagaaagccatgactgatatggacagtacaaatgtctacgcttacatctccatcatcgcactcttcgtctgcattcctcctgccatcatcgttgaaggtcctaaactacttaaccatggtttcgccgacgcgattgctaaagttggaatgactaaattcatctctgatctcttctgggttggaatgttttaccatctctacaatcagctggctaccaataccttggagagggttgcaccgctgactcacgcggttggaaacgttctgaaacgtgtgttcgtgatcggtttctccatcgttatcttcggaaacaagatatcgacacagacaggtataggaacaggaatagccattgctggagttgcaatgtactctatcattaaggccaagatcgaagaagagaaacgggtcagttcattattcgcattagctcaattttcattacatagcttaagaaattttgcttactattaa

SEQ ID NO: 73687 - protein, 426 aa, Arabidopsis thaliana
  peptide (1)..(426): Ceres Seq. ID no. 4974704
  misc_feature (1)..(426): Homolog of NCBI NO: 9757731 NR Description: phosphate/triose-phosphate translocator precursor
  misc_feature (1)..(405): Homolog of NCBI NO: 30694881 NR Description: phosphate/triose-phosphate translocator, putative
  misc_feature (1)..(405): Homolog of NCBI NO: 21593093 NR Description: phosphate/triose-phosphate translocator precursor
  misc_feature (1)..(405): Homolog of NCBI NO: 1706107 NR Description: TRIOSE PHOSPHATE/PHOSPHATE TRANSLOCATOR,
  misc_feature (1)..(405): Homolog of NCBI NO: 9295273 NR Description: triose phosphate/phosphate translocator precursor
  misc_feature (1)..(405): Homolog of NCBI NO: 629694 NR Description: phosphate translocator, chloroplast - common >gi|403023|emb|CAA52979.1| phosphate translocator [Nicotiana
  misc_feature (1)..(405): Homolog of NCBI NO: 117291 NR Description: TRIOSE PHOSPHATE/PHOSPHATE TRANSLOCATOR,
  misc_feature (1)..(405): Homolog of NCBI NO: 1352198 NR Description: TRIOSE PHOSPHATE/PHOSPHATE TRANSLOCATOR,
  misc_feature (1)..(405): Homolog of NCBI NO: 117290 NR Description: TRIOSE PHOSPHATE/PHOSPHATE TRANSLOCATOR,
  misc_feature (1)..(405): Homolog of NCBI NO: 1352199 NR Description: Triose phosphate/phosphate translocator,
MESRVLLRATANVVGIPKLRRPIGAIHRQFSTASSSSFSVKPIGGIGEGANLISGRQLRPILLLDSSAINGGEKREILKPVKAAAAEGGDTAGDAKVGFLAKYPWLVTGFFFFMWYFLNVIFNILNKKIYNYFPYPYFVSVIHLFVGVVYCLISWSVGLPKRAPIDSNLLKVLIPVAVCHALGHVTSNVSFAAVAVSFTHTIKALEPFFNAAASQFIMGQSIPITLWLSLAPVVLGVAMASLTELSFNWLGFISAMISNISFTYRSIFSKKAMTDMDSTNVYAYISIIALFVCIPPAIIVEGPKLLNHGFADAIAKVGMTKFISDLFWVGMFYHLYNQLATNTLERVAPLTHAVGNVLKRVFVIGFSIVIFGNKISTQTGIGTGIAIAGVAMYSIIKAKIEEEKRVSSLFALAQFSLHSLRNFAYY

SEQ ID NO: 73688 - protein, 313 aa, Arabidopsis thaliana
  peptide (1)..(313): Ceres Seq. ID no. 4974705
  misc_feature (1)..(313): Homolog of NCBI NO: 9757731 NR Description: phosphate/triose-phosphate translocator precursor
  misc_feature (1)..(292): Homolog of NCBI NO: 30694881 NR Description: phosphate/triose-phosphate translocator, putative
  misc_feature (1)..(292): Homolog of NCBI NO: 21593093 NR Description: phosphate/triose-phosphate translocator precursor
  misc_feature (1)..(292): Homolog of NCBI NO: 1706107 NR Description: TRIOSE PHOSPHATE/PHOSPHATE TRANSLOCATOR,
  misc_feature (1)..(292): Homolog of NCBI NO: 9295273 NR Description: triose phosphate/phosphate translocator precursor
  misc_feature (1)..(292): Homolog of NCBI NO: 629694 NR Description: phosphate translocator, chloroplast - common >gi|403023|emb|CAA52979.1| phosphate translocator [Nicotiana
  misc_feature (1)..(292): Homolog of NCBI NO: 117291 NR Description: TRIOSE PHOSPHATE/PHOSPHATE TRANSLOCATOR,
  misc_feature (1)..(292): Homolog of NCBI NO: 1352198 NR Description: TRIOSE PHOSPHATE/PHOSPHATE TRANSLOCATOR,
  misc_feature (1)..(292): Homolog of NCBI NO: 117290 NR Description: TRIOSE PHOSPHATE/PHOSPHATE TRANSLOCATOR,
  misc_feature (1)..(292): Homolog of NCBI NO: 1352199 NR Description: Triose phosphate/phosphate translocator,
MWYFLNVIFNILNKKIYNYFPYPYFVSVIHLFVGVVYCLISWSVGLPKRAPIDSNLLKVLIPVAVCHALGHVTSNVSFAAVAVSFTHTIKALEPFFNAAASQFIMGQSIPITLWLSLAPVVLGVAMASLTELSFNWLGFISAMISNISFTYRSIFSKKAMTDMDSTNVYAYISIIALFVCIPPAIIVEGPKLLNHGFADAIAKVGMTKFISDLFWVGMFYHLYNQLATNTLERVAPLTHAVGNVLKRVFVIGFSIVIFGNKISTQTGIGTGIAIAGVAMYSIIKAKIEEEKRVSSLFALAQFSLHSLRNFAYY

SEQ ID NO: 73689 - DNA, 4167 bp, Arabidopsis thaliana
  misc_feature (1)..(4167): Ceres Seq. ID no. 4974769
  misc_feature: MA Experiment ID: 20000171 Result: Up-regulated in Transcription
  misc_feature: MA Experiment 20000171 PARAMETER Experiment Name: At_42deg_Heat_P Parameter: Age (day) Value: 14
  misc_feature: MA Experiment 20000171 PARAMETER Experiment Name: At_42deg_Heat_P Parameter: Organism Value: A. thaliana
  misc_feature: MA Experiment 20000171 PARAMETER Experiment Name: At_42deg_Heat_P Parameter: Plant Line Value: WS
  misc_feature: MA Experiment 20000171 PARAMETER Experiment Name: At_42deg_Heat_P Parameter: Temperature (deg C) Value: 42 vs. 22
  misc_feature: MA Experiment 20000171 PARAMETER Experiment Name: At_42deg_Heat_P Parameter: Timepoint (hr) Value: 1
  misc_feature: MA Experiment 20000171 PARAMETER Experiment Name: At_42deg_Heat_P Parameter: Tissue Value: Aerial
atgtccaccgttaatcatcactgcctcctcaattttcctcatatcccaccttcaattcctccgaatcatcgtcccaaacttctttcttctctctccctctatcgaaaaccagaacgcctctttgctctctctgcgtctctgtctctttcaccagcaacaatccatgaatgttcttcttcctcatcttcttcttcttcatcgttcgataaagaagaaacggaagacattgaatctgttattgatgggtttttctatctgcttcgattgtctgctcaataccacgacgtcgaggtaacaaaagctgtgcacgcttcgtttcttaagctcagagaagaaaaaacccgtcttggaaatgcccttatctctacttatctcaaacttggtttccctcgtgaagctattctcgtcttcgtgtctctgtcttcgccaacggtggtttcttacacagctcttatctcgggtttctcaaggttaaaccttgaaattgaggctcttaaggttttcttcaggatgagaaaagcaggtcttgttcagccgaatgagtatacttttgtagcgattttgactgcttgcgtgagagtttcccgattctcgcttgggattcagattcatggattgatagttaaatcagggtttttgaattctgtgtttgttagtaattcgctgatgagtttgtatgataaggattctgggtcttcgtgtgatgatgtgcttaagttgttcgatgaaattcctcagagagatgtggcgtcttggaacactgtggtttcgagtttagtgaaagagggcaagtctcataaagctttcgatttgttttatgagatgaatagagtcgaaggatttggagttgatagttttacgctttcaacgcttttgagctcttgtactgattctagtgtcttattgagaggtagagaactccatggtcgtgcaattaggatagggttgatgcaggagttgagtgtgaacaacgctctgattgggttttattctaaattttgggatatgaaaaaggtagagagtttatacgagatgatgatggcgcaagatgctgttactttcacggagatgatcacagcttacatgtcatttggaatggtggattccgctgttgagatattcgcgaatgtaactgaaaaaaacactattacgtataatgcgctcatggctgggttctgtagaaatggccatggcttgaaggcactaaaattattcactgatatgctgcagagaggtgttgagttgacggattttagtttaacaagcgctgttgatgcttgtggtttagtttcagagaagaaagtaagcgaacagattcacgggttttgtattaagtttggaactgctttcaacccttgtatccagactgcattgcttgatatgtgcacaaggtgtgaaaggatggcagatgctgaggagatgtttgaccaatggccttctaatctcgatagctcgaaagcaacgacgtctataatcggtggttacgctcggaatggcttacctgataaggctgtatcgctattccatcgcactctctgtgaacagaagttgtttttagatgaagtttcgttgactttgattcttgcggtctgcgggacattaggttttcgggaaatgggttatcagatccattgctatgctcttaaagctgggtacttttctgatataagcttgggaaattctttgattagcatgtacgcgaaatgttgtgactcagatgatgccataaagattttcaacactatgcgagaacatgatgttatttcttggaacagcttgatttcttgctacatccttcaaagaaatggtgatgaggcactggctctatggtcgaggatgaatgagaaagagatcaagcctgacataatcaccctcactcttgttatttctgcatttcggtatacagagtcaaataagcttagtagctgccgtgatctgtttctctccatgaagactatctatgacattgaaccaacgactgaacattacactgcattcgtccgtgttcttggtcattggggtcttcttgaagaagcggaagacacaataaactcaatgccggttcagcccgaggtctctgttttgagagctctgcttgatagctgcagaatacattcaaacacaagcgttgcgaaacgagtagcaaagcttatactatctacaaagccagaaaccccgtctgagtacatcctcaaatccaacatctactcagcttccggattctggcatcgctctgaaatgataagagaggaaatgcgggaaagaggttaccggaaacatcctgctaaaagctggataatccatgagaacaaaatacattcctttcacgcgcgtgacacatcccacccgcaagagaaagacatatacaggggattggagatactgataatggaatgtctgaaagttggatacgaaccaaacacagagtatgttcttcaggaggttgatgagtttatgaagaagagtttcttgtttcaccacagcgcgaaactcgcagtgacttatggaattctctcgagcaatactcggggcaagccggttcgggttatgaagaacgtaatgctctgtggtgattgccacgagttcttcaagtatatttcagttgtgatcatgggagatgaagatgttgatgggaagtgtaaaaacatgtctgcatgttcctcaacgacgtcgtattcaactaaactctttctattcatggttcctcttgttgtcatttctggtttcgtctttgtaaatattggtcctaaagattcaacttctttattaacctctctgtccactactacttctcatcttcctcctccgtttctgtctacggctccggcaccggcgccatctcctctgctaccggagatacttccctcgttgccagcatcatctttatcgactaaagtggaatctattcagggtgattataatcgcacaattcaactgaatatgatcaacgttactgcaacgagtaataacgtctcttctacggcatcattggaaccaaagaaaagaagagttcttagcaatttagagaagatagaattcaagctacaaaaagctcgagcctccattaaagccgcttcgatggatgatcccgtggacgacccggactatgttcctcttggtcctatgtattggaacgctaaggtctttcatcggagttacttggagatggagaaacaattcaagatatatgtatacaaagaaggcgagccaccgttgttccatgacggtccatgcaaaagcatctactctatggaaggaagtttcatctatgagatagaaaccgatacacgttttcggaccaataatcccgacaaggctcatgttttttatctaccatttagtgtcgtcaagatggtaagatacgtgtatgaacgaaattcccgcgatttcagccccatccgaaatacagtcaaggattacatcaatcttgtgggtgataaatacccatattggaaccgcagcatcggagccgatcatttcatactttcttgtcacgattggggtcctgaggcaagcttctctcatccacatctaggacataattcgattagagctttgtgcaatgccaacacgtcagagagattcaaaccaagaaaagatgtgtcgataccggagatcaatctaaggacgggatccttaactggattggtcggtggaccgtcaccttccagccgtcccatcctcgccttctttgcagggggtgtacacggaccggtaaggccagtcttgctccagcattgggagaacaaagataatgacattagagtccacaagtatctccctagaggaacgtcttattctgacatgatgcggaacagcaagttctgcatttgtcctagcggttatgaggttgcgagcccgaggatcgtggaggcactctactcgggttgcgtcccggttttgataaactcaggatatgttcctccgttcagcgatgtactgaactggagatcgttctcggtgatcgtttcagtggaagacataccgaatttgaaaacgatattgacatctatatcgccgagacagtacttaaggatgtacagaagagtgttgaaggtaaggagacattttgaggtgaattctccggctaagaggtttgatgtgtttcatatgattcttcattcgatttgggtgaggagattgaatgtgaagattcgtgaagtctaa

SEQ ID NO: 73690 - protein, 1388 aa, Arabidopsis thaliana
  peptide (1)..(1388): Ceres Seq. ID no. 4974770
  misc_feature (1062)..(1350): Pfam Name: Exostosin family Pfam Description: Exostosin family
  misc_feature (981)..(1388): Homolog of NCBI NO: 9758008 NR Description: contains similarity to limonene
  misc_feature (115)..(867): Homolog of NCBI NO: 34394447 NR Description: selenium-binding protein-like [Oryza sativa
  misc_feature (998)..(1385): Homolog of NCBI NO: 34394611 NR Description: putative pectin-glucuronyltransferase [Oryza
  misc_feature (1010)..(1385): Homolog of NCBI NO: 15231488 NR Description: Exostosin family; protein id: At3g07620.1 thaliana] >gi|6466945|gb|AAF13080.1|AC009176_7 hypothetical
  misc_feature (357)..(867): Homolog of NCBI NO: 15234006 NR Description: putative protein; protein id: At4g18750.1
  misc_feature (114)..(380): Homolog of NCBI NO: 15234006 NR Description: putative protein; protein id: At4g18750.1
  misc_feature (1056)..(1385): Homolog of NCBI NO: 15239388 NR Description: Exostosin family; protein id: At5g25310.1
  misc_feature (1056)..(1385): Homolog of NCBI NO: 15238967 NR Description: Exostosin family; protein id: At5g11130.1 thaliana] >gi|8953375|emb|CAB96648.1| putative protein
  misc_feature (1033)..(1385): Homolog of NCBI NO: 38345576 NR Description: OSJNBa0027H06.12 [Oryza sativa (japonica
  misc_feature (96)..(876): Homolog of NCBI NO: 15237421 NR Description: putative protein; protein id: At5g16860.1
MSTVNHHCLLNFPHIPPSIPPNHRPKLLSSLSLYRKPERLFALSASLSLSPATIHECSSSSSSSSSSFDKEETEDIESVIDGFFYLLRLSAQYHDVEVTKAVHASFLKLREEKTRLGNALISTYLKLGFPREAILVFVSLSSPTVVSYTALISGFSRLNLEIEALKVFFRMRKAGLVQPNEYTFVAILTACVRVSRFSLGIQIHGLIVKSGFLNSVFVSNSLMSLYDKDSGSSCDDVLKLFDEIPQRDVASWNTVVSSLVKEGKSHKAFDLFYEMNRVEGFGVDSFTLSTLLSSCTDSSVLLRGRELHGRAIRIGLMQELSVNNALIGFYSKFWDMKKVESLYEMMMAQDAVTFTEMITAYMSFGMVDSAVEIFANVTEKNTITYNALMAGFCRNGHGLKALKLFTDMLQRGVELTDFSLTSAVDACGLVSEKKVSEQIHGFCIKFGTAFNPCIQTALLDMCTRCERMADAEEMFDQWPSNLDSSKATTSIIGGYARNGLPDKAVSLFHRTLCEQKLFLDEVSLTLILAVCGTLGFREMGYQIHCYALKAGYFSDISLGNSLISMYAKCCDSDDAIKIFNTMREHDVISWNSLISCYILQRNGDEALALWSRMNEKEIKPDIITLTLVISAFRYTESNKLSSCRDLFLSMKTIYDIEPTTEHYTAFVRVLGHWGLLEEAEDTINSMPVQPEVSVLRALLDSCRIHSNTSVAKRVAKLILSTKPETPSEYILKSNIYSASGFWHRSEMIREEMRERGYRKHPAKSWIIHENKIHSFHARDTSHPQEKDIYRGLEILIMECLKVGYEPNTEYVLQEVDEFMKKSFLFHHSAKLAVTYGILSSNTRGKPVRVMKNVMLCGDCHEFFKYISVVIMGDEDVDGKCKNMSACSSTTSYSTKLFLFMVPLVVISGFVFVNIGPKDSTSLLTSLSTTTSHLPPPFLSTAPAPAPSPLLPEILPSLPASSLSTKVESIQGDYNRTIQLNMINVTATSNNVSSTASLEPKKRRVLSNLEKIEFKLQKARASIKAASMDDPVDDPDYVPLGPMYWNAKVFHRSYLEMEKQFKIYVYKEGEPPLFHDGPCKSIYSMEGSFIYEIETDTRFRTNNPDKAHVFYLPFSVVKMVRYVYERNSRDFSPIRNTVKDYINLVGDKYPYWNRSIGADHFILSCHDWGPEASFSHPHLGHNSIRALCNANTSERFKPRKDVSIPEINLRTGSLTGLVGGPSPSSRPILAFFAGGVHGPVRPVLLQHWENKDNDIRVHKYLPRGTSYSDMMRNSKFCICPSGYEVASPRIVEALYSGCVPVLINSGYVPPFSDVLNWRSFSVIVSVEDIPNLKTILTSISPRQYLRMYRRVLKVRRHFEVNSPAKRFDVFHMILHSIWVRRLNVKIREV

SEQ ID NO: 73691 - protein, 1218 aa, Arabidopsis thaliana
  peptide (1)..(1218): Ceres Seq. ID no. 4974771
  misc_feature (892)..(1180): Pfam Name: Exostosin family Pfam Description: Exostosin family
  misc_feature (811)..(1218): Homolog of NCBI NO: 9758008 NR Description: contains similarity to limonene
  misc_feature (1)..(697): Homolog of NCBI NO: 34394447 NR Description: selenium-binding protein-like [Oryza sativa
  misc_feature (828)..(1215): Homolog of NCBI NO: 34394611 NR Description: putative pectin-glucuronyltransferase [Oryza
  misc_feature (840)..(1215): Homolog of NCBI NO: 15231488 NR Description: Exostosin family; protein id: At3g07620.1 thaliana] >gi|6466945|gb|AAF13080.1|AC009176_7 hypothetical
  misc_feature (187)..(697): Homolog of NCBI NO: 15234006 NR Description: putative protein; protein id: At4g18750.1
  misc_feature (1)..(210): Homolog of NCBI NO: 15234006 NR Description: putative protein; protein id: At4g18750.1
  misc_feature (886)..(1215): Homolog of NCBI NO: 15239388 NR Description: Exostosin family; protein id: At5g25310.1
  misc_feature (886)..(1215): Homolog of NCBI NO: 15238967 NR Description: Exostosin family; protein id: At5g11130.1 thaliana] >gi|8953375|emb|CAB96648.1| putative protein
  misc_feature (863)..(1215): Homolog of NCBI NO: 38345576 NR Description: OSJNBa0027H06.12 [Oryza sativa (japonica
  misc_feature (1)..(706): Homolog of NCBI NO: 15237421 NR Description: putative protein; protein id: At5g16860.1
MRKAGLVQPNEYTFVAILTACVRVSRFSLGIQIHGLIVKSGFLNSVFVSNSLMSLYDKDSGSSCDDVLKLFDEIPQRDVASWNTVVSSLVKEGKSHKAFDLFYEMNRVEGFGVDSFTLSTLLSSCTDSSVLLRGRELHGRAIRIGLMQELSVNNALIGFYSKFWDMKKVESLYEMMMAQDAVTFTEMITAYMSFGMVDSAVEIFANVTEKNTITYNALMAGFCRNGHGLKALKLFTDMLQRGVELTDFSLTSAVDACGLVSEKKVSEQIHGFCIKFGTAFNPCIQTALLDMCTRCERMADAEEMFDQWPSNLDSSKATTSIIGGYARNGLPDKAVSLFHRTLCEQKLFLDEVSLTLILAVCGTLGFREMGYQIHCYALKAGYFSDISLGNSLISMYAKCCDSDDAIKIFNTMREHDVISWNSLISCYILQRNGDEALALWSRMNEKEIKPDIITLTLVISAFRYTESNKLSSCRDLFLSMKTIYDIEPTTEHYTAFVRVLGHWGLLEEAEDTINSMPVQPEVSVLRALLDSCRIHSNTSVAKRVAKLILSTKPETPSEYILKSNIYSASGFWHRSEMIREEMRERGYRKHPAKSWIIHENKIHSFHARDTSHPQEKDIYRGLEILIMECLKVGYEPNTEYVLQEVDEFMKKSFLFHHSAKLAVTYGILSSNTRGKPVRVMKNVMLCGDCHEFFKYISVVIMGDEDVDGKCKNMSACSSTTSYSTKLFLFMVPLVVISGFVFVNIGPKDSTSLLTSLSTTTSHLPPPFLSTAPAPAPSPLLPEILPSLPASSLSTKVESIQGDYNRTIQLNMINVTATSNNVSSTASLEPKKRRVLSNLEKIEFKLQKARASIKAASMDDPVDDPDYVPLGPMYWNAKVFHRSYLEMEKQFKIYVYKEGEPPLFHDGPCKSIYSMEGSFIYEIETDTRFRTNNPDKAHVFYLPFSVVKMVRYVYERNSRDFSPIRNTVKDYINLVGDKYPYWNRSIGADHFILSCHDWGPEASFSHPHLGHNSIRALCNANTSERFKPRKDVSIPEINLRTGSLTGLVGGPSPSSRPILAFFAGGVHGPVRPVLLQHWENKDNDIRVHKYLPRGTSYSDMMRNSKFCICPSGYEVASPRIVEALYSGCVPVLINSGYVPPFSDVLNWRSFSVIVSVEDIPNLKTILTSISPRQYLRMYRRVLKVRRHFEVNSPAKRFDVFHMILHSIWVRRLNVKIREV

SEQ ID NO: 73692 - protein, 1166 aa, Arabidopsis thaliana
  peptide (1)..(1166): Ceres Seq. ID no. 4974772
  misc_feature (840)..(1128): Pfam Name: Exostosin family Pfam Description: Exostosin family
  misc_feature (759)..(1166): Homolog of NCBI NO: 9758008 NR Description: contains similarity to limonene
  misc_feature (1)..(645): Homolog of NCBI NO: 34394447 NR Description: selenium-binding protein-like [Oryza sativa
  misc_feature (776)..(1163): Homolog of NCBI NO: 34394611 NR Description: putative pectin-glucuronyltransferase [Oryza
  misc_feature (788)..(1163): Homolog of NCBI NO: 15231488 NR Description: Exostosin family; protein id: At3g07620.1 thaliana] >gi|6466945|gb|AAF13080.1|AC009176_7 hypothetical
  misc_feature (135)..(645): Homolog of NCBI NO: 15234006 NR Description: putative protein; protein id: At4g18750.1
  misc_feature (1)..(158): Homolog of NCBI NO: 15234006 NR Description: putative protein; protein id: At4g18750.1
  misc_feature (834)..(1163): Homolog of NCBI NO: 15239388 NR Description: Exostosin family; protein id: At5g25310.1
  misc_feature (834)..(1163): Homolog of NCBI NO: 15238967 NR Description: Exostosin family; protein id: At5g11130.1 thaliana] >gi|8953375|emb|CAB96648.1| putative protein
  misc_feature (811)..(1163): Homolog of NCBI NO: 38345576 NR Description: OSJNBa0027H06.12 [Oryza sativa (japonica
  misc_feature (1)..(654): Homolog of NCBI NO: 15237421 NR Description: putative protein; protein id: At5g16860.1
MSLYDKDSGSSCDDVLKLFDEIPQRDVASWNTVVSSLVKEGKSHKAFDLFYEMNRVEGFGVDSFTLSTLLSSCTDSSVLLRGRELHGRAIRIGLMQELSVNNALIGFYSKFWDMKKVESLYEMMMAQDAVTFTEMITAYMSFGMVDSAVEIFANVTEKNTITYNALMAGFCRNGHGLKALKLFTDMLQRGVELTDFSLTSAVDACGLVSEKKVSEQIHGFCIKFGTAFNPCIQTALLDMCTRCERMADAEEMFDQWPSNLDSSKATTSIIGGYARNGLPDKAVSLFHRTLCEQKLFLDEVSLTLILAVCGTLGFREMGYQIHCYALKAGYFSDISLGNSLISMYAKCCDSDDAIKIFNTMREHDVISWNSLISCYILQRNGDEALALWSRMNEKEIKPDIITLTLVISAFRYTESNKLSSCRDLFLSMKTIYDIEPTTEHYTAFVRVLGHWGLLEEAEDTINSMPVQPEVSVLRALLDSCRIHSNTSVAKRVAKLILSTKPETPSEYILKSNIYSASGFWHRSEMIREEMRERGYRKHPAKSWIIHENKIHSFHARDTSHPQEKDIYRGLEILIMECLKVGYEPNTEYVLQEVDEFMKKSFLFHHSAKLAVTYGILSSNTRGKPVRVMKNVMLCGDCHEFFKYISVVIMGDEDVDGKCKNMSACSSTTSYSTKLFLFMVPLVVISGFVFVNIGPKDSTSLLTSLSTTTSHLPPPFLSTAPAPAPSPLLPEILPSLPASSLSTKVESIQGDYNRTIQLNMINVTATSNNVSSTASLEPKKRRVLSNLEKIEFKLQKARASIKAASMDDPVDDPDYVPLGPMYWNAKVFHRSYLEMEKQFKIYVYKEGEPPLFHDGPCKSIYSMEGSFIYEIETDTRFRTNNPDKAHVFYLPFSVVKMVRYVYERNSRDFSPIRNTVKDYINLVGDKYPYWNRSIGADHFILSCHDWGPEASFSHPHLGHNSIRALCNANTSERFKPRKDVSIPEINLRTGSLTGLVGGPSPSSRPILAFFAGGVHGPVRPVLLQHWENKDNDIRVHKYLPRGTSYSDMMRNSKFCICPSGYEVASPRIVEALYSGCVPVLINSGYVPPFSDVLNWRSFSVIVSVEDIPNLKTILTSISPRQYLRMYRRVLKVRRHFEVNSPAKRFDVFHMILHSIWVRRLNVKIREV

SEQ ID NO: 73693 - DNA, 711 bp, Arabidopsis thaliana
  misc_feature (1)..(711): Ceres Seq. ID no. 4974845
  misc_feature: MA Experiment ID: 20000307 Result: Down-regulated in Transcription
  misc_feature: MA Experiment 20000307 PARAMETER Experiment Name: At_Germinating_Seeds_Sub_P Parameter: Age (hr) Value: 24 vs. 0
  misc_feature: MA Experiment 20000307 PARAMETER Experiment Name: At_Germinating_Seeds_Sub_P Parameter: Organism Value: A. thaliana
  misc_feature: MA Experiment 20000307 PARAMETER Experiment Name: At_Germinating_Seeds_Sub_P Parameter: Plant Line Value: WS
  misc_feature: MA Experiment 20000307 PARAMETER Experiment Name: At_Germinating_Seeds_Sub_P Parameter: Tissue Value: Germinating Seeds
  misc_feature: MA Experiment ID: 20000355 Result: Down-regulated in Transcription
  misc_feature: MA Experiment 20000355 PARAMETER Experiment Name: At_Siliques_Sub_P Parameter: Age (day) Value: 21
  misc_feature: MA Experiment 20000355 PARAMETER Experiment Name: At_Siliques_Sub_P Parameter: Organism Value: A. thaliana
  misc_feature: MA Experiment 20000355 PARAMETER Experiment Name: At_Siliques_Sub_P Parameter: Plant Line Value: WS
  misc_feature: MA Experiment 20000355 PARAMETER Experiment Name: At_Siliques_Sub_P Parameter: Tissue Value: Less Than 5mm Siliques vs. Whole Plant
  misc_feature: Pfam Name: CBFD_NFYB_HMF Pfam Description: Histone-like transcription factor (CBF/NF-Y) and archaeal histone
atggcagtccctcttcttgtttctaaagctttggagctgtttttacaagacttgtgtaatcacacgtatgatgtaactctaagccgaggtgctaaaactgtcaacgcctttcatttgaagcagtgtgtgcaagcgactaatgtctttgattttctaagagacactgtcgctaaagttcctgatttgggtggctcagacactgaagaccaatcagctaccaaaagaaggaaagttgttgatggaagtagttgcaacgatgaagatatgataaagaccactcaaatgcatgaggtcaaacatactagctgtggcagaggaaggcgaggtagaggccgcggacgaagtagtggaagaacaggaagtgggctgtctctaaaatttgaagaagatttagaagacggttctcccgaaagcagcaggaccccgtctcccgaaaacgggagcctttctcacgacgatacatcttggaagaaagttgcatcacacaacaatcatcatagtagtaactcagaggtaaaagtaaggaacttcgatcttaatgttgaattagatgagaatggagacaatgctacatggctggaaacacagctagagagaagtccagattacccgttggagattaacgaaatgaaaatagatcctgatgatcaacaacaggctagtgctagtgacgaggaagattatgatgaagaaagcatagaccaagagtga

SEQ ID NO: 73694 - protein, 236 aa, Arabidopsis thaliana
  peptide (1)..(236): Ceres Seq. ID no. 4974846
  misc_feature: Pfam Name: CBFD_NFYB_HMF Pfam Description: Histone-like transcription factor (CBF/NF-Y) and archaeal histone
  misc_feature (1)..(236): Homolog of NCBI NO: 15239766 NR Description: putative protein; protein id: At5g19490.1
  misc_feature (1)..(197): Homolog of NCBI NO: 12321975 NR Description: unknown protein; 69004-67516 [Arabidopsis
  misc_feature (1)..(197): Homolog of NCBI NO: 30682195 NR Description: transcription factor Hap5a, putative [Arabidopsis >gi|15795167|dbj|BAB03155.1| gene_id:MQC3.30~unknown protein thaliana] >gi|18087597|gb|AAL58929.1|AF462841_1 At3g12480/MQC3.32
  misc_feature (1)..(231): Homolog of NCBI NO: 18481624 NR Description: repressor protein [Oryza sativa]
  misc_feature (1)..(148): Homolog of NCBI NO: 18481626 NR Description: repressor protein [Zea mays]
  misc_feature (2)..(151): Homolog of NCBI NO: 21313424 NR Description: RIKEN cDNA 2310074H19 [Mus musculus]
  misc_feature (2)..(71): Homolog of NCBI NO: 28279647 NR Description: Similar to Dr1 associated protein 1 (negative
  misc_feature (2)..(151): Homolog of NCBI NO: 1244714 NR Description: Dr1-associated corepressor
  misc_feature (2)..(151): Homolog of NCBI NO: 18426973 NR Description: DR1-associated protein 1; negative cofactor 2 DR1- associated corepressor [Homo sapiens]
  misc_feature (2)..(69): Homolog of NCBI NO: 27661225 NR Description: similar to RIKEN cDNA 2310074H19 [Mus musculus]
MAVPLLVSKALELFLQDLCNHTYDVTLSRGAKTVNAFHLKQCVQATNVFDFLRDTVAKVPDLGGSDTEDQSATKRRKVVDGSSCNDEDMIKTTQMHEVKHTSCGRGRRGRGRGRSSGRTGSGLSLKFEEDLEDGSPESSRTPSPENGSLSHDDTSWKKVASHNNHHSSNSEVKVRNFDLNVELDENGDNATWLETQLERSPDYPLEINEMKIDPDDQQQASASDEEDYDEESIDQE

SEQ ID NO: 73695 - protein, 148 aa, Arabidopsis thaliana
  peptide (1)..(148): Ceres Seq. ID no. 4974847
  misc_feature: Pfam Name: CBFD_NFYB_HMF Pfam Description: Histone-like transcription factor (CBF/NF-Y) and archaeal histone
  misc_feature (1)..(148): Homolog of NCBI NO: 15239766 NR Description: putative protein; protein id: At5g19490.1
  misc_feature (1)..(109): Homolog of NCBI NO: 12321975 NR Description: unknown protein; 69004-67516 [Arabidopsis
  misc_feature (1)..(109): Homolog of NCBI NO: 30682195 NR Description: transcription factor Hap5a, putative [Arabidopsis >gi|15795167|dbj|BAB03155.1| gene_id:MQC3.30~unknown protein thaliana] >gi|18087597|gb|AAL58929.1|AF462841_1 At3g12480/MQC3.32
  misc_feature (1)..(143): Homolog of NCBI NO: 18481624 NR Description: repressor protein [Oryza sativa]
  misc_feature (1)..(60): Homolog of NCBI NO: 18481626 NR Description: repressor protein [Zea mays]
  misc_feature (1)..(63): Homolog of NCBI NO: 21313424 NR Description: RIKEN cDNA 2310074H19 [Mus musculus]
  misc_feature (1)..(63): Homolog of NCBI NO: 1244714 NR Description: Dr1-associated corepressor
  misc_feature (1)..(63): Homolog of NCBI NO: 18426973 NR Description: DR1-associated protein 1; negative cofactor 2 DR1- associated corepressor [Homo sapiens]
  misc_feature (1)..(92): Homolog of NCBI NO: 10242351 NR Description: NC2alpha [Drosophila melanogaster]
  misc_feature (1)..(53): Homolog of NCBI NO: 24657222 NR Description: CG10318-PB [Drosophila melanogaster]
MIKTTQMHEVKHTSCGRGRRGRGRGRSSGRTGSGLSLKFEEDLEDGSPESSRTPSPENGSLSHDDTSWKKVASHNNHHSSNSEVKVRNFDLNVELDENGDNATWLETQLERSPDYPLEINEMKIDPDDQQQASASDEEDYDEESIDQE

SEQ ID NO: 73696 - protein, 142 aa, Arabidopsis thaliana
  peptide (1)..(142): Ceres Seq. ID no. 4974848
  misc_feature: Pfam Name: CBFD_NFYB_HMF Pfam Description: Histone-like transcription factor (CBF/NF-Y) and archaeal histone
  misc_feature (1)..(142): Homolog of NCBI NO: 15239766 NR Description: putative protein; protein id: At5g19490.1
  misc_feature (1)..(103): Homolog of NCBI NO: 12321975 NR Description: unknown protein; 69004-67516 [Arabidopsis
  misc_feature (1)..(103): Homolog of NCBI NO: 30682195 NR Description: transcription factor Hap5a, putative [Arabidopsis >gi|15795167|dbj|BAB03155.1| gene_id:MQC3.30~unknown protein thaliana] >gi|18087597|gb|AAL58929.1|AF462841_1 At3g12480/MQC3.32
  misc_feature (1)..(137): Homolog of NCBI NO: 18481624 NR Description: repressor protein [Oryza sativa]
  misc_feature (1)..(54): Homolog of NCBI NO: 18481626 NR Description: repressor protein [Zea mays]
  misc_feature (1)..(57): Homolog of NCBI NO: 21313424 NR Description: RIKEN cDNA 2310074H19 [Mus musculus]
  misc_feature (1)..(57): Homolog of NCBI NO: 1244714 NR Description: Dr1-associated corepressor
  misc_feature (1)..(57): Homolog of NCBI NO: 18426973 NR Description: DR1-associated protein 1; negative cofactor 2 DR1- associated corepressor [Homo sapiens]
  misc_feature (1)..(86): Homolog of NCBI NO: 10242351 NR Description: NC2alpha [Drosophila melanogaster]
  misc_feature (1)..(47): Homolog of NCBI NO: 24657222 NR Description: CG10318-PB [Drosophila melanogaster]
MHEVKHTSCGRGRRGRGRGRSSGRTGSGLSLKFEEDLEDGSPESSRTPSPENGSLSHDDTSWKKVASHNNHHSSNSEVKVRNFDLNVELDENGDNATWLETQLERSPDYPLEINEMKIDPDDQQQASASDEEDYDEESIDQE

SEQ ID NO: 73697 - DNA, 1890 bp, Arabidopsis thaliana
  misc_feature (1)..(1890): Ceres Seq. ID no. 4974863
  misc_feature: MA Experiment ID: 20000173 Result: Down-regulated in Transcription
  misc_feature: MA Experiment 20000173 PARAMETER Experiment Name: At_42deg_Heat_P Parameter: Age (day) Value: 14
  misc_feature: MA Experiment 20000173 PARAMETER Experiment Name: At_42deg_Heat_P Parameter: Organism Value: A. thaliana
  misc_feature: MA Experiment 20000173 PARAMETER Experiment Name: At_42deg_Heat_P Parameter: Plant Line Value: WS
  misc_feature: MA Experiment 20000173 PARAMETER Experiment Name: At_42deg_Heat_P Parameter: Temperature (deg C) Value: 42 vs. 22
  misc_feature: MA Experiment 20000173 PARAMETER Experiment Name: At_42deg_Heat_P Parameter: Timepoint (hr) Value: 6
  misc_feature: MA Experiment 20000173 PARAMETER Experiment Name: At_42deg_Heat_P Parameter: Tissue Value: Aerial
  misc_feature: MA Experiment ID: 20000179 Result: Up-regulated in Transcription
  misc_feature: MA Experiment 20000179 PARAMETER Experiment Name: At_Germinating_Seeds_P Parameter: Age (hr) Value: 6 vs. 0
  misc_feature: MA Experiment 20000179 PARAMETER Experiment Name: At_Germinating_Seeds_P Parameter: Tissue Value: Germinating Seeds
  misc_feature: MA Experiment ID: 20000184 Result: Down-regulated in Transcription
  misc_feature: MA Experiment 20000184 PARAMETER Experiment Name: At_Shoots__P Parameter: Age (day) Value: 7
  misc_feature: MA Experiment 20000184 PARAMETER Experiment Name: At_Shoots__P Parameter: Tissue Value: Shoots vs. Whole Plant
  misc_feature: MA Experiment ID: 20000227 Result: Up-regulated in Transcription
  misc_feature: MA Experiment 20000227 PARAMETER Experiment Name: At_Root-Tips-vs-Tops_P Parameter: Tissue Value: Root Tips vs. Root Tops
  misc_feature: MA Experiment ID: 20000265 Result: Up-regulated in Transcription
  misc_feature: MA Experiment 20000265 PARAMETER Experiment Name: At_Open_Flower_P Parameter: Age (day) Value: 21
  misc_feature: MA Experiment 20000265 PARAMETER Experiment Name: At_Open_Flower_P Parameter: Plant Line Value: WS
  misc_feature: MA Experiment 20000265 PARAMETER Experiment Name: At_Open_Flower_P Parameter: Tissue Value: Closed Flower vs. Whole Plant
  misc_feature: MA Experiment ID: 20000286 Result: Up-regulated in Transcription
  misc_feature: MA Experiment 20000286 PARAMETER Experiment Name: At_Open_Flower_P Parameter: Age (day) Value: 21
  misc_feature: MA Experiment 20000286 PARAMETER Experiment Name: At_Open_Flower_P Parameter: Plant Line Value: WS
  misc_feature: MA Experiment 20000286 PARAMETER Experiment Name: At_Open_Flower_P Parameter: Tissue Value: Half Open vs. Whole Plant
  misc_feature: MA Experiment ID: 20000437 Result: Down-regulated in Transcription
  misc_feature: MA Experiment 20000437 PARAMETER Experiment Name: At_Drought_P Parameter: Age (day) Value: 8
  misc_feature: MA Experiment 20000437 PARAMETER Experiment Name: At_Drought_P Parameter: Organism Value: A. thaliana
  misc_feature: MA Experiment 20000437 PARAMETER Experiment Name: At_Drought_P Parameter: Plant Line Value: WS
  misc_feature: MA Experiment 20000437 PARAMETER Experiment Name: At_Drought_P Parameter: Timepoint (hr) Value: 24
  misc_feature: MA Experiment 20000437 PARAMETER Experiment Name: At_Drought_P Parameter: Tissue Value: Whole Plant
  misc_feature: MA Experiment 20000437 PARAMETER Experiment Name: At_Drought_P Parameter: Treatment Value: Drought vs. No Drought
  misc_feature: MA Experiment ID: 20001911 Result: Down-regulated in Transcription
  misc_feature: MA Experiment 20001911 PARAMETER Experiment Name: At_Drought_Reproduction_P Parameter: Age (day) Value: 40
  misc_feature: MA Experiment 20001911 PARAMETER Experiment Name: At_Drought_Reproduction_P Parameter: Organism Value: A. thaliana
  misc_feature: MA Experiment 20001911 PARAMETER Experiment Name: At_Drought_Reproduction_P Parameter: Plant Line Value: WS
  misc_feature: MA Experiment 20001911 PARAMETER Experiment Name: At_Drought_Reproduction_P Parameter: Timepoint (day) Value: 10
  misc_feature: MA Experiment 20001911 PARAMETER Experiment Name: At_Drought_Reproduction_P Parameter: Tissue Value: Flowers
  misc_feature: MA Experiment 20001911 PARAMETER Experiment Name: At_Drought_Reproduction_P Parameter: Treatment Value: Drought vs. No Drought
atgatctcttttggttttctgactcgcttgcaactttggagtgtgatatcttcttggtttacaatttgtcattcttttctgttttgtgtcagaaatggatctccggatgttcctaagaaggtgtctcctcgagctgctcggccactgaagatcgcagcgctagagcctgaatcttcttcatctcctatctcagctactaacagaacaccaaaggataagagtccaaacgttctaaatcgtaggtctcctcgaagccctgtctctgagaagaagaggccgagtagaataacggagctagagttgctagtctcgcagcttcaggaggagctaaaaaaggcgaaagatcaaatctcagtgtctgaaacatcaaagaagcaagcagaacaagaagcagaggagtccaggaaacagctccaagaagtttcttctaagcttgaggagagccagaatcagtttgtggaaacttcagccttggaagaagaaaccgataaaaccggttctcttgtttttcaaagtgtatctcaggagtgtgattgggagtttagtgctactgctggtgaaagagcaggattagctgctgttgctcatgagatccgacaactcaagcttcagattgagatggtggcttcttctgaagctggtcatgtgaaacaagctgagttgtataactcagaggttcaacttttgagaggaaacttaatggacacgcttttccacgtcgagaatttcaggaaccaacttaaggactgtgagatatcagaagctgaaaccgaggctttagccactgaaactcttaggcaattggagaatgcgaaaaaggcagtagaagaactgaagtcagatggcacaaaagctgttgagagttacaagaagatggctgtggagcttgaacagtcaaaatcaaggatggtatggcttgaagctcttgtgaataaacttcagaacaatccagcagatttggaaaaccacgaaatcctgcttaaagactatgaaagtttgagacgtggggaatcaaatgagatggatgaagaagtatcttccttaagatgtgaggtagagcgactgagagcagctctagaagcttctgataaaaaagaccaagaaggtaatgtagaggcttcttctcggttacggatacaagctgaactccagtctgaattaaagattgctaaatctgagatagacgagctaaaggcgaggttgatggacaaagaaacagaattacagtttatttcagaggaaagagataactttagcatgaaactgatgaagaaccagaaagaaatagatgttgaagctgagctgaagaaactaagggaggcgatcgagaatttaaaggcggatttgatggataaagaaacagaactccagatcgtttcagatgagaacgagacattgaagtcagatatccacaagagcgagacagatgtacaagacgcgttcctgaagctagggattgcaatggaagaggctgacaagagtagcaagaaagcggttagagtcaccgagcaactagaggctactcaagcttcaaactcagaaatggaaacagaactcaggaagctcaaagttcaatcaaaccaatggagaaaagctgctgaagcagctactgccatgctctctgctggaaacaacgggaaattcgctgagaactataatcaaacgaactccccgtactctgaggatatcgatgatgaactgacaaagaagaaaaatgggaatgtgctcaagaagattggagttttgtggaagaagcctcagaaatatgtctctctcaattcgcttaagaaactaacttttgctttccccaacacggtttctgcttctcaggtatcgtcgacttggagttggattataagagcaactcatgtgacttcggtatcgatgtga

SEQ ID NO: 73698 - protein, 629 aa, Arabidopsis thaliana
  peptide (1)..(629): Ceres Seq. ID no. 4974864
  misc_feature (104)..(543): Pfam Name: Myosin tail Pfam Description: Myosin tail
  misc_feature (1)..(588): Homolog of NCBI NO: 30697347 NR Description: expressed protein [Arabidopsis thaliana]
  misc_feature (31)..(588): Homolog of NCBI NO: 8885572 NR Description: myosin heavy chain-like [Arabidopsis thaliana]
  misc_feature (31)..(519): Homolog of NCBI NO: 18076679 NR Description: P70 protein [Nicotiana tabacum]
  misc_feature (31)..(574): Homolog of NCBI NO: 15228082 NR Description: putative myosin heavy chain; protein id: [Arabidopsis thaliana] >gi|25408529|pir||C84788 probable myosin
  misc_feature (61)..(588): Homolog of NCBI NO: 18076679 NR Description: P70 protein [Nicotiana tabacum]
  misc_feature (31)..(427): Homolog of NCBI NO: 11357801 NR Description: hypothetical protein F4P12.50 - Arabidopsis >gi|6729486|emb|CAB67642.1| putative protein [Arabidopsis
  misc_feature (42)..(588): Homolog of NCBI NO: 15228082 NR Description: putative myosin heavy chain; protein id: [Arabidopsis thaliana] >gi|25408529|pir||C84788 probable myosin
  misc_feature (31)..(427): Homolog of NCBI NO: 17978993 NR Description: AT3g53350/F4P12_50 [Arabidopsis thaliana]
  misc_feature (31)..(427): Homolog of NCBI NO: 22331765 NR Description: putative protein; protein id: At3g53350.1,
  misc_feature (143)..(585): Homolog of NCBI NO: 34908020 NR Description: P0460C04.20 [Oryza sativa (japonica
MISFGFLTRLQLWSVISSWFTICHSFLFCVRNGSPDVPKKVSPRAARPLKIAALEPESSSSPISATNRTPKDKSPNVLNRRSPRSPVSEKKRPSRITELELLVSQLQEELKKAKDQISVSETSKKQAEQEAEESRKQLQEVSSKLEESQNQFVETSALEEETDKTGSLVFQSVSQECDWEFSATAGERAGLAAVAHEIRQLKLQIEMVASSEAGHVKQAELYNSEVQLLRGNLMDTLFHVENFRNQLKDCEISEAETEALATETLRQLENAKKAVEELKSDGTKAVESYKKMAVELEQSKSRMVWLEALVNKLQNNPADLENHEILLKDYESLRRGESNEMDEEVSSLRCEVERLRAALEASDKKDQEGNVEASSRLRIQAELQSELKIAKSEIDELKARLMDKETELQFISEERDNFSMKLMKNQKEIDVEAELKKLREAIENLKADLMDKETELQIVSDENETLKSDIHKSETDVQDAFLKLGIAMEEADKSSKKAVRVTEQLEATQASNSEMETELRKLKVQSNQWRKAAEAATAMLSAGNNGKFAENYNQTNSPYSEDIDDELTKKKNGNVLKKIGVLWKKPQKYVSLNSLKKLTFAFPNTVSASQVSSTWSWIIRATHVTSVSM

SEQ ID NO: 73699 - protein, 423 aa, Arabidopsis thaliana
  peptide (1)..(423): Ceres Seq. ID no. 4974865
  misc_feature (1)..(337): Pfam Name: Myosin tail Pfam Description: Myosin tail
  misc_feature (1)..(382): Homolog of NCBI NO: 30697347 NR Description: expressed protein [Arabidopsis thaliana]
  misc_feature (1)..(382): Homolog of NCBI NO: 8885572 NR Description: myosin heavy chain-like [Arabidopsis thaliana]
  misc_feature (1)..(313): Homolog of NCBI NO: 18076679 NR Description: P70 protein [Nicotiana tabacum]
  misc_feature (1)..(368): Homolog of NCBI NO: 15228082 NR Description: putative myosin heavy chain; protein id: [Arabidopsis thaliana] >gi|25408529|pir||C84788 probable myosin
  misc_feature (1)..(382): Homolog of NCBI NO: 18076679 NR Description: P70 protein [Nicotiana tabacum]
  misc_feature (1)..(221): Homolog of NCBI NO: 11357801 NR Description: hypothetical protein F4P12.50 - Arabidopsis >gi|6729486|emb|CAB67642.1| putative protein [Arabidopsis
  misc_feature (1)..(382): Homolog of NCBI NO: 15228082 NR Description: putative myosin heavy chain; protein id: [Arabidopsis thaliana] >gi|25408529|pir||C84788 probable myosin
  misc_feature (1)..(221): Homolog of NCBI NO: 17978993 NR Description: AT3g53350/F4P12_50 [Arabidopsis thaliana]
  misc_feature (1)..(221): Homolog of NCBI NO: 22331765 NR Description: putative protein; protein id: At3g53350.1,
  misc_feature (1)..(379): Homolog of NCBI NO: 34908020 NR Description: P0460C04.20 [Oryza sativa (japonica
MVASSEAGHVKQAELYNSEVQLLRGNLMDTLFHVENFRNQLKDCEISEAETEALATETLRQLENAKKAVEELKSDGTKAVESYKKMAVELEQSKSRMVWLEALVNKLQNNPADLENHEILLKDYESLRRGESNEMDEEVSSLRCEVERLRAALEASDKKDQEGNVEASSRLRIQAELQSELKIAKSEIDELKARLMDKETELQFISEERDNFSMKLMKNQKEIDVEAELKKLREAIENLKADLMDKETELQIVSDENETLKSDIHKSETDVQDAFLKLGIAMEEADKSSKKAVRVTEQLEATQASNSEMETELRKLKVQSNQWRKAAEAATAMLSAGNNGKFAENYNQTNSPYSEDIDDELTKKKNGNVLKKIGVLWKKPQKYVSLNSLKKLTFAFPNTVSASQVSSTWSWIIRATHVTSVSM

SEQ ID NO: 73700 - protein, 396 aa, Arabidopsis thaliana
  peptide (1)..(396): Ceres Seq. ID no. 4974866
  misc_feature (1)..(310): Pfam Name: Myosin tail Pfam Description: Myosin tail
  misc_feature (1)..(355): Homolog of NCBI NO: 30697347 NR Description: expressed protein [Arabidopsis thaliana]
  misc_feature (1)..(355): Homolog of NCBI NO: 8885572 NR Description: myosin heavy chain-like [Arabidopsis thaliana]
  misc_feature (1)..(286): Homolog of NCBI NO: 18076679 NR Description: P70 protein [Nicotiana tabacum]
  misc_feature (1)..(341): Homolog of NCBI NO: 15228082 NR Description: putative myosin heavy chain; protein id: [Arabidopsis thaliana] >gi|25408529|pir||C84788 probable myosin
  misc_feature (1)..(355): Homolog of NCBI NO: 18076679 NR Description: P70 protein [Nicotiana tabacum]
  misc_feature (1)..(194): Homolog of NCBI NO: 11357801 NR Description: hypothetical protein F4P12.50 - Arabidopsis >gi|6729486|emb|CAB67642.1| putative protein [Arabidopsis
  misc_feature (1)..(355): Homolog of NCBI NO: 15228082 NR Description: putative myosin heavy chain; protein id: [Arabidopsis thaliana] >gi|25408529|pir||C84788 probable myosin
  misc_feature (1)..(194): Homolog of NCBI NO: 17978993 NR Description: AT3g53350/F4P12_50 [Arabidopsis thaliana]
  misc_feature (1)..(194): Homolog of NCBI NO: 22331765 NR Description: putative protein; protein id: At3g53350.1,
  misc_feature (1)..(352): Homolog of NCBI NO: 34908020 NR Description: P0460C04.20 [Oryza sativa (japonica
MDTLFHVENFRNQLKDCEISEAETEALATETLRQLENAKKAVEELKSDGTKAVESYKKMAVELEQSKSRMVWLEALVNKLQNNPADLENHEILLKDYESLRRGESNEMDEEVSSLRCEVERLRAALEASDKKDQEGNVEASSRLRIQAELQSELKIAKSEIDELKARLMDKETELQFISEERDNFSMKLMKNQKEIDVEAELKKLREAIENLKADLMDKETELQIVSDENETLKSDIHKSETDVQDAFLKLGIAMEEADKSSKKAVRVTEQLEATQASNSEMETELRKLKVQSNQWRKAAEAATAMLSAGNNGKFAENYNQTNSPYSEDIDDELTKKKNGNVLKKIGVLWKKPQKYVSLNSLKKLTFAFPNTVSASQVSSTWSWIIRATHVTSVSM

SEQ ID NO: 73701 - DNA, 984 bp, Arabidopsis thaliana
  misc_feature (1)..(984): Ceres Seq. ID no. 4974867
  misc_feature: MA Experiment ID: 20000355 Result: Up-regulated in Transcription
  misc_feature: MA Experiment 20000355 PARAMETER Experiment Name: At_Siliques_Sub_P Parameter: Age (day) Value: 21
  misc_feature: MA Experiment 20000355 PARAMETER Experiment Name: At_Siliques_Sub_P Parameter: Organism Value: A. thaliana
  misc_feature: MA Experiment 20000355 PARAMETER Experiment Name: At_Siliques_Sub_P Parameter: Plant Line Value: WS
  misc_feature: MA Experiment 20000355 PARAMETER Experiment Name: At_Siliques_Sub_P Parameter: Tissue Value: Less Than 5mm Siliques vs. Whole Plant
atgagatcgagaagtaaccttataggtctcataaacttcttcactttcctcctgtcgattcctatcctcggcggtggaatatggcttagcagccgagctaactcaaccgattgcctcagattcctccagtggccactcattatcatcggaatatcaatcatggtcatatctttagccggaatcgccggagcttgttaccaaaacaagttcctcatgtggctttaccttttcaccatgttctttgtaatcgctgctcttataggattcacaatcttcgcttacgtagttactgataaaggctcaggccggtttgtgatgaaccgtcggtatcttgattattatctcaatgattattccggttggttaaaggaccgtgtcacagataatggatattggagagatatcggatcgtgtgttagagattctggagtttgtaagaagattggaagagatttaaatggtgttccagaaactgctcatatgttttacttcagaaatctttctcctgttgagtccggatgttgcaagccgccaacagattgtggctatacgtacgtgaacgagacagtgtggattccgggaggagaaatggtgggaccgaacccggactgtatgttgtggaacaatgaccagagactactctgttaccaatgcagctcttgtaaagccggtgttcttggtagcttgaaaaagagttggagaaaagtctcggtgatcaacatcgtggttgtgatcatacttgttatcttctatgtcatcgcgtgtgcggcttaccagaatgttaagaggatgtataatgacgaaccggtcggtgaggctaggatgaccaatctcatcctagtcattttcaaatttaaggagattttggtacagtttttcttcggaattgtgtttttattactctttaatggtttaatggtctgttgttgtaatgataaatttgcttttagtgttttcttctttggatatgttacatatgcatga

SEQ ID NO: 73702 - protein, 327 aa, Arabidopsis thaliana
  peptide (1)..(327): Ceres Seq. ID no. 4974868
  misc_feature (3)..(247): Pfam Name: Tetraspanin family Pfam Description: Tetraspanin family
  misc_feature (1)..(327): Homolog of NCBI NO: 15238641 NR Description: senescence-associated protein - like; protein id:
  misc_feature (1)..(276): Homolog of NCBI NO: 15231187 NR Description: putative protein; protein id: At3g45600.1, by cDNA: 11427., supported by cDNA: gi_14423445 [Arabidopsis
  misc_feature (2)..(260): Homolog of NCBI NO: 3551954 NR Description: senescence-associated protein 5 [Hemerocallis
  misc_feature (2)..(263): Homolog of NCBI NO: 20197174 NR Description: hypothetical protein [Arabidopsis thaliana]
  misc_feature (2)..(263): Homolog of NCBI NO: 29367553 NR Description: senescence-associated protein-like protein [Oryza
  misc_feature (1)..(262): Homolog of NCBI NO: 21537169 NR Description: senescence-associated protein-like protein
  misc_feature (1)..(262): Homolog of NCBI NO: 15234743 NR Description: senescence-associated protein homolog; protein
  misc_feature (5)..(263): Homolog of NCBI NO: 15234374 NR Description: senescence-associated protein -like; protein id: supported by cDNA: 39831., supported by cDNA: gi_17065395, by cDNA: gi_20148628 [Arabidopsis thaliana]
  misc_feature (1)..(262): Homolog of NCBI NO: 15224802 NR Description: putative senescence-associated protein 5; protein
  misc_feature (5)..(262): Homolog of NCBI NO: 15237490 NR Description: senescence-associated protein 5-like protein; id: At5g46700.1, supported by cDNA: gi_17979385 [Arabidopsis
MRSRSNLIGLINFFTFLLSIPILGGGIWLSSRANSTDCLRFLQWPLIIIGISIMVISLAGIAGACYQNKFLMWLYLFTMFFVIAALIGFTIFAYVVTDKGSGRFVMNRRYLDYYLNDYSGWLKDRVTDNGYWRDIGSCVRDSGVCKKIGRDLNGVPETAHMFYFRNLSPVESGCCKPPTDCGYTYVNETVWIPGGEMVGPNPDCMLWNNDQRLLCYQCSSCKAGVLGSLKKSWRKVSVINIVVVIILVIFYVIACAAYQNVKRMYNDEPVGEARMTNLILVIFKFKEILVQFFFGIVFLLLFNGLMVCCCNDKFAFSVFFFGYVTYA

SEQ ID NO: 73703 - protein, 274 aa, Arabidopsis thaliana
  peptide (1)..(274): Ceres Seq. ID no. 4974869
  misc_feature (1)..(194): Pfam Name: Tetraspanin family Pfam Description: Tetraspanin family
  misc_feature (1)..(274): Homolog of NCBI NO: 15238641 NR Description: senescence-associated protein - like; protein id:
  misc_feature (1)..(223): Homolog of NCBI NO: 15231187 NR Description: putative protein; protein id: At3g45600.1, by cDNA: 11427., supported by cDNA: gi_14423445 [Arabidopsis
  misc_feature (1)..(207): Homolog of NCBI NO: 3551954 NR Description: senescence-associated protein 5 [Hemerocallis
  misc_feature (1)..(210): Homolog of NCBI NO: 20197174 NR Description: hypothetical protein [Arabidopsis thaliana]
  misc_feature (1)..(210): Homolog of NCBI NO: 29367553 NR Description: senescence-associated protein-like protein [Oryza
  misc_feature (1)..(209): Homolog of NCBI NO: 21537169 NR Description: senescence-associated protein-like protein
  misc_feature (1)..(209): Homolog of NCBI NO: 15234743 NR Description: senescence-associated protein homolog; protein
  misc_feature (1)..(210): Homolog of NCBI NO: 15234374 NR Description: senescence-associated protein -like; protein id: supported by cDNA: 39831., supported by cDNA: gi_17065395, by cDNA: gi_20148628 [Arabidopsis thaliana]
  misc_feature (1)..(209): Homolog of NCBI NO: 15224802 NR Description: putative senescence-associated protein 5; protein
  misc_feature (1)..(209): Homolog of NCBI NO: 15237490 NR Description: senescence-associated protein 5-like protein; id: At5g46700.1, supported by cDNA: gi_17979385 [Arabidopsis
MVISLAGIAGACYQNKFLMWLYLFTMFFVIAALIGFTIFAYVVTDKGSGRFVMNRRYLDYYLNDYSGWLKDRVTDNGYWRDIGSCVRDSGVCKKIGRDLNGVPETAHMFYFRNLSPVESGCCKPPTDCGYTYVNETVWIPGGEMVGPNPDCMLWNNDQRLLCYQCSSCKAGVLGSLKKSWRKVSVINIVVVIILVIFYVIACAAYQNVKRMYNDEPVGEARMTNLILVIFKFKEILVQFFFGIVFLLLFNGLMVCCCNDKFAFSVFFFGYVTYA

SEQ ID NO: 73704 - protein, 256 aa, Arabidopsis thaliana
  peptide (1)..(256): Ceres Seq. ID no. 4974870
  misc_feature (1)..(176): Pfam Name: Tetraspanin family Pfam Description: Tetraspanin family
  misc_feature (1)..(256): Homolog of NCBI NO: 15238641 NR Description: senescence-associated protein - like; protein id:
  misc_feature (1)..(205): Homolog of NCBI NO: 15231187 NR Description: putative protein; protein id: At3g45600.1, by cDNA: 11427., supported by cDNA: gi_14423445 [Arabidopsis
  misc_feature (1)..(189): Homolog of NCBI NO: 3551954 NR Description: senescence-associated protein 5 [Hemerocallis
  misc_feature (1)..(192): Homolog of NCBI NO: 20197174 NR Description: hypothetical protein [Arabidopsis thaliana]
  misc_feature (1)..(192): Homolog of NCBI NO: 29367553 NR Description: senescence-associated protein-like protein [Oryza
  misc_feature (1)..(191): Homolog of NCBI NO: 21537169 NR Description: senescence-associated protein-like protein
  misc_feature (1)..(191): Homolog of NCBI NO: 15234743 NR Description: senescence-associated protein homolog; protein
  misc_feature (1)..(192): Homolog of NCBI NO: 15234374 NR Description: senescence-associated protein -like; protein id: supported by cDNA: 39831., supported by cDNA: gi_17065395, by cDNA: gi_20148628 [Arabidopsis thaliana]
  misc_feature (1)..(191): Homolog of NCBI NO: 15224802 NR Description: putative senescence-associated protein 5; protein
  misc_feature (1)..(191): Homolog of NCBI NO: 15237490 NR Description: senescence-associated protein 5-like protein; id: At5g46700.1, supported by cDNA: gi_17979385 [Arabidopsis
MWLYLFTMFFVIAALIGFTIFAYVVTDKGSGRFVMNRRYLDYYLNDYSGWLKDRVTDNGYWRDIGSCVRDSGVCKKIGRDLNGVPETAHMFYFRNLSPVESGCCKPPTDCGYTYVNETVWIPGGEMVGPNPDCMLWNNDQRLLCYQCSSCKAGVLGSLKKSWRKVSVINIVVVIILVIFYVIACAAYQNVKRMYNDEPVGEARMTNLILVIFKFKEILVQFFFGIVFLLLFNGLMVCCCNDKFAFSVFFFGYVTYA

SEQ ID NO: 73705 - DNA, 576 bp, Arabidopsis thaliana
  misc_feature (1)..(576): Ceres Seq. ID no. 4974936
  misc_feature: MA Experiment ID: 20000171 Result: Up-regulated in Transcription
  misc_feature: MA Experiment 20000171 PARAMETER Experiment Name: At_42deg_Heat_P Parameter: Age (day) Value: 14
  misc_feature: MA Experiment 20000171 PARAMETER Experiment Name: At_42deg_Heat_P Parameter: Organism Value: A. thaliana
  misc_feature: MA Experiment 20000171 PARAMETER Experiment Name: At_42deg_Heat_P Parameter: Plant Line Value: WS
  misc_feature: MA Experiment 20000171 PARAMETER Experiment Name: At_42deg_Heat_P Parameter: Temperature (deg C) Value: 42 vs. 22
  misc_feature: MA Experiment 20000171 PARAMETER Experiment Name: At_42deg_Heat_P Parameter: Timepoint (hr) Value: 1
  misc_feature: MA Experiment 20000171 PARAMETER Experiment Name: At_42deg_Heat_P Parameter: Tissue Value: Aerial
  misc_feature: MA Experiment ID: 20000265 Result: Up-regulated in Transcription
  misc_feature: MA Experiment 20000265 PARAMETER Experiment Name: At_Open_Flower_P Parameter: Age (day) Value: 21
  misc_feature: MA Experiment 20000265 PARAMETER Experiment Name: At_Open_Flower_P Parameter: Plant Line Value: WS
  misc_feature: MA Experiment 20000265 PARAMETER Experiment Name: At_Open_Flower_P Parameter: Tissue Value: Closed Flower vs. Whole Plant
atggttgtcttgtacaacgagtgccttaaaaaccacgcggtcagtctcggaggccacgctcttgacggctgcggtgagttcacaccaaagtcaaccaccatcctcacggaccctccgtcccttaggtgcgatgcttgtggctgccatcgcaacttccaccgtcgtagtccttctgacggcttcagtcagcaccggtcaccaccgtctccgttacagctgcagccactcgcccctgttccgaacttgcttctctctcttagctccggtttctttggaccctcggatcaagaagtcaagaacaaatttacggtggaaagggatgttaggaagactgcgatgattaagaaacataagaggacgaaattcacggcggagcagaaggtgaagatgagaggtttcgcggagagagcggggtggaagattaacggctgggatgagaagtgggtgagagagttttgtagtgaagttggaatagagagaaaagttcttaaggtttggatccacaacaataagtactttaacaacgggaggagcagagacacgacgtcctctatgtctttgaatttgaagttgtag

SEQ ID NO: 73706 - protein, 191 aa, Arabidopsis thaliana; identical to SEQ ID NO: 70023
  peptide (1)..(191): Ceres Seq. ID no. 4974937
  misc_feature (1)..(61): Pfam Name: ZF-HD protein dimerisation region Pfam Description: ZF-HD protein dimerisation region
  misc_feature (1)..(191): Homolog of NCBI NO: 9757750 NR Description: gb|AAF24606.1~gene_id:MUF9.11~similar to unknown
  misc_feature (1)..(191): Homolog of NCBI NO: 15239341 NR Description: putative protein; protein id: At5g60480.1
  misc_feature (1)..(188): Homolog of NCBI NO: 15222382 NR Description: hypothetical protein; protein id: At1g69600.1
  misc_feature (1)..(75): Homolog of NCBI NO: 18421904 NR Description: putative protein; protein id: At5g39760.1, by cDNA: 249321., supported by cDNA: gi_20259469 [Arabidopsis >gi|10177976|dbj|BAB11382.1| gene_id:MKM21.8~pir||T00609~similar
  misc_feature (115)..(177): Homolog of NCBI NO: 18421904 NR Description: putative protein; protein id: At5g39760.1, by cDNA: 249321., supported by cDNA: gi_20259469 [Arabidopsis >gi|10177976|dbj|BAB11382.1| gene_id:MKM21.8~pir||T00609~similar
  misc_feature (1)..(70): Homolog of NCBI NO: 21592512 NR Description: unknown [Arabidopsis thaliana]
  misc_feature (115)..(177): Homolog of NCBI NO: 21592512 NR Description: unknown [Arabidopsis thaliana]
  misc_feature (3)..(187): Homolog of NCBI NO: 13277216 NR Description: ZF-HD homeobox protein [Flaveria trinervia]
  misc_feature (3)..(187): Homolog of NCBI NO: 13277218 NR Description: ZF-HD homeobox protein [Flaveria bidentis]
  misc_feature (1)..(72): Homolog of NCBI NO: 15226993 NR Description: hypothetical protein; protein id: At2g02540.1, by cDNA: gi_20148767 [Arabidopsis thaliana]

SEQ ID NO: 73707 - protein, 112 aa, Arabidopsis thaliana
  peptide (1)..(112): Ceres Seq. ID no. 4974938
WLSCTTSALKTTRSVSEATLLTAAVSSHQSQPPSSRTLRPLGAMLVAAIATSTVVVLLTASVSTGHHRLRYSCSHSPLFRTCFSLLAPVSLDPRIKKSRTNLRWKGMLGRLR

SEQ ID NO: 73708 - DNA, 1131 bp, Arabidopsis thaliana
  misc_feature (1)..(1131): Ceres Seq. ID no. 4975114
  misc_feature: MA Experiment ID: 20000173 Result: Down-regulated in Transcription
  misc_feature: MA Experiment 20000173 PARAMETER Experiment Name: At_42deg_Heat_P Parameter: Age (day) Value: 14
  misc_feature: MA Experiment 20000173 PARAMETER Experiment Name: At_42deg_Heat_P Parameter: Organism Value: A. thaliana
  misc_feature: MA Experiment 20000173 PARAMETER Experiment Name: At_42deg_Heat_P Parameter: Plant Line Value: WS
  misc_feature: MA Experiment 20000173 PARAMETER Experiment Name: At_42deg_Heat_P Parameter: Temperature (deg C) Value: 42 vs. 22
  misc_feature: MA Experiment 20000173 PARAMETER Experiment Name: At_42deg_Heat_P Parameter: Timepoint (hr) Value: 6
  misc_feature: MA Experiment 20000173 PARAMETER Experiment Name: At_42deg_Heat_P Parameter: Tissue Value: Aerial
  misc_feature: MA Experiment ID: 20000182 Result: Up-regulated in Transcription
  misc_feature: MA Experiment 20000182 PARAMETER Experiment Name: At_2mM_SA_P Parameter: Age (day) Value: 14
  misc_feature: MA Experiment 20000182 PARAMETER Experiment Name: At_2mM_SA_P Parameter: Organism Value: A. thaliana
  misc_feature: MA Experiment 20000182 PARAMETER Experiment Name: At_2mM_SA_P Parameter: Plant Line Value: WS
  misc_feature: MA Experiment 20000182 PARAMETER Experiment Name: At_2mM_SA_P Parameter: Timepoint (hr) Value: 6
  misc_feature: MA Experiment 20000182 PARAMETER Experiment Name: At_2mM_SA_P Parameter: Tissue Value: Aerial
  misc_feature: MA Experiment 20000182 PARAMETER Experiment Name: At_2mM_SA_P Parameter: Treatment Value: 2mM SA vs. No Treatment
  misc_feature: MA Experiment ID: 20001557 Result: Down-regulated in Transcription
  misc_feature: MA Experiment 20001557 PARAMETER Experiment Name: At_Drought_Soil_Dry_P Parameter: Age (day) Value: 27
  misc_feature: MA Experiment 20001557 PARAMETER Experiment Name: At_Drought_Soil_Dry_P Parameter: Organism Value: A. thaliana
  misc_feature: MA Experiment 20001557 PARAMETER Experiment Name: At_Drought_Soil_Dry_P Parameter: Plant Line Value: WS
  misc_feature: MA Experiment 20001557 PARAMETER Experiment Name: At_Drought_Soil_Dry_P Parameter: Post Timepoint (hr) Value: 3
  misc_feature: MA Experiment 20001557 PARAMETER Experiment Name: At_Drought_Soil_Dry_P Parameter: Post-Treatment Value: Re-Water vs. No Drought
  misc_feature: MA Experiment 20001557 PARAMETER Experiment Name: At_Drought_Soil_Dry_P Parameter: Timepoint (day) Value: 13
  misc_feature: MA Experiment 20001557 PARAMETER Experiment Name: At_Drought_Soil_Dry_P Parameter: Treatment Value: Drought vs. No Drought
atgtatttctatgctcaaatgccaaatcatctaaattcgtatttaaacctgcttagggacttgacaattctcatagcacaaactgttttttttatgaatgtgggttggtttcaggtagctgatgcggaattggtgaaatctgacaagtttccggtagtggtgagtacttggcctttccttgaagctgttagagctgcttggagagcagttgataatgggagctctgcagtggaagctgttgttgaaggttgttctgcttgtgaagaacttcgttgtgacggtacagttgggcctggaggaagtccggatgagaatggtgagaccatgattgatgctttagtcatggatggggtgactatggaggttggagctgttgctgcaatgcggtatgttaaagacggtataagagctgcacatctagtgatgaaatactctcaacacacgttgcttgccggagaaggagcatcagcatttgcaatctccatgggtctccccggacccatgaacctaagctcccctgaatctgtaaagaagtggtcggactggaaagagaatcagtgtcaacccaatttcaggaagaatgtagtccccgcaaatgactgtggaccttacaagccaaacaatagtgctatgaatgtttttgtagacaaaagcactgaatcttgcgagatgggggcgattgagtataaacctcctcttgttggtcctcacaatcacgatacgatatcgatggctgtcattgacagaatggggcatatagctgttgggacatcgaccaatggagccacatataaaattcctggaagggttggtgatgggcctatcgtcggttcatcagcctacgctgatgatgaagtaggtggatgtggtgcaactggagatggtgacaccatgatgcgcttcctcccttgttaccaagttgtggagagcatgagacaaggaatgaaaccagaagaagctgctaaagatgcaatctcgagaatcgcaaggaagtttccagatttcgtgggagcagttgtggctgttgacaagaacggatctcacgcaggagcttgctatggctggacgtttcagtactcagtccaaaaccctgacatgaacgatgttcaagtctttacagttcttccatga

SEQ ID NO: 73709 - protein, 376 aa, Arabidopsis thaliana
  peptide (1)..(376): Ceres Seq. ID no. 4975115
  misc_feature (35)..(373): Pfam Name: Asparaginase Pfam Description: Asparaginase
  misc_feature (1)..(376): Homolog of NCBI NO: 15240278 NR Description: glycosylasparaginase - like protein; protein id:
  misc_feature (51)..(374): Homolog of NCBI NO: 31239653 NR Description: ENSANGP00000016583 [Anopheles gambiae]
  misc_feature (51)..(374): Homolog of NCBI NO: 6685237 NR Description: N(4)-(Beta-N-acetylglucosaminyl)-L-asparaginase
  misc_feature (42)..(364): Homolog of NCBI NO: 28573318 NR Description: CG1827-PA [Drosophila melanogaster]
  misc_feature (52)..(368): Homolog of NCBI NO: 40882569 NR Description: AT24323p [Drosophila melanogaster]
  misc_feature (52)..(364): Homolog of NCBI NO: 24652135 NR Description: CG1827-PB [Drosophila melanogaster]
  misc_feature (44)..(367): Homolog of NCBI NO: 4557273 NR Description: aspartylglucosaminidase precursor [Homo sapiens]
  misc_feature (47)..(367): Homolog of NCBI NO: 732508 NR Description: lysosomal glycosylasparaginase [Homo sapiens]
  misc_feature (44)..(352): Homolog of NCBI NO: 20863490 NR Description: aspartylglucosaminidase [Mus musculus]
  misc_feature (44)..(367): Homolog of NCBI NO: 183330 NR Description: glycosylasparaginase
MYFYAQMPNHLNSYLNLLRDLTILIAQTVFFMNVGWFQVADAELVKSDKFPVVVSTWPFLEAVRAAWRAVDNGSSAVEAVVEGCSACEELRCDGTVGPGGSPDENGETMIDALVMDGVTMEVGAVAAMRYVKDGIRAAHLVMKYSQHTLLAGEGASAFAISMGLPGPMNLSSPESVKKWSDWKENQCQPNFRKNVVPANDCGPYKPNNSAMNVFVDKSTESCEMGAIEYKPPLVGPHNHDTISMAVIDRMGHIAVGTSTNGATYKIPGRVGDGPIVGSSAYADDEVGGCGATGDGDTMMRFLPCYQVVESMRQGMKPEEAAKDAISRIARKFPDFVGAVVAVDKNGSHAGACYGWTFQYSVQNPDMNDVQVFTVLP

SEQ ID NO: 73710 - protein, 370 aa, Arabidopsis thaliana
  peptide (1)..(370): Ceres Seq. ID no. 4975116
  misc_feature (29)..(367): Pfam Name: Asparaginase Pfam Description: Asparaginase
  misc_feature (1)..(370): Homolog of NCBI NO: 15240278 NR Description: glycosylasparaginase - like protein; protein id:
  misc_feature (45)..(368): Homolog of NCBI NO: 31239653 NR Description: ENSANGP00000016583 [Anopheles gambiae]
  misc_feature (45)..(368): Homolog of NCBI NO: 6685237 NR Description: N(4)-(Beta-N-acetylglucosaminyl)-L-asparaginase
  misc_feature (36)..(358): Homolog of NCBI NO: 28573318 NR Description: CG1827-PA [Drosophila melanogaster]
  misc_feature (46)..(362): Homolog of NCBI NO: 40882569 NR Description: AT24323p [Drosophila melanogaster]
  misc_feature (46)..(358): Homolog of NCBI NO: 24652135 NR Description: CG1827-PB [Drosophila melanogaster]
  misc_feature (38)..(361): Homolog of NCBI NO: 4557273 NR Description: aspartylglucosaminidase precursor [Homo sapiens]
  misc_feature (41)..(361): Homolog of NCBI NO: 732508 NR Description: lysosomal glycosylasparaginase [Homo sapiens]
  misc_feature (38)..(346): Homolog of NCBI NO: 20863490 NR Description: aspartylglucosaminidase [Mus musculus]
  misc_feature (38)..(361): Homolog of NCBI NO: 183330 NR Description: glycosylasparaginase
MPNHLNSYLNLLRDLTILIAQTVFFMNVGWFQVADAELVKSDKFPVVVSTWPFLEAVRAAWRAVDNGSSAVEAVVEGCSACEELRCDGTVGPGGSPDENGETMIDALVMDGVTMEVGAVAAMRYVKDGIRAAHLVMKYSQHTLLAGEGASAFAISMGLPGPMNLSSPESVKKWSDWKENQCQPNFRKNVVPANDCGPYKPNNSAMNVFVDKSTESCEMGAIEYKPPLVGPHNHDTISMAVIDRMGHIAVGTSTNGATYKIPGRVGDGPIVGSSAYADDEVGGCGATGDGDTMMRFLPCYQVVESMRQGMKPEEAAKDAISRIARKFPDFVGAVVAVDKNGSHAGACYGWTFQYSVQNPDMNDVQVFTVLP

SEQ ID NO: 73711 - protein, 345 aa, Arabidopsis thaliana
  peptide (1)..(345): Ceres Seq. ID no. 4975117
  misc_feature (4)..(342): Pfam Name: Asparaginase Pfam Description: Asparaginase
  misc_feature (1)..(345): Homolog of NCBI NO: 15240278 NR Description: glycosylasparaginase - like protein; protein id:
  misc_feature (20)..(343): Homolog of NCBI NO: 31239653 NR Description: ENSANGP00000016583 [Anopheles gambiae]
  misc_feature (20)..(343): Homolog of NCBI NO: 6685237 NR Description: N(4)-(Beta-N-acetylglucosaminyl)-L-asparaginase
  misc_feature (11)..(333): Homolog of NCBI NO: 28573318 NR Description: CG1827-PA [Drosophila melanogaster]
  misc_feature (21)..(337): Homolog of NCBI NO: 40882569 NR Description: AT24323p [Drosophila melanogaster]
  misc_feature (21)..(333): Homolog of NCBI NO: 24652135 NR Description: CG1827-PB [Drosophila melanogaster]
  misc_feature (13)..(336): Homolog of NCBI NO: 4557273 NR Description: aspartylglucosaminidase precursor [Homo sapiens]
  misc_feature (16)..(336): Homolog of NCBI NO: 732508 NR Description: lysosomal glycosylasparaginase [Homo sapiens]
  misc_feature (13)..(321): Homolog of NCBI NO: 20863490 NR Description: aspartylglucosaminidase [Mus musculus]
  misc_feature (13)..(336): Homolog of NCBI NO: 183330 NR Description: glycosylasparaginase
MNVGWFQVADAELVKSDKFPVVVSTWPFLEAVRAAWRAVDNGSSAVEAVVEGCSACEELRCDGTVGPGGSPDENGETMIDALVMDGVTMEVGAVAAMRYVKDGIRAAHLVMKYSQHTLLAGEGASAFAISMGLPGPMNLSSPESVKKWSDWKENQCQPNFRKNVVPANDCGPYKPNNSAMNVFVDKSTESCEMGAIEYKPPLVGPHNHDTISMAVIDRMGHIAVGTSTNGATYKIPGRVGDGPIVGSSAYADDEVGGCGATGDGDTMMRFLPCYQVVESMRQGMKPEEAAKDAISRIARKFPDFVGAVVAVDKNGSHAGACYGWTFQYSVQNPDMNDVQVFTVLP

SEQ ID NO: 73712 - DNA, 929 bp, Arabidopsis thaliana
  misc_feature (1)..(929): Ceres Seq. ID no. 4975441
  misc_feature: MA Experiment ID: 108434 Result: Up-regulated in Transcription
  misc_feature: MA Experiment 108434 PARAMETER Experiment Name: At_Root_Tips_cDNA_P Parameter: Tissue Value: Root Tips
  misc_feature: MA Experiment ID: 108462 Result: Down-regulated in Transcription
  misc_feature: MA Experiment 108462 PARAMETER Experiment Name: At_Germinating_Seeds_cDNA_P Parameter: Age (day) Value: 2 vs. 0
  misc_feature: MA Experiment 108462 PARAMETER Experiment Name: At_Germinating_Seeds_cDNA_P Parameter: Tissue Value: Germinating Seeds
  misc_feature: MA Experiment ID: 108463 Result: Down-regulated in Transcription
  misc_feature: MA Experiment 108463 PARAMETER Experiment Name: At_Germinating_Seeds_cDNA_P Parameter: Age (day) Value: 3 vs. 0
  misc_feature: MA Experiment 108463 PARAMETER Experiment Name: At_Germinating_Seeds_cDNA_P Parameter: Tissue Value: Germinating Seeds
  misc_feature: MA Experiment ID: 108464 Result: Down-regulated in Transcription
  misc_feature: MA Experiment 108464 PARAMETER Experiment Name: At_Germinating_Seeds_cDNA_P Parameter: Age (day) Value: 4 vs. 0
  misc_feature: MA Experiment 108464 PARAMETER Experiment Name: At_Germinating_Seeds_cDNA_P Parameter: Tissue Value: Germinating Seeds
  misc_feature: MA Experiment ID: 108501 Result: Up-regulated in Transcription
  misc_feature: MA Experiment 108501 PARAMETER Experiment Name: At_ap2_floral_buds_cDNA_P Parameter: Plant Line Value: ap2 (Ler.)
  misc_feature: MA Experiment 108501 PARAMETER Experiment Name: At_ap2_floral_buds_cDNA_P Parameter: Tissue Value: Closed Flower
  misc_feature: MA Experiment ID: 108569 Result: Up-regulated in Transcription
  misc_feature: MA Experiment 108569 PARAMETER Experiment Name: At_0.001%_MeJA__cDNA_P Parameter: Timepoint (hr) Value: 6
  misc_feature: MA Experiment 108569 PARAMETER Experiment Name: At_0.001%_MeJA__cDNA_P Parameter: Tissue Value: Aerial
  misc_feature: MA Experiment 108569 PARAMETER Experiment Name: At_0.001%_MeJA__cDNA_P Parameter: Treatment Value: 0.001% MeJA vs. No Treatment
ctctccaaatttcttcttcttctccggcgaagaaatcgaaaagtcattaccctaagagtcccagagtcgtcagaaggaacagcttttgaaatggacggtgtcacctaccaaagattcccaacggtgaagatccgtgagcttaaagatgactacgccaagttcgagcttcgtgaaaccgacgtttcaatggccaacgctctccgtcgcgtaatgatctccgaagtccccaccatggcaatccatctcgtcaaaatcgaggttaattcctctgttctcaacgacgagttcattgctcaacgacttagtctcatccctctcactagcgagcgtgctatgagcatgcggttctgtcaagattgtgaagattgtaatggagatgaacattgcgagttctgctctgttgagtttccccttagtgctaagtgtgttactgaccaaaccctagatgttactagtagggatctctacagtgctgatcctactgttactcctgttgatttcactagtaactcatctacttctgattcaagcgagcacaagggaattatcattgcgaaactacgcaggggacaagagttgaagcttaaagcattagctaggaaaggaattgggaaagatcatgcgaaatggtctcctgcagctactgttacgtatatgtatgagcctgacattattatcaatgaagagatgatgaacactttgacagatgaggaaaaaattgacttgattgagagcagtcctaccaaagtgtttggcattgacccagtcaccggacaggttaatttcgatgttctgtaagaataacatctatacaagtttatagctttgagacttcaatatgattgtactactttataggctaccatgctttgaaatatatgtatgtgatgtggtgtatgaattttctttaagtgtttagtgcgtttagc

SEQ ID NO: 73713 - protein, 265 aa, Arabidopsis thaliana
  peptide (1)..(265): Ceres Seq. ID no. 4975442
  misc_feature (83)..(211): Pfam Name: RNA polymerase Rpb3/RpoA insert domain Pfam Description: RNA polymerase Rpb3/RpoA insert domain
  misc_feature (31)..(260): Homolog of NCBI NO: 2129725 NR Description: DNA-directed RNA polymerase (EC 2.7.7.6) II 35.5K B - Arabidopsis thaliana >gi|514320|gb|AAB03740.1| RNA polymerase
  misc_feature (31)..(260): Homolog of NCBI NO: 15226509 NR Description: DNA-directed RNA polymerase II, third largest protein id: At2g15400.1 [Arabidopsis thaliana]
  misc_feature (31)..(260): Homolog of NCBI NO: 15226523 NR Description: DNA-directed RNA polymerase II, third largest protein id: At2g15430.1, supported by cDNA: 3839., supported by gi_17381017, supported by cDNA: gi_20465882 [Arabidopsis
  misc_feature (31)..(260): Homolog of NCBI NO: 21593370 NR Description: DNA-directed RNA polymerase II, third largest
  misc_feature (36)..(223): Homolog of NCBI NO: 28278474 NR Description: Similar to polymerase (RNA) II (DNA directed)
  misc_feature (36)..(223): Homolog of NCBI NO: 38511942 NR Description: Polymerase (RNA) II (DNA directed) polypeptide C
  misc_feature (36)..(223): Homolog of NCBI NO: 12837765 NR Description: unnamed protein product [Mus musculus]
  misc_feature (36)..(223): Homolog of NCBI NO: 29336059 NR Description: polymerase (RNA) II (DNA directed) polypeptide C; polymerase II 3 [Mus musculus] >gi|12805131|gb|AAH02023.1| to polymerase (RNA) II (DNA directed) polypeptide C (33kD) [Mus
  misc_feature (36)..(223): Homolog of NCBI NO: 34851240 NR Description: similar to Polymerase (RNA) II (DNA directed)
  misc_feature (36)..(230): Homolog of NCBI NO: 40645083 NR Description: homologue of DNA-directed RNA polymerase II
LSKFLLLLRRRNRKVITLRVPESSEGTAFEMDGVTYQRFPTVKIRELKDDYAKFELRETDVSMANALRRVMISEVPTMAIHLVKIEVNSSVLNDEFIAQRLSLIPLTSERAMSMRFCQDCEDCNGDEHCEFCSVEFPLSAKCVTDQTLDVTSRDLYSADPTVTPVDFTSNSSTSDSSEHKGIIIAKLRRGQELKLKALARKGIGKDHAKWSPAATVTYMYEPDIIINEEMMNTLTDEEKIDLIESSPTKVFGIDPVTGQVNFDVL

SEQ ID NO: 73714 - protein, 235 aa, Arabidopsis thaliana
  peptide (1)..(235): Ceres Seq. ID no. 4975443
  misc_feature (53)..(181): Pfam Name: RNA polymerase Rpb3/RpoA insert domain Pfam Description: RNA polymerase Rpb3/RpoA insert domain
  misc_feature (1)..(230): Homolog of NCBI NO: 2129725 NR Description: DNA-directed RNA polymerase (EC 2.7.7.6) II 35.5K B - Arabidopsis thaliana >gi|514320|gb|AAB03740.1| RNA polymerase
  misc_feature (1)..(230): Homolog of NCBI NO: 15226509 NR Description: DNA-directed RNA polymerase II, third largest protein id: At2g15400.1 [Arabidopsis thaliana]
  misc_feature (1)..(230): Homolog of NCBI NO: 15226523 NR Description: DNA-directed RNA polymerase II, third largest protein id: At2g15430.1, supported by cDNA: 3839., supported by gi_17381017, supported by cDNA: gi_20465882 [Arabidopsis
  misc_feature (1)..(230): Homolog of NCBI NO: 21593370 NR Description: DNA-directed RNA polymerase II, third largest
  misc_feature (6)..(193): Homolog of NCBI NO: 28278474 NR Description: Similar to polymerase (RNA) II (DNA directed)
  misc_feature (6)..(193): Homolog of NCBI NO: 38511942 NR Description: Polymerase (RNA) II (DNA directed) polypeptide C
  misc_feature (6)..(193): Homolog of NCBI NO: 12837765 NR Description: unnamed protein product [Mus musculus]
  misc_feature (6)..(193): Homolog of NCBI NO: 29336059 NR Description: polymerase (RNA) II (DNA directed) polypeptide C; polymerase II 3 [Mus musculus] >gi|12805131|gb|AAH02023.1| to polymerase (RNA) II (DNA directed) polypeptide C (33kD) [Mus
  misc_feature (6)..(193): Homolog of NCBI NO: 34851240 NR Description: similar to Polymerase (RNA) II (DNA directed)
  misc_feature (6)..(200): Homolog of NCBI NO: 40645083 NR Description: homologue of DNA-directed RNA polymerase II
MDGVTYQRFPTVKIRELKDDYAKFELRETDVSMANALRRVMISEVPTMAIHLVKIEVNSSVLNDEFIAQRLSLIPLTSERAMSMRFCQDCEDCNGDEHCEFCSVEFPLSAKCVTDQTLDVTSRDLYSADPTVTPVDFTSNSSTSDSSEHKGIIIAKLRRGQELKLKALARKGIGKDHAKWSPAATVTYMYEPDIIINEEMMNTLTDEEKIDLIESSPTKVFGIDPVTGQVNFDVL

SEQ ID NO: 73715 - protein, 203 aa, Arabidopsis thaliana
  peptide (1)..(203): Ceres Seq. ID no. 4975444
  misc_feature (21)..(149): Pfam Name: RNA polymerase Rpb3/RpoA insert domain Pfam Description: RNA polymerase Rpb3/RpoA insert domain
  misc_feature (1)..(198): Homolog of NCBI NO: 2129725 NR Description: DNA-directed RNA polymerase (EC 2.7.7.6) II 35.5K B - Arabidopsis thaliana >gi|514320|gb|AAB03740.1| RNA polymerase
  misc_feature (1)..(198): Homolog of NCBI NO: 15226509 NR Description: DNA-directed RNA polymerase II, third largest protein id: At2g15400.1 [Arabidopsis thaliana]
  misc_feature (1)..(198): Homolog of NCBI NO: 15226523 NR Description: DNA-directed RNA polymerase II, third largest protein id: At2g15430.1, supported by cDNA: 3839., supported by gi_17381017, supported by cDNA: gi_20465882 [Arabidopsis
  misc_feature (1)..(198): Homolog of NCBI NO: 21593370 NR Description: DNA-directed RNA polymerase II, third largest
  misc_feature (1)..(161): Homolog of NCBI NO: 28278474 NR Description: Similar to polymerase (RNA) II (DNA directed)
  misc_feature (1)..(161): Homolog of NCBI NO: 38511942 NR Description: Polymerase (RNA) II (DNA directed) polypeptide C
  misc_feature (1)..(161): Homolog of NCBI NO: 12837765 NR Description: unnamed protein product [Mus musculus]
  misc_feature (1)..(161): Homolog of NCBI NO: 29336059 NR Description: polymerase (RNA) II (DNA directed) polypeptide C; polymerase II 3 [Mus musculus] >gi|12805131|gb|AAH02023.1| to polymerase (RNA) II (DNA directed) polypeptide C (33kD) [Mus
  misc_feature (1)..(161): Homolog of NCBI NO: 34851240 NR Description: similar to Polymerase (RNA) II (DNA directed)
  misc_feature (1)..(168): Homolog of NCBI NO: 40645083 NR Description: homologue of DNA-directed RNA polymerase II
MANALRRVMISEVPTMAIHLVKIEVNSSVLNDEFIAQRLSLIPLTSERAMSMRFCQDCEDCNGDEHCEFCSVEFPLSAKCVTDQTLDVTSRDLYSADPTVTPVDFTSNSSTSDSSEHKGIIIAKLRRGQELKLKALARKGIGKDHAKWSPAATVTYMYEPDIIINEEMMNTLTDEEKIDLIESSPTKVFGIDPVTGQVNFDVL

SEQ ID NO: 73716 - DNA, 1127 bp, Arabidopsis thaliana
  misc_feature (1)..(1127): Ceres Seq. ID no. 4975592
  misc_feature: MA Experiment ID: 108434 Result: Down-regulated in Transcription
  misc_feature: MA Experiment 108434 PARAMETER Experiment Name: At_Root_Tips_cDNA_P Parameter: Tissue Value: Root Tips
  misc_feature: MA Experiment ID: 108464 Result: Up-regulated in Transcription
  misc_feature: MA Experiment 108464 PARAMETER Experiment Name: At_Germinating_Seeds_cDNA_P Parameter: Age (day) Value: 4 vs. 0
  misc_feature: MA Experiment 108464 PARAMETER Experiment Name: At_Germinating_Seeds_cDNA_P Parameter: Tissue Value: Germinating Seeds
  misc_feature: MA Experiment ID: 108488 Result: Down-regulated in Transcription
  misc_feature: MA Experiment ID: 108561 Result: Up-regulated in Transcription
  misc_feature: MA Experiment 108561 PARAMETER Experiment Name: At_100uM_ABA_cDNA_P Parameter: Timepoint (hr) Value: 6
  misc_feature: MA Experiment 108561 PARAMETER Experiment Name: At_100uM_ABA_cDNA_P Parameter: Tissue Value: Aerial
  misc_feature: MA Experiment 108561 PARAMETER Experiment Name: At_100uM_ABA_cDNA_P Parameter: Treatment Value: 100uM ABA vs. No Treatment
  misc_feature: MA Experiment ID: 108573 Result: Up-regulated in Transcription
  misc_feature: MA Experiment 108573 PARAMETER Experiment Name: At_Drought_cDNA_P Parameter: Timepoint (hr) Value: 6
  misc_feature: MA Experiment 108573 PARAMETER Experiment Name: At_Drought_cDNA_P Parameter: Tissue Value: Aerial
  misc_feature: MA Experiment 108573 PARAMETER Experiment Name: At_Drought_cDNA_P Parameter: Treatment Value: Drought vs. No Drought
  misc_feature: MA Experiment ID: 108579 Result: Up-regulated in Transcription
  misc_feature: MA Experiment 108579 PARAMETER Experiment Name: At_4deg_Cold_cDNA_P Parameter: Temperature (deg C) Value: 4 vs. 22
  misc_feature: MA Experiment 108579 PARAMETER Experiment Name: At_4deg_Cold_cDNA_P Parameter: Timepoint (hr) Value: 6
  misc_feature: MA Experiment 108579 PARAMETER Experiment Name: At_4deg_Cold_cDNA_P Parameter: Tissue Value: Aerial
  misc_feature: MA Experiment ID: 108585 Result: Up-regulated in Transcription
  misc_feature: MA Experiment 108585 PARAMETER Experiment Name: At_5mM_NaNP_cDNA_P Parameter: Timepoint (hr) Value: 6
  misc_feature: MA Experiment 108585 PARAMETER Experiment Name: At_5mM_NaNP_cDNA_P Parameter: Tissue Value: Aerial
  misc_feature: MA Experiment 108585 PARAMETER Experiment Name: At_5mM_NaNP_cDNA_P Parameter: Treatment Value: null
  misc_feature: MA Experiment ID: 108595 Result: Up-regulated in Transcription
  misc_feature: MA Experiment 108595 PARAMETER Experiment Name: At_Ler-pi_Ovule_cDNA_P Parameter: Plant Line Value: null
  misc_feature: MA Experiment ID: 108607 Result: Up-regulated in Transcription
  misc_feature: MA Experiment 108607 PARAMETER Experiment Name: At_100uM_ABA_cDNA_P Parameter: Timepoint (hr) Value: 4
  misc_feature: MA Experiment 108607 PARAMETER Experiment Name: At_100uM_ABA_cDNA_P Parameter: Tissue Value: Aerial
  misc_feature: MA Experiment 108607 PARAMETER Experiment Name: At_100uM_ABA_cDNA_P Parameter: Treatment Value: 100uM ABA vs. No Treatment
  misc_feature: MA Experiment ID: 108667 Result: Up-regulated in Transcription
  misc_feature: MA Experiment 108667 PARAMETER Experiment Name: At_2mM_SA_cDNA_P Parameter: Plant Line Value: WS
  misc_feature: MA Experiment 108667 PARAMETER Experiment Name: At_2mM_SA_cDNA_P Parameter: Timepoint (hr) Value: 1
  misc_feature: MA Experiment 108667 PARAMETER Experiment Name: At_2mM_SA_cDNA_P Parameter: Treatment Value: 2mM SA vs. No Treatment
  misc_feature: MA Experiment ID: 20000144 Result: Down-regulated in Transcription
  misc_feature: MA Experiment 20000144 PARAMETER Experiment Name: At_42deg_Heat_cDNA_P Parameter: Temperature (deg C) Value: 42 vs. 22
  misc_feature: MA Experiment 20000144 PARAMETER Experiment Name: At_42deg_Heat_cDNA_P Parameter: Timepoint (hr) Value: 1
  misc_feature: MA Experiment 20000144 PARAMETER Experiment Name: At_42deg_Heat_cDNA_P Parameter: Tissue Value: Aerial
  misc_feature: MA Experiment ID: 20000171 Result: Down-regulated in Transcription
  misc_feature: MA Experiment 20000171 PARAMETER Experiment Name: At_42deg_Heat_P Parameter: Age (day) Value: 14
  misc_feature: MA Experiment 20000171 PARAMETER Experiment Name: At_42deg_Heat_P Parameter: Organism Value: A. thaliana
  misc_feature: MA Experiment 20000171 PARAMETER Experiment Name: At_42deg_Heat_P Parameter: Plant Line Value: WS
  misc_feature: MA Experiment 20000171 PARAMETER Experiment Name: At_42deg_Heat_P Parameter: Temperature (deg C) Value: 42 vs. 22
  misc_feature: MA Experiment 20000171 PARAMETER Experiment Name: At_42deg_Heat_P Parameter: Timepoint (hr) Value: 1
  misc_feature: MA Experiment 20000171 PARAMETER Experiment Name: At_42deg_Heat_P Parameter: Tissue Value: Aerial
  misc_feature: MA Experiment ID: 20000182 Result: Up-regulated in Transcription
  misc_feature: MA Experiment 20000182 PARAMETER Experiment Name: At_2mM_SA_P Parameter: Age (day) Value: 14
  misc_feature: MA Experiment 20000182 PARAMETER Experiment Name: At_2mM_SA_P Parameter: Organism Value: A. thaliana
  misc_feature: MA Experiment 20000182 PARAMETER Experiment Name: At_2mM_SA_P Parameter: Plant Line Value: WS
  misc_feature: MA Experiment 20000182 PARAMETER Experiment Name: At_2mM_SA_P Parameter: Timepoint (hr) Value: 6
  misc_feature: MA Experiment 20000182 PARAMETER Experiment Name: At_2mM_SA_P Parameter: Tissue Value: Aerial
  misc_feature: MA Experiment 20000182 PARAMETER Experiment Name: At_2mM_SA_P Parameter: Treatment Value: 2mM SA vs. No Treatment
  misc_feature: MA Experiment ID: 20000224 Result: Down-regulated in Transcription
  misc_feature: MA Experiment ID: 20000234 Result: Down-regulated in Transcription
  misc_feature: MA Experiment 20000234 PARAMETER Experiment Name: At_Siliques_P Parameter: Age (day) Value: 21
  misc_feature: MA Experiment 20000234 PARAMETER Experiment Name: At_Siliques_P Parameter: Organism Value: A. thaliana
  misc_feature: MA Experiment 20000234 PARAMETER Experiment Name: At_Siliques_P Parameter: Plant Line Value: WS
  misc_feature: MA Experiment 20000234 PARAMETER Experiment Name: At_Siliques_P Parameter: Tissue Value: Less Than 5mm Siliques vs. Whole Plant
  misc_feature: MA Experiment ID: 20000235 Result: Down-regulated in Transcription
  misc_feature: MA Experiment 20000235 PARAMETER Experiment Name: At_Siliques_P Parameter: Age (day) Value: 21
  misc_feature: MA Experiment 20000235 PARAMETER Experiment Name: At_Siliques_P Parameter: Organism Value: A. thaliana
  misc_feature: MA Experiment 20000235 PARAMETER Experiment Name: At_Siliques_P Parameter: Plant Line Value: WS
  misc_feature: MA Experiment 20000235 PARAMETER Experiment Name: At_Siliques_P Parameter: Tissue Value: 5-10mm Siliques vs. Whole Plant
  misc_feature: MA Experiment ID: 20000265 Result: Down-regulated in Transcription
  misc_feature: MA Experiment 20000265 PARAMETER Experiment Name: At_Open_Flower_P Parameter: Age (day) Value: 21
  misc_feature: MA Experiment 20000265 PARAMETER Experiment Name: At_Open_Flower_P Parameter: Plant Line Value: WS
  misc_feature: MA Experiment 20000265 PARAMETER Experiment Name: At_Open_Flower_P Parameter: Tissue Value: Closed Flower vs. Whole Plant
  misc_feature: MA Experiment ID: 20000436 Result: Up-regulated in Transcription
  misc_feature: MA Experiment 20000436 PARAMETER Experiment Name: At_Drought_P Parameter: Age (day) Value: 7
  misc_feature: MA Experiment 20000436 PARAMETER Experiment Name: At_Drought_P Parameter: Organism Value: A. thaliana
  misc_feature: MA Experiment 20000436 PARAMETER Experiment Name: At_Drought_P Parameter: Plant Line Value: WS
  misc_feature: MA Experiment 20000436 PARAMETER Experiment Name: At_Drought_P Parameter: Timepoint (hr) Value: 12
  misc_feature: MA Experiment 20000436 PARAMETER Experiment Name: At_Drought_P Parameter: Tissue Value: Whole Plant
  misc_feature: MA Experiment 20000436 PARAMETER Experiment Name: At_Drought_P Parameter: Treatment Value: Drought vs. No Drought
  misc_feature: MA Experiment ID: 20000438 Result: Down-regulated in Transcription
  misc_feature: MA Experiment 20000438 PARAMETER Experiment Name: At_Shoots__P Parameter: Age (day) Value: 14
  misc_feature: MA Experiment 20000438 PARAMETER Experiment Name: At_Shoots__P Parameter: Tissue Value: Shoots vs. Whole Plant
  misc_feature: MA Experiment ID: 20000460 Result: Up-regulated in Transcription
  misc_feature: MA Experiment 20000460 PARAMETER Experiment Name: At_10percent_PEG_P Parameter: Age (day) Value: 12
  misc_feature: MA Experiment 20000460 PARAMETER Experiment Name: At_10percent_PEG_P Parameter: Organism Value: A. thaliana
  misc_feature: MA Experiment 20000460 PARAMETER Experiment Name: At_10percent_PEG_P Parameter: Plant Line Value: WS
  misc_feature: MA Experiment 20000460 PARAMETER Experiment Name: At_10percent_PEG_P Parameter: Timepoint (day) Value: 12
  misc_feature: MA Experiment 20000460 PARAMETER Experiment Name: At_10percent_PEG_P Parameter: Tissue Value: Whole Plant
  misc_feature: MA Experiment 20000460 PARAMETER Experiment Name: At_10percent_PEG_P Parameter: Treatment Value: 10percent PEG vs. No Treatment
  misc_feature: MA Experiment ID: 20000495 Result: Down-regulated in Transcription
  misc_feature: MA Experiment 20000495 PARAMETER Experiment Name: At_Guard_Cells_P Parameter: Harvest Date Value: 8/2/2002
  misc_feature: MA Experiment 20000495 PARAMETER Experiment Name: At_Guard_Cells_P Parameter: Organism Value: A. thaliana
  misc_feature: MA Experiment 20000495 PARAMETER Experiment Name: At_Guard_Cells_P Parameter: Tissue Value: Guard Cells vs. Leaves
  misc_feature: MA Experiment ID: 20001247 Result: Up-regulated in Transcription
  misc_feature: MA Experiment 20001247 PARAMETER Experiment Name: At_Far-red-induction_P Parameter: Age (day) Value: 7
  misc_feature: MA Experiment 20001247 PARAMETER Experiment Name: At_Far-red-induction_P Parameter: Light Value: Far-red vs. White
  misc_feature: MA Experiment 20001247 PARAMETER Experiment Name: At_Far-red-induction_P Parameter: Organism Value: A. thaliana
  misc_feature: MA Experiment 20001247 PARAMETER Experiment Name: At_Far-red-induction_P Parameter: Plant Line Value: Columbia
  misc_feature: MA Experiment 20001247 PARAMETER Experiment Name: At_Far-red-induction_P Parameter: Timepoint (hr) Value: 1
  misc_feature: MA Experiment 20001247 PARAMETER Experiment Name: At_Far-red-induction_P Parameter: Tissue Value: Whole Plant
  misc_feature: MA Experiment ID: 20001451 Result: Up-regulated in Transcription
  misc_feature: MA Experiment 20001451 PARAMETER Experiment Name: At_Far-red-induction_P Parameter: Age (day) Value: 7
  misc_feature: MA Experiment 20001451 PARAMETER Experiment Name: At_Far-red-induction_P Parameter: Light Value: Far-red vs. White
  misc_feature: MA Experiment 20001451 PARAMETER Experiment Name: At_Far-red-induction_P Parameter: Organism Value: A. thaliana
  misc_feature: MA Experiment 20001451 PARAMETER Experiment Name: At_Far-red-induction_P Parameter: Plant Line Value: Columbia
  misc_feature: MA Experiment 20001451 PARAMETER Experiment Name: At_Far-red-induction_P Parameter: Timepoint (hr) Value: 24
  misc_feature: MA Experiment 20001451 PARAMETER Experiment Name: At_Far-red-induction_P Parameter: Tissue Value: Whole Plant
  misc_feature: MA Experiment ID: 20001905 Result: Up-regulated in Transcription
  misc_feature: MA Experiment 20001905 PARAMETER Experiment Name: At_Drought_Reproduction_P Parameter: Age (day) Value: 40
  misc_feature: MA Experiment 20001905 PARAMETER Experiment Name: At_Drought_Reproduction_P Parameter: Organism Value: A. thaliana
  misc_feature: MA Experiment 20001905 PARAMETER Experiment Name: At_Drought_Reproduction_P Parameter: Plant Line Value: WS
  misc_feature: MA Experiment 20001905 PARAMETER Experiment Name: At_Drought_Reproduction_P Parameter: Timepoint (day) Value: 10
  misc_feature: MA Experiment 20001905 PARAMETER Experiment Name: At_Drought_Reproduction_P Parameter: Tissue Value: Rosettes
  misc_feature: MA Experiment 20001905 PARAMETER Experiment Name: At_Drought_Reproduction_P Parameter: Treatment Value: Drought vs. No Drought
atcgatcactgaatcttcttcttcttcttcttccttctctcaagaacaggtaaaactctctcctcttctccttctttttctctcctctctcttctctcttttaacaaaaaaaaactgtcttttcttcatttctgttctttttttggttgccgagaaaaacagaggataattttccgatatctgttttttttttctcggtgaccagaatcggttggttctgttttttttttttttttccttctttgttattgttatcttattaatgaatcttttttgttgttataatttacagattttttttaaacgagcttgatcaataaattctctcaagatctatggcggaagagcatcgatgtcagacaccagaaagcaaccgtctctgtgttaacaactgtggcttcctcggcagctccgccaccatgaatctctgttctaattgttacggcgatctttgtctcaaacaacaacaacaatcctcctccatcaaatccaccgttgaatcttccctctctgtatctcctccgtcgtcatcatcatcggagatctcttctccgatcatccctcctctccttaaaaatccatcagtcaagctagaggtaccggagaaaaaggcggtgatttcgctgccgacgacggagcagaatcagcaacagaggccgaatcggtgcacgacgtgtaggaaacgggtcgggttaaccggattcaagtgccggtgcggtacgatgttttgcggggttcataggtacccggagatccatggatgcagctacgatttcaaatcggccggacgtgaagagatcgcgaaagcgaatccgttggtgaaagcagcgaagcttcagaagatatgatcagagccgttcgatgcgttgacttttcctctcgtaagtcttcatttctacgcgtatgtgtgtcctccgtcccccgagaaatacggatggtgtcgatttgattgatctcagccgttggatcaaaaatggtttattattgtaaaagattgattatgtatttatcaaagggacacgtgtcacgtggttttaggatggagacgctttcgctttttctccttcattttattttctttttcctttcagaaagaaataagattattcgcgttggctttttctttt

SEQ ID NO: 73717 - protein, 170 aa, Arabidopsis thaliana; identical to SEQ ID NO: 48223
  peptide (1)..(170): Ceres Seq. ID no. 4975593
  misc_feature (111)..(151): Pfam Name: AN1-like Zinc finger Pfam Description: AN1-like Zinc finger
  misc_feature (1)..(170): Homolog of NCBI NO: 15231686 NR Description: zinc finger - like protein; protein id: supported by cDNA: gi_14596166 [Arabidopsis thaliana]
  misc_feature (1)..(170): Homolog of NCBI NO: 14596167 NR Description: zinc finger-like protein [Arabidopsis thaliana]
  misc_feature (1)..(170): Homolog of NCBI NO: 18404102 NR Description: expressed protein; protein id: At2g36320.1, by cDNA: 24255. [Arabidopsis thaliana] >gi|25408460|pir||C84779
  misc_feature (1)..(170): Homolog of NCBI NO: 15225894 NR Description: putative zinc finger protein; protein id: supported by cDNA: 14203., supported by cDNA: gi_18253038
  misc_feature (7)..(170): Homolog of NCBI NO: 18403408 NR Description: expressed protein; protein id: At1g51200.1, by cDNA: gi_15912334 [Arabidopsis thaliana]
  misc_feature (7)..(170): Homolog of NCBI NO: 25082726 NR Description: expressed protein [Arabidopsis thaliana]
  misc_feature (4)..(170): Homolog of NCBI NO: 35187687 NR Description: zinc-finger protein [Oryza sativa (indica
  misc_feature (14)..(169): Homolog of NCBI NO: 15235819 NR Description: similar to zinc finger - like protein; protein
  misc_feature (10)..(170): Homolog of NCBI NO: 15234402 NR Description: putative protein; protein id: At4g12040.1, by cDNA: 45., supported by cDNA: gi_13605498 [Arabidopsis
  misc_feature (3)..(170): Homolog of NCBI NO: 11361253 NR Description: hypothetical protein p85RF [imported] - Prunus

SEQ ID NO: 73718 - protein, 142 aa, Arabidopsis thaliana; identical to SEQ ID NO: 29088
  peptide (1)..(142): Ceres Seq. ID no. 4975594
  misc_feature (83)..(123): Pfam Name: AN1-like Zinc finger Pfam Description: AN1-like Zinc finger
  misc_feature (1)..(142): Homolog of NCBI NO: 15231686 NR Description: zinc finger - like protein; protein id: supported by cDNA: gi_14596166 [Arabidopsis thaliana]
  misc_feature (1)..(142): Homolog of NCBI NO: 14596167 NR Description: zinc finger-like protein [Arabidopsis thaliana]
  misc_feature (1)..(142): Homolog of NCBI NO: 18404102 NR Description: expressed protein; protein id: At2g36320.1, by cDNA: 24255. [Arabidopsis thaliana] >gi|25408460|pir||C84779
  misc_feature (1)..(142): Homolog of NCBI NO: 15225894 NR Description: putative zinc finger protein; protein id: supported by cDNA: 14203., supported by cDNA: gi_18253038
  misc_feature (1)..(142): Homolog of NCBI NO: 18403408 NR Description: expressed protein; protein id: At1g51200.1, by cDNA: gi_15912334 [Arabidopsis thaliana]
  misc_feature (1)..(142): Homolog of NCBI NO: 25082726 NR Description: expressed protein [Arabidopsis thaliana]
  misc_feature (1)..(142): Homolog of NCBI NO: 35187687 NR Description: zinc-finger protein [Oryza sativa (indica
  misc_feature (1)..(141): Homolog of NCBI NO: 15235819 NR Description: similar to zinc finger - like protein; protein
  misc_feature (1)..(142): Homolog of NCBI NO: 15234402 NR Description: putative protein; protein id: At4g12040.1, by cDNA: 45., supported by cDNA: gi_13605498 [Arabidopsis
  misc_feature (1)..(142): Homolog of NCBI NO: 11361253 NR Description: hypothetical protein p85RF [imported] - Prunus

SEQ ID NO: 73719 - DNA, 603 bp, Arabidopsis thaliana
  misc_feature (1)..(603): Ceres Seq. ID no. 4975943
  misc_feature: MA Experiment ID: 20000179 Result: Up-regulated in Transcription
  misc_feature: MA Experiment 20000179 PARAMETER Experiment Name: At_Germinating_Seeds_P Parameter: Age (hr) Value: 6 vs. 0
  misc_feature: MA Experiment 20000179 PARAMETER Experiment Name: At_Germinating_Seeds_P Parameter: Tissue Value: Germinating Seeds
  misc_feature: MA Experiment ID: 20000180 Result: Up-regulated in Transcription
  misc_feature: MA Experiment 20000180 PARAMETER Experiment Name: At_Germinating_Seeds_P Parameter: Age (hr) Value: 24 vs. 0
  misc_feature: MA Experiment 20000180 PARAMETER Experiment Name: At_Germinating_Seeds_P Parameter: Tissue Value: Germinating Seeds
  misc_feature: MA Experiment ID: 20000227 Result: Down-regulated in Transcription
  misc_feature: MA Experiment 20000227 PARAMETER Experiment Name: At_Root-Tips-vs-Tops_P Parameter: Tissue Value: Root Tips vs. Root Tops
  misc_feature: MA Experiment ID: 20000439 Result: Down-regulated in Transcription
  misc_feature: MA Experiment 20000439 PARAMETER Experiment Name: At_Roots__P Parameter: Age (day) Value: 14 vs. 21
  misc_feature: MA Experiment 20000439 PARAMETER Experiment Name: At_Roots__P Parameter: Organism Value: A. thaliana
  misc_feature: MA Experiment 20000439 PARAMETER Experiment Name: At_Roots__P Parameter: Tissue Value: Roots vs. Whole Plant
  misc_feature: MA Experiment ID: 20000496 Result: Down-regulated in Transcription
  misc_feature: MA Experiment 20000496 PARAMETER Experiment Name: At_Guard_Cells_P Parameter: Harvest Date Value: 7/19/2002
  misc_feature: MA Experiment 20000496 PARAMETER Experiment Name: At_Guard_Cells_P Parameter: Organism Value: Canola
  misc_feature: MA Experiment 20000496 PARAMETER Experiment Name: At_Guard_Cells_P Parameter: Tissue Value: Guard Cells vs. Leaves
  misc_feature: MA Experiment ID: 20001248 Result: Down-regulated in Transcription
  misc_feature: MA Experiment 20001248 PARAMETER Experiment Name: At_Far-red-induction_P Parameter: Age (day) Value: 7
  misc_feature: MA Experiment 20001248 PARAMETER Experiment Name: At_Far-red-induction_P Parameter: Light Value: Far-red vs. White
  misc_feature: MA Experiment 20001248 PARAMETER Experiment Name: At_Far-red-induction_P Parameter: Organism Value: A. thaliana
  misc_feature: MA Experiment 20001248 PARAMETER Experiment Name: At_Far-red-induction_P Parameter: Plant Line Value: Columbia
  misc_feature: MA Experiment 20001248 PARAMETER Experiment Name: At_Far-red-induction_P Parameter: Timepoint (hr) Value: 4
  misc_feature: MA Experiment 20001248 PARAMETER Experiment Name: At_Far-red-induction_P Parameter: Tissue Value: Whole Plant
  misc_feature: MA Experiment ID: 20001557 Result: Down-regulated in Transcription
  misc_feature: MA Experiment 20001557 PARAMETER Experiment Name: At_Drought_Soil_Dry_P Parameter: Age (day) Value: 27
  misc_feature: MA Experiment 20001557 PARAMETER Experiment Name: At_Drought_Soil_Dry_P Parameter: Organism Value: A. thaliana
  misc_feature: MA Experiment 20001557 PARAMETER Experiment Name: At_Drought_Soil_Dry_P Parameter: Plant Line Value: WS
  misc_feature: MA Experiment 20001557 PARAMETER Experiment Name: At_Drought_Soil_Dry_P Parameter: Post Timepoint (hr) Value: 3
  misc_feature: MA Experiment 20001557 PARAMETER Experiment Name: At_Drought_Soil_Dry_P Parameter: Post-Treatment Value: Re-Water vs. No Drought
  misc_feature: MA Experiment 20001557 PARAMETER Experiment Name: At_Drought_Soil_Dry_P Parameter: Timepoint (day) Value: 13
  misc_feature: MA Experiment 20001557 PARAMETER Experiment Name: At_Drought_Soil_Dry_P Parameter: Treatment Value: Drought vs. No Drought
  misc_feature: MA Experiment ID: 20001558 Result: Down-regulated in Transcription
  misc_feature: MA Experiment 20001558 PARAMETER Experiment Name: At_Drought_Soil_Dry_P Parameter: Age (day) Value: 27
  misc_feature: MA Experiment 20001558 PARAMETER Experiment Name: At_Drought_Soil_Dry_P Parameter: Organism Value: A. thaliana
  misc_feature: MA Experiment 20001558 PARAMETER Experiment Name: At_Drought_Soil_Dry_P Parameter: Plant Line Value: WS
  misc_feature: MA Experiment 20001558 PARAMETER Experiment Name: At_Drought_Soil_Dry_P Parameter: Post Timepoint (hr) Value: 6
  misc_feature: MA Experiment 20001558 PARAMETER Experiment Name: At_Drought_Soil_Dry_P Parameter: Post-Treatment Value: Re-Water vs. No Drought
  misc_feature: MA Experiment 20001558 PARAMETER Experiment Name: At_Drought_Soil_Dry_P Parameter: Timepoint (day) Value: 13
  misc_feature: MA Experiment 20001558 PARAMETER Experiment Name: At_Drought_Soil_Dry_P Parameter: Treatment Value: Drought vs. No Drought
atgtcgtttgggtctctcgtgcttccatctccaccttcctccttgtctgcaaatgtcaagcatttcaatggctacggtaggcttaatcgtaatctcgtgcgagcttcttcgtccgatgttcccgatttcctctctgccgattggttggagagccgtaggaaacgaccttttggccccagacttgattttagtgcagaagacgctgttcgacatcagcttgatgcattgaagtataatgaccatcctcgtgatgattatggcattgaggtcatgtatcggtttgctggattcgatccatttgagagatccacctatttcggtcctttctttgatcttggacagtttgaaaggtttaggcgtatttttcatcactcgtcttaccgtgtgttgcttggtcacaaggatagaaaacttttaagcagtttgttcgtggaggagaatcgtttcaagcagaggatctggattcagggaaatcgacctgaagaggaagagatatttgaattcacaatgttccagcgaataggcggttcatgggatggatattggttgacagaaagcttgcttcatgacggagatgtgttttcaggagggatggcttactga

SEQ ID NO: 73720 - protein, 200 aa, Arabidopsis thaliana
  peptide (1)..(200): Ceres Seq. ID no. 4975944
  misc_feature (1)..(200): Homolog of NCBI NO: 30682820 NR Description: expressed protein [Arabidopsis thaliana]
MSFGSLVLPSPPSSLSANVKHFNGYGRLNRNLVRASSSDVPDFLSADWLESRRKRPFGPRLDFSAEDAVRHQLDALKYNDHPRDDYGIEVMYRFAGFDPFERSTYFGPFFDLGQFERFRRIFHHSSYRVLLGHKDRKLLSSLFVEENRFKQRIWIQGNRPEEEEIFEFTMFQRIGGSWDGYWLTESLLHDGDVFSGGMAY

SEQ ID NO: 73721 - protein, 110 aa, Arabidopsis thaliana
  peptide (1)..(110): Ceres Seq. ID no. 4975945
  misc_feature (1)..(110): Homolog of NCBI NO: 30682820 NR Description: expressed protein [Arabidopsis thaliana]
MYRFAGFDPFERSTYFGPFFDLGQFERFRRIFHHSSYRVLLGHKDRKLLSSLFVEENRFKQRIWIQGNRPEEEEIFEFTMFQRIGGSWDGYWLTESLLHDGDVFSGGMAY

SEQ ID NO: 73722 - DNA, 1488 bp, Arabidopsis thaliana
  misc_feature (1)..(1488): Ceres Seq. ID no. 4976003
atgacccagatgcaggaacctaatgttttcgtctacaacgcgttgtttaaaggcttcgttacttgttctcacccgattcgatctctggaattgtatgttcgtatgctcagggactcggtttctccatcaagctacacgtactcttcactagtaaaggcgtcttctttcgcttctaggtttggggaatcactccaggcgcacatctggaaatttggatttggtttccatgttaaaattcagacgactcttattgatttttattcagccactggtagaatcagggaagccaggaaagtgtttgatgaaatgcctgaaagagatgatattgcttggaccacaatggtttctgcttatcgtcgggttttggatatggactctgcgaattctttagctaaccaaatgtcggagaagaatgaggctacgtcgaactgtttgattaatggatatatgggattaggcaatctggaacaagcagagtcattgtttaatcagatgcctgtgaaggacataatctcatggaccactatgatcaagggttactcgcagaataaaagatatagagaagcaattgcagtgttctacaaaatgatggaggagggcatcattcctgatgaggttactatgtcaactgttatttcagcttgtgcccatctcggcgtgctggaaataggtaaggaggttcatatgtacacgttacagaacggttttgttcttgatgtctacattggttctgcactggtagatatgtattccaaatgtggtagcttagagcgggcgcttctggtgttcttcaatttgcccaaaaagaatctattttgttggaattcgatcattgaaggactggcggctcatggttttgcacaagaagcactgaaaatgtttgccaagatggagatggagtcggtgaaacctaacgcagtcacttttgtgagtgtttttactgcgtgtactcacgcaggtcttgttgacgaaggtcggaggatatatcgcagcatgattgatgactattccattgtctctaatgttgaacattacggaggcatggttcatctattcagcaaagctgggttgatctatgaggctcttgaattgattggaaatatggaatttgaaccaaatgcggttatctggggggccttgcttgatgggtgcagaattcacaagaatctcgtgatagctgaaatagcgtttaacaaactgatggttttggagccgatgaatagtgggtattatttccttttagttagcatgtatgcagaacaaaacaggtggagagatgttgcagagattaggggaaggatgagagagttgggtatagaaaagatatgtcctgggacaagttcgattcggatagataaacgagaccatctgtttgctgcagctgataagtctcactcagcttcagatgaggtttgcttgctgcttgatgagatatatgatcagatgggattagctggatatgtgcaggaaactgagaatgtatattaa

SEQ ID NO: 73723 - protein, 495 aa, Arabidopsis thaliana
  peptide (1)..(495): Ceres Seq. ID no. 4976004
  misc_feature (343)..(377): Pfam Name: PPR repeat Pfam Description: PPR repeat
  misc_feature (1)..(495): Homolog of NCBI NO: 15221401 NR Description: hypothetical protein; protein id: At1g06150.1
  misc_feature (1)..(495): Homolog of NCBI NO: 25406897 NR Description: hypothetical protein [imported] - Arabidopsis >gi|8810477|gb|AAF80138.1|AC024174_20 Contains similarity to an protein T5J8.5 gi|4263522 from Arabidopsis thaliana BAC
  misc_feature (12)..(494): Homolog of NCBI NO: 15235498 NR Description: hypothetical protein; protein id: At4g02750.1
  misc_feature (136)..(494): Homolog of NCBI NO: 30694644 NR Description: pentatricopeptide (PPR) repeat-containing protein
  misc_feature (136)..(494): Homolog of NCBI NO: 30794008 NR Description: unknown protein [Arabidopsis thaliana]
  misc_feature (23)..(161): Homolog of NCBI NO: 30694644 NR Description: pentatricopeptide (PPR) repeat-containing protein
  misc_feature (23)..(161): Homolog of NCBI NO: 30794008 NR Description: unknown protein [Arabidopsis thaliana]
  misc_feature (91)..(480): Homolog of NCBI NO: 15228653 NR Description: hypothetical protein; protein id: At3g29230.1 thaliana] >gi|9293916|dbj|BAB01819.1|
  misc_feature (53)..(495): Homolog of NCBI NO: 34899166 NR Description: similar to selenium-binding protein [Oryza sativa
  misc_feature (136)..(494): Homolog of NCBI NO: 11281371 NR Description: hypothetical protein T8H10.30 - Arabidopsis >gi|6706414|emb|CAB66100.1| putative protein [Arabidopsis
MTQMQEPNVFVYNALFKGFVTCSHPIRSLELYVRMLRDSVSPSSYTYSSLVKASSFASRFGESLQAHIWKFGFGFHVKIQTTLIDFYSATGRIREARKVFDEMPERDDIAWTTMVSAYRRVLDMDSANSLANQMSEKNEATSNCLINGYMGLGNLEQAESLFNQMPVKDIISWTTMIKGYSQNKRYREAIAVFYKMMEEGIIPDEVTMSTVISACAHLGVLEIGKEVHMYTLQNGFVLDVYIGSALVDMYSKCGSLERALLVFFNLPKKNLFCWNSIIEGLAAHGFAQEALKMFAKMEMESVKPNAVTFVSVFTACTHAGLVDEGRRIYRSMIDDYSIVSNVEHYGGMVHLFSKAGLIYEALELIGNMEFEPNAVIWGALLDGCRIHKNLVIAEIAFNKLMVLEPMNSGYYFLLVSMYAEQNRWRDVAEIRGRMRELGIEKICPGTSSIRIDKRDHLFAAADKSHSASDEVCLLLDEIYDQMGLAGYVQETENVY

SEQ ID NO: 73724 - protein, 492 aa, Arabidopsis thaliana
  peptide (1)..(492): Ceres Seq. ID no. 4976005
  misc_feature (340)..(374): Pfam Name: PPR repeat Pfam Description: PPR repeat
  misc_feature (1)..(492): Homolog of NCBI NO: 15221401 NR Description: hypothetical protein; protein id: At1g06150.1
  misc_feature (1)..(492): Homolog of NCBI NO: 25406897 NR Description: hypothetical protein [imported] - Arabidopsis >gi|8810477|gb|AAF80138.1|AC024174_20 Contains similarity to an protein T5J8.5 gi|4263522 from Arabidopsis thaliana BAC
  misc_feature (9)..(491): Homolog of NCBI NO: 15235498 NR Description: hypothetical protein; protein id: At4g02750.1
  misc_feature (133)..(491): Homolog of NCBI NO: 30694644 NR Description: pentatricopeptide (PPR) repeat-containing protein
  misc_feature (133)..(491): Homolog of NCBI NO: 30794008 NR Description: unknown protein [Arabidopsis thaliana]
  misc_feature (20)..(158): Homolog of NCBI NO: 30694644 NR Description: pentatricopeptide (PPR) repeat-containing protein
  misc_feature (20)..(158): Homolog of NCBI NO: 30794008 NR Description: unknown protein [Arabidopsis thaliana]
  misc_feature (88)..(477): Homolog of NCBI NO: 15228653 NR Description: hypothetical protein; protein id: At3g29230.1 thaliana] >gi|9293916|dbj|BAB01819.1|
  misc_feature (50)..(492): Homolog of NCBI NO: 34899166 NR Description: similar to selenium-binding protein [Oryza sativa
  misc_feature (133)..(491): Homolog of NCBI NO: 11281371 NR Description: hypothetical protein T8H10.30 - Arabidopsis >gi|6706414|emb|CAB66100.1| putative protein [Arabidopsis
MQEPNVFVYNALFKGFVTCSHPIRSLELYVRMLRDSVSPSSYTYSSLVKASSFASRFGESLQAHIWKFGFGFHVKIQTTLIDFYSATGRIREARKVFDEMPERDDIAWTTMVSAYRRVLDMDSANSLANQMSEKNEATSNCLINGYMGLGNLEQAESLFNQMPVKDIISWTTMIKGYSQNKRYREAIAVFYKMMEEGIIPDEVTMSTVISACAHLGVLEIGKEVHMYTLQNGFVLDVYIGSALVDMYSKCGSLERALLVFFNLPKKNLFCWNSIIEGLAAHGFAQEALKMFAKMEMESVKPNAVTFVSVFTACTHAGLVDEGRRIYRSMIDDYSIVSNVEHYGGMVHLFSKAGLIYEALELIGNMEFEPNAVIWGALLDGCRIHKNLVIAEIAFNKLMVLEPMNSGYYFLLVSMYAEQNRWRDVAEIRGRMRELGIEKICPGTSSIRIDKRDHLFAAADKSHSASDEVCLLLDEIYDQMGLAGYVQETENVY

SEQ ID NO: 73725 - protein, 461 aa, Arabidopsis thaliana
  peptide (1)..(461): Ceres Seq. ID no. 4976006
  misc_feature (309)..(343): Pfam Name: PPR repeat Pfam Description: PPR repeat
  misc_feature (1)..(461): Homolog of NCBI NO: 15221401 NR Description: hypothetical protein; protein id: At1g06150.1
  misc_feature (1)..(461): Homolog of NCBI NO: 25406897 NR Description: hypothetical protein [imported] - Arabidopsis >gi|8810477|gb|AAF80138.1|AC024174_20 Contains similarity to an protein T5J8.5 gi|4263522 from Arabidopsis thaliana BAC
  misc_feature (1)..(460): Homolog of NCBI NO: 15235498 NR Description: hypothetical protein; protein id: At4g02750.1
  misc_feature (102)..(460): Homolog of NCBI NO: 30694644 NR Description: pentatricopeptide (PPR) repeat-containing protein
  misc_feature (102)..(460): Homolog of NCBI NO: 30794008 NR Description: unknown protein [Arabidopsis thaliana]
  misc_feature (1)..(127): Homolog of NCBI NO: 30694644 NR Description: pentatricopeptide (PPR) repeat-containing protein
  misc_feature (1)..(127): Homolog of NCBI NO: 30794008 NR Description: unknown protein [Arabidopsis thaliana]
  misc_feature (57)..(446): Homolog of NCBI NO: 15228653 NR Description: hypothetical protein; protein id: At3g29230.1 thaliana] >gi|9293916|dbj|BAB01819.1|
  misc_feature (19)..(461): Homolog of NCBI NO: 34899166 NR Description: similar to selenium-binding protein [Oryza sativa
  misc_feature (102)..(460): Homolog of NCBI NO: 11281371 NR Description: hypothetical protein T8H10.30 - Arabidopsis >gi|6706414|emb|CAB66100.1| putative protein [Arabidopsis
MLRDSVSPSSYTYSSLVKASSFASRFGESLQAHIWKFGFGFHVKIQTTLIDFYSATGRIREARKVFDEMPERDDIAWTTMVSAYRRVLDMDSANSLANQMSEKNEATSNCLINGYMGLGNLEQAESLFNQMPVKDIISWTTMIKGYSQNKRYREAIAVFYKMMEEGIIPDEVTMSTVISACAHLGVLEIGKEVHMYTLQNGFVLDVYIGSALVDMYSKCGSLERALLVFFNLPKKNLFCWNSIIEGLAAHGFAQEALKMFAKMEMESVKPNAVTFVSVFTACTHAGLVDEGRRIYRSMIDDYSIVSNVEHYGGMVHLFSKAGLIYEALELIGNMEFEPNAVIWGALLDGCRIHKNLVIAEIAFNKLMVLEPMNSGYYFLLVSMYAEQNRWRDVAEIRGRMRELGIEKICPGTSSIRIDKRDHLFAAADKSHSASDEVCLLLDEIYDQMGLAGYVQETENVY

SEQ ID NO: 73726 - DNA, 921 bp, Arabidopsis thaliana
  misc_feature (1)..(921): Ceres Seq. ID no. 4976097
  misc_feature: MA Experiment ID: 108435 Result: Down-regulated in Transcription
  misc_feature: MA Experiment 108435 PARAMETER Experiment Name: At_stm_Mutants_cDNA_P Parameter: Plant Line Value: wt Landsburg vs stm
  misc_feature: MA Experiment 108435 PARAMETER Experiment Name: At_stm_Mutants_cDNA_P Parameter: Tissue Value: Shoot Apical Meristem Region
  misc_feature: MA Experiment ID: 108461 Result: Up-regulated in Transcription
  misc_feature: MA Experiment 108461 PARAMETER Experiment Name: At_Germinating_Seeds_cDNA_P Parameter: Age (day) Value: 1 vs. 0
  misc_feature: MA Experiment 108461 PARAMETER Experiment Name: At_Germinating_Seeds_cDNA_P Parameter: Tissue Value: Germinating Seeds
  misc_feature: MA Experiment ID: 108462 Result: Up-regulated in Transcription
  misc_feature: MA Experiment 108462 PARAMETER Experiment Name: At_Germinating_Seeds_cDNA_P Parameter: Age (day) Value: 2 vs. 0
  misc_feature: MA Experiment 108462 PARAMETER Experiment Name: At_Germinating_Seeds_cDNA_P Parameter: Tissue Value: Germinating Seeds
  misc_feature: MA Experiment ID: 108463 Result: Up-regulated in Transcription
  misc_feature: MA Experiment 108463 PARAMETER Experiment Name: At_Germinating_Seeds_cDNA_P Parameter: Age (day) Value: 3 vs. 0
  misc_feature: MA Experiment 108463 PARAMETER Experiment Name: At_Germinating_Seeds_cDNA_P Parameter: Tissue Value: Germinating Seeds
  misc_feature: MA Experiment ID: 108576 Result: Down-regulated in Transcription
  misc_feature: MA Experiment 108576 PARAMETER Experiment Name: At_42deg_Heat_cDNA_P Parameter: Temperature (deg C) Value: 42 vs. 22
  misc_feature: MA Experiment 108576 PARAMETER Experiment Name: At_42deg_Heat_cDNA_P Parameter: Timepoint (hr) Value: 1
  misc_feature: MA Experiment 108576 PARAMETER Experiment Name: At_42deg_Heat_cDNA_P Parameter: Tissue Value: Aerial
  misc_feature: MA Experiment ID: 108577 Result: Down-regulated in Transcription
  misc_feature: MA Experiment 108577 PARAMETER Experiment Name: At_42deg_Heat_cDNA_P Parameter: Temperature (deg C) Value: 42 vs. 22
  misc_feature: MA Experiment 108577 PARAMETER Experiment Name: At_42deg_Heat_cDNA_P Parameter: Timepoint (hr) Value: 6
  misc_feature: MA Experiment 108577 PARAMETER Experiment Name: At_42deg_Heat_cDNA_P Parameter: Tissue Value: Aerial
  misc_feature: MA Experiment ID: 108595 Result: Down-regulated in Transcription
  misc_feature: MA Experiment 108595 PARAMETER Experiment Name: At_Ler-pi_Ovule_cDNA_P Parameter: Plant Line Value: null
  misc_feature: MA Experiment ID: 20000111 Result: Down-regulated in Transcription
  misc_feature: MA Experiment 20000111 PARAMETER Experiment Name: At_42deg_Heat_cDNA_P Parameter: Temperature (deg C) Value: 42 vs. 22
  misc_feature: MA Experiment 20000111 PARAMETER Experiment Name: At_42deg_Heat_cDNA_P Parameter: Timepoint (hr) Value: 6
  misc_feature: MA Experiment 20000111 PARAMETER Experiment Name: At_42deg_Heat_cDNA_P Parameter: Tissue Value: Aerial
  misc_feature: MA Experiment ID: 20000173 Result: Down-regulated in Transcription
  misc_feature: MA Experiment 20000173 PARAMETER Experiment Name: At_42deg_Heat_P Parameter: Age (day) Value: 14
  misc_feature: MA Experiment 20000173 PARAMETER Experiment Name: At_42deg_Heat_P Parameter: Organism Value: A. thaliana
  misc_feature: MA Experiment 20000173 PARAMETER Experiment Name: At_42deg_Heat_P Parameter: Plant Line Value: WS
  misc_feature: MA Experiment 20000173 PARAMETER Experiment Name: At_42deg_Heat_P Parameter: Temperature (deg C) Value: 42 vs. 22
  misc_feature: MA Experiment 20000173 PARAMETER Experiment Name: At_42deg_Heat_P Parameter: Timepoint (hr) Value: 6
  misc_feature: MA Experiment 20000173 PARAMETER Experiment Name: At_42deg_Heat_P Parameter: Tissue Value: Aerial
  misc_feature: MA Experiment ID: 20000235 Result: Up-regulated in Transcription
  misc_feature: MA Experiment 20000235 PARAMETER Experiment Name: At_Siliques_P Parameter: Age (day) Value: 21
  misc_feature: MA Experiment 20000235 PARAMETER Experiment Name: At_Siliques_P Parameter: Organism Value: A. thaliana
  misc_feature: MA Experiment 20000235 PARAMETER Experiment Name: At_Siliques_P Parameter: Plant Line Value: WS
  misc_feature: MA Experiment 20000235 PARAMETER Experiment Name: At_Siliques_P Parameter: Tissue Value: 5-10mm Siliques vs. Whole Plant
  misc_feature: MA Experiment ID: 20000438 Result: Up-regulated in Transcription
  misc_feature: MA Experiment 20000438 PARAMETER Experiment Name: At_Shoots__P Parameter: Age (day) Value: 14
  misc_feature: MA Experiment 20000438 PARAMETER Experiment Name: At_Shoots__P Parameter: Tissue Value: Shoots vs. Whole Plant
  misc_feature: MA Experiment ID: 20001248 Result: Down-regulated in Transcription
  misc_feature: MA Experiment 20001248 PARAMETER Experiment Name: At_Far-red-induction_P Parameter: Age (day) Value: 7
  misc_feature: MA Experiment 20001248 PARAMETER Experiment Name: At_Far-red-induction_P Parameter: Light Value: Far-red vs. White
  misc_feature: MA Experiment 20001248 PARAMETER Experiment Name: At_Far-red-induction_P Parameter: Organism Value: A. thaliana
  misc_feature: MA Experiment 20001248 PARAMETER Experiment Name: At_Far-red-induction_P Parameter: Plant Line Value: Columbia
  misc_feature: MA Experiment 20001248 PARAMETER Experiment Name: At_Far-red-induction_P Parameter: Timepoint (hr) Value: 4
  misc_feature: MA Experiment 20001248 PARAMETER Experiment Name: At_Far-red-induction_P Parameter: Tissue Value: Whole Plant
  misc_feature: MA Experiment ID: 20001451 Result: Down-regulated in Transcription
  misc_feature: MA Experiment 20001451 PARAMETER Experiment Name: At_Far-red-induction_P Parameter: Age (day) Value: 7
  misc_feature: MA Experiment 20001451 PARAMETER Experiment Name: At_Far-red-induction_P Parameter: Light Value: Far-red vs. White
  misc_feature: MA Experiment 20001451 PARAMETER Experiment Name: At_Far-red-induction_P Parameter: Organism Value: A. thaliana
  misc_feature: MA Experiment 20001451 PARAMETER Experiment Name: At_Far-red-induction_P Parameter: Plant Line Value: Columbia
  misc_feature: MA Experiment 20001451 PARAMETER Experiment Name: At_Far-red-induction_P Parameter: Timepoint (hr) Value: 24
  misc_feature: MA Experiment 20001451 PARAMETER Experiment Name: At_Far-red-induction_P Parameter: Tissue Value: Whole Plant
  misc_feature: MA Experiment ID: 20001905 Result: Down-regulated in Transcription
  misc_feature: MA Experiment 20001905 PARAMETER Experiment Name: At_Drought_Reproduction_P Parameter: Age (day) Value: 40
  misc_feature: MA Experiment 20001905 PARAMETER Experiment Name: At_Drought_Reproduction_P Parameter: Organism Value: A. thaliana
  misc_feature: MA Experiment 20001905 PARAMETER Experiment Name: At_Drought_Reproduction_P Parameter: Plant Line Value: WS
  misc_feature: MA Experiment 20001905 PARAMETER Experiment Name: At_Drought_Reproduction_P Parameter: Timepoint (day) Value: 10
  misc_feature: MA Experiment 20001905 PARAMETER Experiment Name: At_Drought_Reproduction_P Parameter: Tissue Value: Rosettes
  misc_feature: MA Experiment 20001905 PARAMETER Experiment Name: At_Drought_Reproduction_P Parameter: Treatment Value: Drought vs. No Drought
atggctaaagtagaacagagcagatggattcttcaaggcatgaccgctcttgtcaccggcggaacgaaagacattgggtttgtcttccatcatcactttccaaaaatggctaagacaggggaaagcttgagagacaaacctagatggagtcttgtaggcatgaccgctcttgtcaccggtggctcaaaaggcatcggagaagctgtggttgaggaactagctacgttaggggcaagaatccacacatgtgccagagacgaaactcagcttcaagaaagcttacgtaagtggcaagcaaaagggtttcaggttaccacttctgtctgcgacgtttcttctcgtgataaacgagagaagctcatggaaaccgtttccactatcttcgaaggaaaactcaacatacttgtcaacaatgtgggaacgtgtatagtcaaaccgaccttacaacatacagccgaagatttctcatttacaatggcaacgaatctcgagtcagcttttcatctctcgcagctcgcgcatcctttgttgaaagcttctggttcagggagcatcgtgctcatctcctccgtatctggagttgtacatgtcaatggtgcatccatatatggagtatctaaaggagctatgaatcagctaggaagaaacttagcgtgcgagtgggcaagtgacaacataaggactaactctgtgtgtccatggttcatagaaactcctttagttaccgaaagtcttagtaatgaggagtttagaaaagaagtggagagtagaccaccaatgggacgtgttggagaagtaaatgaagtatcatcgcttgtggcatttctttgtcttcctgcagcttcttatattacaggtcaaaccatttgtgttgatggaggtttcactgttaatggtttctctttcaagcctctgccttaa

SEQ ID NO: 73727 - protein, 306 aa, Arabidopsis thaliana
  peptide (1)..(306): Ceres Seq. ID no. 4976098
  misc_feature (36)..(306): Homolog of NCBI NO: 15227076 NR Description: putative tropinone reductase; protein id: supported by cDNA: 2618., supported by cDNA: gi_15010623, by cDNA: gi_19699255 [Arabidopsis thaliana]
  misc_feature (36)..(306): Homolog of NCBI NO: 21554716 NR Description: putative tropinone reductase [Arabidopsis
  misc_feature (45)..(304): Homolog of NCBI NO: 15227069 NR Description: putative tropinone reductase; protein id: [Arabidopsis thaliana] >gi|25283126|pir||E84694 probable
  misc_feature (8)..(26): Homolog of NCBI NO: 15227069 NR Description: putative tropinone reductase; protein id: [Arabidopsis thaliana] >gi|25283126|pir||E84694 probable
  misc_feature (36)..(304): Homolog of NCBI NO: 15227040 NR Description: putative tropinone reductase; protein id: [Arabidopsis thaliana] >gi|25283124|pir||B84693 probable
  misc_feature (36)..(306): Homolog of NCBI NO: 15227075 NR Description: putative tropinone reductase; protein id: supported by cDNA: 14555., supported by cDNA: gi_17473659, by cDNA: gi_20148626 [Arabidopsis thaliana]
  misc_feature (36)..(305): Homolog of NCBI NO: 15227043 NR Description: putative tropinone reductase; protein id: [Arabidopsis thaliana] >gi|25283125|pir||C84693 probable
  misc_feature (36)..(301): Homolog of NCBI NO: 25283134 NR Description: probable tropinone reductase [imported] - thaliana >gi|3980398|gb|AAC95201.1| putative tropinone reductase
  misc_feature (140)..(306): Homolog of NCBI NO: 6457349 NR Description: short chain alcohol dehydrogenase [Arabidopsis
  misc_feature (36)..(136): Homolog of NCBI NO: 6457349 NR Description: short chain alcohol dehydrogenase [Arabidopsis
MAKVEQSRWILQGMTALVTGGTKDIGFVFHHHFPKMAKTGESLRDKPRWSLVGMTALVTGGSKGIGEAVVEELATLGARIHTCARDETQLQESLRKWQAKGFQVTTSVCDVSSRDKREKLMETVSTIFEGKLNILVNNVGTCIVKPTLQHTAEDFSFTMATNLESAFHLSQLAHPLLKASGSGSIVLISSVSGVVHVNGASIYGVSKGAMNQLGRNLACEWASDNIRTNSVCPWFIETPLVTESLSNEEFRKEVESRPPMGRVGEVNEVSSLVAFLCLPAASYITGQTICVDGGFTVNGFSFKPLP

SEQ ID NO: 73728 - protein, 293 aa, Arabidopsis thaliana
  peptide (1)..(293): Ceres Seq. ID no. 4976099
  misc_feature (23)..(293): Homolog of NCBI NO: 15227076 NR Description: putative tropinone reductase; protein id: supported by cDNA: 2618., supported by cDNA: gi_15010623, by cDNA: gi_19699255 [Arabidopsis thaliana]
  misc_feature (23)..(293): Homolog of NCBI NO: 21554716 NR Description: putative tropinone reductase [Arabidopsis
  misc_feature (32)..(291): Homolog of NCBI NO: 15227069 NR Description: putative tropinone reductase; protein id: [Arabidopsis thaliana] >gi|25283126|pir||E84694 probable
  misc_feature (1)..(13): Homolog of NCBI NO: 15227069 NR Description: putative tropinone reductase; protein id: [Arabidopsis thaliana] >gi|25283126|pir||E84694 probable
  misc_feature (23)..(291): Homolog of NCBI NO: 15227040 NR Description: putative tropinone reductase; protein id: [Arabidopsis thaliana] >gi|25283124|pir||B84693 probable
  misc_feature (23)..(293): Homolog of NCBI NO: 15227075 NR Description: putative tropinone reductase; protein id: supported by cDNA: 14555., supported by cDNA: gi_17473659, by cDNA: gi_20148626 [Arabidopsis thaliana]
  misc_feature (23)..(292): Homolog of NCBI NO: 15227043 NR Description: putative tropinone reductase; protein id: [Arabidopsis thaliana] >gi|25283125|pir||C84693 probable
  misc_feature (23)..(288): Homolog of NCBI NO: 25283134 NR Description: probable tropinone reductase [imported] - thaliana >gi|3980398|gb|AAC95201.1| putative tropinone reductase
  misc_feature (127)..(293): Homolog of NCBI NO: 6457349 NR Description: short chain alcohol dehydrogenase [Arabidopsis
  misc_feature (23)..(123): Homolog of NCBI NO: 6457349 NR Description: short chain alcohol dehydrogenase [Arabidopsis
MTALVTGGTKDIGFVFHHHFPKMAKTGESLRDKPRWSLVGMTALVTGGSKGIGEAVVEELATLGARIHTCARDETQLQESLRKWQAKGFQVTTSVCDVSSRDKREKLMETVSTIFEGKLNILVNNVGTCIVKPTLQHTAEDFSFTMATNLESAFHLSQLAHPLLKASGSGSIVLISSVSGVVHVNGASIYGVSKGAMNQLGRNLACEWASDNIRTNSVCPWFIETPLVTESLSNEEFRKEVESRPPMGRVGEVNEVSSLVAFLCLPAASYITGQTICVDGGFTVNGFSFKPLP

SEQ ID NO: 73729 - protein, 271 aa, Arabidopsis thaliana; identical to SEQ ID NO: 26384
  peptide (1)..(271): Ceres Seq. ID no. 4976100
  misc_feature (1)..(271): Homolog of NCBI NO: 15227076 NR Description: putative tropinone reductase; protein id: supported by cDNA: 2618., supported by cDNA: gi_15010623, by cDNA: gi_19699255 [Arabidopsis thaliana]
  misc_feature (1)..(271): Homolog of NCBI NO: 21554716 NR Description: putative tropinone reductase [Arabidopsis
  misc_feature (10)..(269): Homolog of NCBI NO: 15227069 NR Description: putative tropinone reductase; protein id: [Arabidopsis thaliana] >gi|25283126|pir||E84694 probable
  misc_feature (1)..(269): Homolog of NCBI NO: 15227040 NR Description: putative tropinone reductase; protein id: [Arabidopsis thaliana] >gi|25283124|pir||B84693 probable
  misc_feature (1)..(271): Homolog of NCBI NO: 15227075 NR Description: putative tropinone reductase; protein id: supported by cDNA: 14555., supported by cDNA: gi_17473659, by cDNA: gi_20148626 [Arabidopsis thaliana]
  misc_feature (1)..(270): Homolog of NCBI NO: 15227043 NR Description: putative tropinone reductase; protein id: [Arabidopsis thaliana] >gi|25283125|pir||C84693 probable
  misc_feature (1)..(266): Homolog of NCBI NO: 25283134 NR Description: probable tropinone reductase [imported] - thaliana >gi|3980398|gb|AAC95201.1| putative tropinone reductase
  misc_feature (105)..(271): Homolog of NCBI NO: 6457349 NR Description: short chain alcohol dehydrogenase [Arabidopsis
  misc_feature (1)..(101): Homolog of NCBI NO: 6457349 NR Description: short chain alcohol dehydrogenase [Arabidopsis
  misc_feature (10)..(269): Homolog of NCBI NO: 15222400 NR Description: tropinone reductase-I, putative; protein id:

SEQ ID NO: 73730 - DNA, 1368 bp, Arabidopsis thaliana
  misc_feature (1)..(1368): Ceres Seq. ID no. 4976157
  misc_feature: MA Experiment ID: 20000173 Result: Down-regulated in Transcription
  misc_feature: MA Experiment 20000173 PARAMETER Experiment Name: At_42deg_Heat_P Parameter: Age (day) Value: 14
  misc_feature: MA Experiment 20000173 PARAMETER Experiment Name: At_42deg_Heat_P Parameter: Organism Value: A. thaliana
  misc_feature: MA Experiment 20000173 PARAMETER Experiment Name: At_42deg_Heat_P Parameter: Plant Line Value: WS
  misc_feature: MA Experiment 20000173 PARAMETER Experiment Name: At_42deg_Heat_P Parameter: Temperature (deg C) Value: 42 vs. 22
  misc_feature: MA Experiment 20000173 PARAMETER Experiment Name: At_42deg_Heat_P Parameter: Timepoint (hr) Value: 6
  misc_feature: MA Experiment 20000173 PARAMETER Experiment Name: At_42deg_Heat_P Parameter: Tissue Value: Aerial
  misc_feature: MA Experiment ID: 20000185 Result: Down-regulated in Transcription
  misc_feature: MA Experiment 20000185 PARAMETER Experiment Name: At_Roots__P Parameter: Age (day) Value: 7 vs. 21
  misc_feature: MA Experiment 20000185 PARAMETER Experiment Name: At_Roots__P Parameter: Organism Value: A. thaliana
  misc_feature: MA Experiment 20000185 PARAMETER Experiment Name: At_Roots__P Parameter: Tissue Value: Roots vs. Whole Plant
  misc_feature: MA Experiment ID: 20001905 Result: Up-regulated in Transcription
  misc_feature: MA Experiment 20001905 PARAMETER Experiment Name: At_Drought_Reproduction_P Parameter: Age (day) Value: 40
  misc_feature: MA Experiment 20001905 PARAMETER Experiment Name: At_Drought_Reproduction_P Parameter: Organism Value: A. thaliana
  misc_feature: MA Experiment 20001905 PARAMETER Experiment Name: At_Drought_Reproduction_P Parameter: Plant Line Value: WS
  misc_feature: MA Experiment 20001905 PARAMETER Experiment Name: At_Drought_Reproduction_P Parameter: Timepoint (day) Value: 10
  misc_feature: MA Experiment 20001905 PARAMETER Experiment Name: At_Drought_Reproduction_P Parameter: Tissue Value: Rosettes
  misc_feature: MA Experiment 20001905 PARAMETER Experiment Name: At_Drought_Reproduction_P Parameter: Treatment Value: Drought vs. No Drought
atgagatcttcagcgggaaagcttctctcccattctctacggagaaaccgcgggaaacttggtgatggattttggattccggctacgaggtctcagaagatgtggaattcgacggtaccgtcagatgaaaatcctgatcaaaattcgatcgatgcaggatcttcaatgcggaaaccaattagcttatggcctggaatgtatcattctccggtgactaatgcgctttgggaagctcgtcgtaatatgttcgaaattcctaccggagacgacgcttctcagtcaaaattgacggctaaatctccgtctcgaagccgaacgtcaattctctataagttttcttctgattttgttcttcgagaacaatataggaatccttggaatgagattcgtactggtaaattggttgaagatcttgacgctcttgctggaaccatctccttcaagcattgtggtggtgacagcagtgcgagatcgatgattttggtgactgcttcagtggataggattatcatgaaaagacctattcgtgtagatactgaccttagtatagttggtgctgttacatgggttggtagatcatccatggagatgcaattacaagtactccaaattcaagataccaacaactcctctgagtcggttgcccttgaagcaaactttacattcgtggctcgggatgctcagacaggcaagtcagctccaattaaccaagtcgtgccagaaactgagcatgaaaaatttctgtggaaagaggcagaagagaggaacaaactacgaaaacaaaagagagcacagggtaaagaagagcatgagaagttgaaggacttagagaggctaaatgagttattagcagaaggacgagtattcctggacatgccagctcttgcagatcggaacagcatcctaattaaggatacttcccatgaaaactcattgatctgccagccacagcaacgaaatattcatggcagaatttttggaggcttcttgatgcgcaaagcttttgagttggctttctccaatgcttacaccttcgctggggtttcaccacgttttctcgaagttgatcgcgtcgattttatcaaaccagtggatgttggaaatttccttcgtttcaagtcacgcgtattgtacacagaagcaaccagttcagctgaaccgctgataaacatcgaggttgtagctcatgttacaagtccagagctcagatccagcgaagtctccaacaggttttacttcaccttcagtgtgagacctgaggccatgaaagatggattgaaaataagaaatgtggttccagcaacagaagaagaagctagaagagtgatcgagcgcatggacgcagagagacccatctcattgccttga

SEQ ID NO: 73731 - protein, 455 aa, Arabidopsis thaliana
  peptide (1)..(455): Ceres Seq. ID no. 4976158
  misc_feature (124)..(455): Homolog of NCBI NO: 15224555 NR Description: hypothetical protein; protein id: At2g30720.1
  misc_feature (1)..(107): Homolog of NCBI NO: 15224555 NR Description: hypothetical protein; protein id: At2g30720.1
  misc_feature (57)..(449): Homolog of NCBI NO: 15238956 NR Description: putative protein; protein id: At5g48370.1
  misc_feature (92)..(420): Homolog of NCBI NO: 31980998 NR Description: acyl-Coenzyme A thioesterase 2, mitochondrial;
  misc_feature (92)..(420): Homolog of NCBI NO: 34880562 NR Description: similar to acyl-CoA thioesterase [Rattus
  misc_feature (92)..(420): Homolog of NCBI NO: 6912518 NR Description: Mitochondrial Acyl-CoA Thioesterase [Homo sapiens]
  misc_feature (92)..(420): Homolog of NCBI NO: 12331400 NR Description: acyl-Coenzyme A thioesterase 3, mitochondrial;
  misc_feature (92)..(420): Homolog of NCBI NO: 5103680 NR Description: U8 [Mus musculus]
  misc_feature (76)..(417): Homolog of NCBI NO: 40741147 NR Description: hypothetical protein AN4420.2 [Aspergillus
  misc_feature (212)..(450): Homolog of NCBI NO: 27528374 NR Description: acyl-CoA thioester hydrolase [Parasitella
MRSSAGKLLSHSLRRNRGKLGDGFWIPATRSQKMWNSTVPSDENPDQNSIDAGSSMRKPISLWPGMYHSPVTNALWEARRNMFEIPTGDDASQSKLTAKSPSRSRTSILYKFSSDFVLREQYRNPWNEIRTGKLVEDLDALAGTISFKHCGGDSSARSMILVTASVDRIIMKRPIRVDTDLSIVGAVTWVGRSSMEMQLQVLQIQDTNNSSESVALEANFTFVARDAQTGKSAPINQVVPETEHEKFLWKEAEERNKLRKQKRAQGKEEHEKLKDLERLNELLAEGRVFLDMPALADRNSILIKDTSHENSLICQPQQRNIHGRIFGGFLMRKAFELAFSNAYTFAGVSPRFLEVDRVDFIKPVDVGNFLRFKSRVLYTEATSSAEPLINIEVVAHVTSPELRSSEVSNRFYFTFSVRPEAMKDGLKIRNVVPATEEEARRVIERMDAERPISLP

SEQ ID NO: 73732 - protein, 422 aa, Arabidopsis thaliana
  peptide (1)..(422): Ceres Seq. ID no. 4976159
  misc_feature (91)..(422): Homolog of NCBI NO: 15224555 NR Description: hypothetical protein; protein id: At2g30720.1
  misc_feature (1)..(74): Homolog of NCBI NO: 15224555 NR Description: hypothetical protein; protein id: At2g30720.1
  misc_feature (24)..(416): Homolog of NCBI NO: 15238956 NR Description: putative protein; protein id: At5g48370.1
  misc_feature (59)..(387): Homolog of NCBI NO: 31980998 NR Description: acyl-Coenzyme A thioesterase 2, mitochondrial;
  misc_feature (59)..(387): Homolog of NCBI NO: 34880562 NR Description: similar to acyl-CoA thioesterase [Rattus
  misc_feature (59)..(387): Homolog of NCBI NO: 6912518 NR Description: Mitochondrial Acyl-CoA Thioesterase [Homo sapiens]
  misc_feature (59)..(387): Homolog of NCBI NO: 12331400 NR Description: acyl-Coenzyme A thioesterase 3, mitochondrial;
  misc_feature (59)..(387): Homolog of NCBI NO: 5103680 NR Description: U8 [Mus musculus]
  misc_feature (43)..(384): Homolog of NCBI NO: 40741147 NR Description: hypothetical protein AN4420.2 [Aspergillus
  misc_feature (179)..(417): Homolog of NCBI NO: 27528374 NR Description: acyl-CoA thioester hydrolase [Parasitella
MWNSTVPSDENPDQNSIDAGSSMRKPISLWPGMYHSPVTNALWEARRNMFEIPTGDDASQSKLTAKSPSRSRTSILYKFSSDFVLREQYRNPWNEIRTGKLVEDLDALAGTISFKHCGGDSSARSMILVTASVDRIIMKRPIRVDTDLSIVGAVTWVGRSSMEMQLQVLQIQDTNNSSESVALEANFTFVARDAQTGKSAPINQVVPETEHEKFLWKEAEERNKLRKQKRAQGKEEHEKLKDLERLNELLAEGRVFLDMPALADRNSILIKDTSHENSLICQPQQRNIHGRIFGGFLMRKAFELAFSNAYTFAGVSPRFLEVDRVDFIKPVDVGNFLRFKSRVLYTEATSSAEPLINIEVVAHVTSPELRSSEVSNRFYFTFSVRPEAMKDGLKIRNVVPATEEEARRVIERMDAERPISLP

SEQ ID NO: 73733 - protein, 400 aa, Arabidopsis thaliana
  peptide (1)..(400): Ceres Seq. ID no. 4976160
  misc_feature (69)..(400): Homolog of NCBI NO: 15224555 NR Description: hypothetical protein; protein id: At2g30720.1
  misc_feature (1)..(52): Homolog of NCBI NO: 15224555 NR Description: hypothetical protein; protein id: At2g30720.1
  misc_feature (2)..(394): Homolog of NCBI NO: 15238956 NR Description: putative protein; protein id: At5g48370.1
  misc_feature (37)..(365): Homolog of NCBI NO: 31980998 NR Description: acyl-Coenzyme A thioesterase 2, mitochondrial;
  misc_feature (37)..(365): Homolog of NCBI NO: 34880562 NR Description: similar to acyl-CoA thioesterase [Rattus
  misc_feature (37)..(365): Homolog of NCBI NO: 6912518 NR Description: Mitochondrial Acyl-CoA Thioesterase [Homo sapiens]
  misc_feature (37)..(365): Homolog of NCBI NO: 12331400 NR Description: acyl-Coenzyme A thioesterase 3, mitochondrial;
  misc_feature (37)..(365): Homolog of NCBI NO: 5103680 NR Description: U8 [Mus musculus]
  misc_feature (21)..(362): Homolog of NCBI NO: 40741147 NR Description: hypothetical protein AN4420.2 [Aspergillus
  misc_feature (157)..(395): Homolog of NCBI NO: 27528374 NR Description: acyl-CoA thioester hydrolase [Parasitella
MRKPISLWPGMYHSPVTNALWEARRNMFEIPTGDDASQSKLTAKSPSRSRTSILYKFSSDFVLREQYRNPWNEIRTGKLVEDLDALAGTISFKHCGGDSSARSMILVTASVDRIIMKRPIRVDTDLSIVGAVTWVGRSSMEMQLQVLQIQDTNNSSESVALEANFTFVARDAQTGKSAPINQVVPETEHEKFLWKEAEERNKLRKQKRAQGKEEHEKLKDLERLNELLAEGRVFLDMPALADRNSILIKDTSHENSLICQPQQRNIHGRIFGGFLMRKAFELAFSNAYTFAGVSPRFLEVDRVDFIKPVDVGNFLRFKSRVLYTEATSSAEPLINIEVVAHVTSPELRSSEVSNRFYFTFSVRPEAMKDGLKIRNVVPATEEEARRVIERMDAERPISLP

SEQ ID NO: 73734 - DNA, 480 bp, Arabidopsis thaliana
  misc_feature (1)..(480): Ceres Seq. ID no. 4976172
  misc_feature: MA Experiment ID: 20000265 Result: Up-regulated in Transcription
  misc_feature: MA Experiment 20000265 PARAMETER Experiment Name: At_Open_Flower_P Parameter: Age (day) Value: 21
  misc_feature: MA Experiment 20000265 PARAMETER Experiment Name: At_Open_Flower_P Parameter: Plant Line Value: WS
  misc_feature: MA Experiment 20000265 PARAMETER Experiment Name: At_Open_Flower_P Parameter: Tissue Value: Closed Flower vs. Whole Plant
  misc_feature: MA Experiment ID: 20000286 Result: Up-regulated in Transcription
  misc_feature: MA Experiment 20000286 PARAMETER Experiment Name: At_Open_Flower_P Parameter: Age (day) Value: 21
  misc_feature: MA Experiment 20000286 PARAMETER Experiment Name: At_Open_Flower_P Parameter: Plant Line Value: WS
  misc_feature: MA Experiment 20000286 PARAMETER Experiment Name: At_Open_Flower_P Parameter: Tissue Value: Half Open vs. Whole Plant
  misc_feature: MA Experiment ID: 20000439 Result: Up-regulated in Transcription
  misc_feature: MA Experiment 20000439 PARAMETER Experiment Name: At_Roots__P Parameter: Age (day) Value: 14 vs. 21
  misc_feature: MA Experiment 20000439 PARAMETER Experiment Name: At_Roots__P Parameter: Organism Value: A. thaliana
  misc_feature: MA Experiment 20000439 PARAMETER Experiment Name: At_Roots__P Parameter: Tissue Value: Roots vs. Whole Plant
  misc_feature: MA Experiment ID: 20000495 Result: Up-regulated in Transcription
  misc_feature: MA Experiment 20000495 PARAMETER Experiment Name: At_Guard_Cells_P Parameter: Harvest Date Value: 8/2/2002
  misc_feature: MA Experiment 20000495 PARAMETER Experiment Name: At_Guard_Cells_P Parameter: Organism Value: A. thaliana
  misc_feature: MA Experiment 20000495 PARAMETER Experiment Name: At_Guard_Cells_P Parameter: Tissue Value: Guard Cells vs. Leaves
atggataaaggcttcagattagtaaccagtcttcttcttctctccttcttcttctcaggtacaaaagcaattactgaaccaatagaagaagaaaaagacataaccacaccattagccacaaacccaaccaccacaccaacaaccgtggtccctaactccgactctgacgcttccgcggtggccacaacgccactaacgattccatcgtcaccacacggtgtagcctacccaggtgatcagagctggtgcgttgctagagagaacgttgcaaaaatggcgttacaagcggctttggactatgcatgtgggattggtggagcagactgctctgagatacaagaaggaggaaattgttataaccccaactcgttgagagcacatgcctcttttgccttcaatagttattaccagaagaatccaatccctagtagttgcaattttgatggaactgctatcactatcagtgctgacccaagttag

SEQ ID NO: 73735 - protein, 159 aa, Arabidopsis thaliana
  peptide (1)..(159): Ceres Seq. ID no. 4976173
  misc_feature (36)..(159): Homolog of NCBI NO: 22329437 NR Description: unknown protein; protein id: At1g09460.1
  misc_feature (36)..(159): Homolog of NCBI NO: 25402549 NR Description: hypothetical protein [imported] - Arabidopsis
  misc_feature (17)..(159): Homolog of NCBI NO: 40714691 NR Description: putative glucanase [Oryza sativa (japonica
  misc_feature (34)..(159): Homolog of NCBI NO: 34912962 NR Description: beta-1,3 glucanase-like protein [Oryza sativa
  misc_feature (78)..(159): Homolog of NCBI NO: 15218919 NR Description: beta-1,3 glucanase, putative; protein id:
  misc_feature (34)..(159): Homolog of NCBI NO: 37533178 NR Description: hypothetical protein [Oryza sativa (japonica group)] >gi|15217313|gb|AAK92657.1| Putative protein with
  misc_feature (62)..(158): Homolog of NCBI NO: 11071974 NR Description: elicitor inducible beta-1,3-glucanase Nt-SubE76
  misc_feature (80)..(159): Homolog of NCBI NO: 9758115 NR Description: beta-1,3-glucanase-like protein [Arabidopsis
  misc_feature (80)..(158): Homolog of NCBI NO: 18423719 NR Description: glycosyl hydrolase family 17; protein id: supported by cDNA: 7119., supported by cDNA: gi_18700154
  misc_feature (80)..(158): Homolog of NCBI NO: 18700155 NR Description: AT5g55180/MCO15_13 [Arabidopsis thaliana]
MDKGFRLVTSLLLLSFFFSGTKAITEPIEEEKDITTPLATNPTTTPTTVVPNSDSDASAVATTPLTIPSSPHGVAYPGDQSWCVARENVAKMALQAALDYACGIGGADCSEIQEGGNCYNPNSLRAHASFAFNSYYQKNPIPSSCNFDGTAITISADPS

SEQ ID NO: 73736 - DNA, 1179 bp, Arabidopsis thaliana
  misc_feature (1)..(1179): Ceres Seq. ID no. 4976203
  misc_feature: MA Experiment ID: 20000185 Result: Up-regulated in Transcription
  misc_feature: MA Experiment 20000185 PARAMETER Experiment Name: At_Roots__P Parameter: Age (day) Value: 7 vs. 21
  misc_feature: MA Experiment 20000185 PARAMETER Experiment Name: At_Roots__P Parameter: Organism Value: A. thaliana
  misc_feature: MA Experiment 20000185 PARAMETER Experiment Name: At_Roots__P Parameter: Tissue Value: Roots vs. Whole Plant
  misc_feature: MA Experiment ID: 20000227 Result: Up-regulated in Transcription
  misc_feature: MA Experiment 20000227 PARAMETER Experiment Name: At_Root-Tips-vs-Tops_P Parameter: Tissue Value: Root Tips vs. Root Tops
  misc_feature: MA Experiment ID: 20000235 Result: Down-regulated in Transcription
  misc_feature: MA Experiment 20000235 PARAMETER Experiment Name: At_Siliques_P Parameter: Age (day) Value: 21
  misc_feature: MA Experiment 20000235 PARAMETER Experiment Name: At_Siliques_P Parameter: Organism Value: A. thaliana
  misc_feature: MA Experiment 20000235 PARAMETER Experiment Name: At_Siliques_P Parameter: Plant Line Value: WS
  misc_feature: MA Experiment 20000235 PARAMETER Experiment Name: At_Siliques_P Parameter: Tissue Value: 5-10mm Siliques vs. Whole Plant
  misc_feature: MA Experiment ID: 20000264 Result: Down-regulated in Transcription
  misc_feature: MA Experiment 20000264 PARAMETER Experiment Name: At_Open_Flower_P Parameter: Age (day) Value: 21
  misc_feature: MA Experiment 20000264 PARAMETER Experiment Name: At_Open_Flower_P Parameter: Plant Line Value: WS
  misc_feature: MA Experiment 20000264 PARAMETER Experiment Name: At_Open_Flower_P Parameter: Tissue Value: Open Flower vs. Whole Plant
  misc_feature: MA Experiment ID: 20000265 Result: Up-regulated in Transcription
  misc_feature: MA Experiment 20000265 PARAMETER Experiment Name: At_Open_Flower_P Parameter: Age (day) Value: 21
  misc_feature: MA Experiment 20000265 PARAMETER Experiment Name: At_Open_Flower_P Parameter: Plant Line Value: WS
  misc_feature: MA Experiment 20000265 PARAMETER Experiment Name: At_Open_Flower_P Parameter: Tissue Value: Closed Flower vs. Whole Plant
  misc_feature: MA Experiment ID: 20000286 Result: Up-regulated in Transcription
  misc_feature: MA Experiment 20000286 PARAMETER Experiment Name: At_Open_Flower_P Parameter: Age (day) Value: 21
  misc_feature: MA Experiment 20000286 PARAMETER Experiment Name: At_Open_Flower_P Parameter: Plant Line Value: WS
  misc_feature: MA Experiment 20000286 PARAMETER Experiment Name: At_Open_Flower_P Parameter: Tissue Value: Half Open vs. Whole Plant
  misc_feature: MA Experiment ID: 20000437 Result: Down-regulated in Transcription
  misc_feature: MA Experiment 20000437 PARAMETER Experiment Name: At_Drought_P Parameter: Age (day) Value: 8
  misc_feature: MA Experiment 20000437 PARAMETER Experiment Name: At_Drought_P Parameter: Organism Value: A. thaliana
  misc_feature: MA Experiment 20000437 PARAMETER Experiment Name: At_Drought_P Parameter: Plant Line Value: WS
  misc_feature: MA Experiment 20000437 PARAMETER Experiment Name: At_Drought_P Parameter: Timepoint (hr) Value: 24
  misc_feature: MA Experiment 20000437 PARAMETER Experiment Name: At_Drought_P Parameter: Tissue Value: Whole Plant
  misc_feature: MA Experiment 20000437 PARAMETER Experiment Name: At_Drought_P Parameter: Treatment Value: Drought vs. No Drought
  misc_feature: MA Experiment ID: 20000438 Result: Down-regulated in Transcription
  misc_feature: MA Experiment 20000438 PARAMETER Experiment Name: At_Shoots__P Parameter: Age (day) Value: 14
  misc_feature: MA Experiment 20000438 PARAMETER Experiment Name: At_Shoots__P Parameter: Tissue Value: Shoots vs. Whole Plant
  misc_feature: MA Experiment ID: 20000794 Result: Down-regulated in Transcription
  misc_feature: MA Experiment 20000794 PARAMETER Experiment Name: At_Petals_P Parameter: Age (day) Value: 23-25 days
  misc_feature: MA Experiment 20000794 PARAMETER Experiment Name: At_Petals_P Parameter: Plant Line Value: WS
  misc_feature: MA Experiment 20000794 PARAMETER Experiment Name: At_Petals_P Parameter: Tissue Value: Petals vs. Whole plant
  misc_feature: MA Experiment ID: 20001771 Result: Up-regulated in Transcription
  misc_feature: MA Experiment 20001771 PARAMETER Experiment Name: At_Far-red-enriched-adult_P Parameter: Age (day) Value: 28
  misc_feature: MA Experiment 20001771 PARAMETER Experiment Name: At_Far-red-enriched-adult_P Parameter: Light Value: Far-red enriched vs. White
  misc_feature: MA Experiment 20001771 PARAMETER Experiment Name: At_Far-red-enriched-adult_P Parameter: Organism Value: A. thaliana
  misc_feature: MA Experiment 20001771 PARAMETER Experiment Name: At_Far-red-enriched-adult_P Parameter: Plant Line Value: Columbia
  misc_feature: MA Experiment 20001771 PARAMETER Experiment Name: At_Far-red-enriched-adult_P Parameter: Timepoint (hr) Value: 16
  misc_feature: MA Experiment 20001771 PARAMETER Experiment Name: At_Far-red-enriched-adult_P Parameter: Tissue Value: Aerial
  misc_feature: MA Experiment ID: 20001773 Result: Up-regulated in Transcription
  misc_feature: MA Experiment 20001773 PARAMETER Experiment Name: At_Far-red-enriched-adult_P Parameter: Age (day) Value: 30
  misc_feature: MA Experiment 20001773 PARAMETER Experiment Name: At_Far-red-enriched-adult_P Parameter: Light Value: Far-red enriched vs. White
  misc_feature: MA Experiment 20001773 PARAMETER Experiment Name: At_Far-red-enriched-adult_P Parameter: Organism Value: A. thaliana
  misc_feature: MA Experiment 20001773 PARAMETER Experiment Name: At_Far-red-enriched-adult_P Parameter: Plant Line Value: Columbia
  misc_feature: MA Experiment 20001773 PARAMETER Experiment Name: At_Far-red-enriched-adult_P Parameter: Timepoint (hr) Value: 48
  misc_feature: MA Experiment 20001773 PARAMETER Experiment Name: At_Far-red-enriched-adult_P Parameter: Tissue Value: Aerial
  misc_feature: MA Experiment ID: 20001910 Result: Down-regulated in Transcription
  misc_feature: MA Experiment 20001910 PARAMETER Experiment Name: At_Drought_Reproduction_P Parameter: Age (day) Value: 37
  misc_feature: MA Experiment 20001910 PARAMETER Experiment Name: At_Drought_Reproduction_P Parameter: Organism Value: A. thaliana
  misc_feature: MA Experiment 20001910 PARAMETER Experiment Name: At_Drought_Reproduction_P Parameter: Plant Line Value: WS
  misc_feature: MA Experiment 20001910 PARAMETER Experiment Name: At_Drought_Reproduction_P Parameter: Timepoint (day) Value: 7
  misc_feature: MA Experiment 20001910 PARAMETER Experiment Name: At_Drought_Reproduction_P Parameter: Tissue Value: Flowers
  misc_feature: MA Experiment 20001910 PARAMETER Experiment Name: At_Drought_Reproduction_P Parameter: Treatment Value: Drought vs. No Drought
  misc_feature: Pfam Name: peroxidase Pfam Description: Peroxidase
aatatagtaccaactccattgaatgttaaaactcagaagaaagtggagtgatcatataacgacaatgaagaatctctttaacttgttccttatgtttttctttgcaatgccaattctttcactctccgagaatccaaccaatttcagcgagagttgcgaagacgggagtggagaaaccggttcaagctttggcatagggttcgatttggttcttgattttggtttataccggaatagctgccccgaagcagagtctatcgtctactcgtgggtggaaaccacggtgttagaggatccaagaatggctgcttctcttctccgtcttcatttccacgactgttttgtcaatggatgtgatgcttcggtgttgttagatgacacagaaggactggttggtgaaaaaacggcgcctcctaatctaaattctctacgagggttcgaagtgattgattcgataaagtctgatattgaatctgtatgtccagagaccgtctcatgcgcagacattcttgccatggctgctagagattcagtcgttgtgtcgggtggaccaaggtgggaggtggaagtaggaagaaaagacagtagaacagcaagcaaacaggcagcaacaaatggcttaccctcaccaaactcaaccgtatcaactctcatctctactttccagaatcttggcctttcacaaaccgacatggtcgctctttccggtggacatacattgggaaaggcacggtgcacttcgtttacagctcggttgcagccactgcaaactggacaaccagctaaccacggagacaaccttgagttcctcgagtcactgcaacagttatgctcgactgttgggcccagtgtaggtatcactcagcttgacttggtgactccatcaacatttgacaaccagtactatgtaaacctcctctcgggtgagggattgcttccatcagaccaggctttagcggttcaagacccagggacaagggcgattgttgagacctacgcaacagatcagtcggttttctttgaggattttaagaacgctatggttaaaatgggagggatacccggtggtagtaatagcgagattaggaagaattgtagaatgattaactaaaaataaaagcccgacttattgaatgatatctaattatctatataaaaattaaagaagtccacctacgt

SEQ ID NO: 73737 - protein, 362 aa, Arabidopsis thaliana
  peptide (1)..(362): Ceres Seq. ID no. 4976204
  misc_feature: Pfam Name: peroxidase Pfam Description: Peroxidase
  misc_feature (15)..(362): Homolog of NCBI NO: 26397553 NR Description: Peroxidase 40 precursor (Atperox P40)
  misc_feature (15)..(362): Homolog of NCBI NO: 15234882 NR Description: peroxidase family; protein id: At4g16270.1
  misc_feature (24)..(362): Homolog of NCBI NO: 34015359 NR Description: putative peroxidase [Oryza sativa (japonica
  misc_feature (48)..(362): Homolog of NCBI NO: 35215022 NR Description: putative peroxidase 40 precursor [Oryza sativa
  misc_feature (56)..(362): Homolog of NCBI NO: 34903044 NR Description: unnamed protein product [Oryza sativa (japonica group)] >gi|7242902|dbj|BAA92500.1| unnamed protein product
  misc_feature (69)..(362): Homolog of NCBI NO: 21554765 NR Description: peroxidase, putative [Arabidopsis thaliana]
  misc_feature (69)..(362): Homolog of NCBI NO: 15219493 NR Description: peroxidase, putative; protein id: At1g44970.1, by cDNA: 26375. [Arabidopsis thaliana] Peroxidase 9 precursor (Atperox P9) (ATP18a)
  misc_feature (54)..(362): Homolog of NCBI NO: 14031051 NR Description: peroxidase [Nicotiana tabacum]
  misc_feature (64)..(362): Homolog of NCBI NO: 34913714 NR Description: putative peroxidase [Oryza sativa (japonica >gi|20146478|dbj|BAB89258.1| putative peroxidase [Oryza sativa
  misc_feature (69)..(362): Homolog of NCBI NO: 7453855 NR Description: peroxidase prx15 precursor [Spinacia oleracea]
MLKLRRKWSDHITTMKNLFNLFLMFFFAMPILSLSENPTNFSESCEDGSGETGSSFGIGFDLVLDFGLYRNSCPEAESIVYSWVETTVLEDPRMAASLLRLHFHDCFVNGCDASVLLDDTEGLVGEKTAPPNLNSLRGFEVIDSIKSDIESVCPETVSCADILAMAARDSVVVSGGPRWEVEVGRKDSRTASKQAATNGLPSPNSTVSTLISTFQNLGLSQTDMVALSGGHTLGKARCTSFTARLQPLQTGQPANHGDNLEFLESLQQLCSTVGPSVGITQLDLVTPSTFDNQYYVNLLSGEGLLPSDQALAVQDPGTRAIVETYATDQSVFFEDFKNAMVKMGGIPGGSNSEIRKNCRMIN

SEQ ID NO: 73738 - protein, 348 aa, Arabidopsis thaliana
  peptide (1)..(348): Ceres Seq. ID no. 4976205
  misc_feature: Pfam Name: peroxidase Pfam Description: Peroxidase
  misc_feature (1)..(348): Homolog of NCBI NO: 26397553 NR Description: Peroxidase 40 precursor (Atperox P40)
  misc_feature (1)..(348): Homolog of NCBI NO: 15234882 NR Description: peroxidase family; protein id: At4g16270.1
  misc_feature (10)..(348): Homolog of NCBI NO: 34015359 NR Description: putative peroxidase [Oryza sativa (japonica
  misc_feature (34)..(348): Homolog of NCBI NO: 35215022 NR Description: putative peroxidase 40 precursor [Oryza sativa
  misc_feature (42)..(348): Homolog of NCBI NO: 34903044 NR Description: unnamed protein product [Oryza sativa (japonica group)] >gi|7242902|dbj|BAA92500.1| unnamed protein product
  misc_feature (55)..(348): Homolog of NCBI NO: 21554765 NR Description: peroxidase, putative [Arabidopsis thaliana]
  misc_feature (55)..(348): Homolog of NCBI NO: 15219493 NR Description: peroxidase, putative; protein id: At1g44970.1, by cDNA: 26375. [Arabidopsis thaliana] Peroxidase 9 precursor (Atperox P9) (ATP18a)
  misc_feature (40)..(348): Homolog of NCBI NO: 14031051 NR Description: peroxidase [Nicotiana tabacum]
  misc_feature (50)..(348): Homolog of NCBI NO: 34913714 NR Description: putative peroxidase [Oryza sativa (japonica >gi|20146478|dbj|BAB89258.1| putative peroxidase [Oryza sativa
  misc_feature (55)..(348): Homolog of NCBI NO: 7453855 NR Description: peroxidase prx15 precursor [Spinacia oleracea]
MKNLFNLFLMFFFAMPILSLSENPTNFSESCEDGSGETGSSFGIGFDLVLDFGLYRNSCPEAESIVYSWVETTVLEDPRMAASLLRLHFHDCFVNGCDASVLLDDTEGLVGEKTAPPNLNSLRGFEVIDSIKSDIESVCPETVSCADILAMAARDSVVVSGGPRWEVEVGRKDSRTASKQAATNGLPSPNSTVSTLISTFQNLGLSQTDMVALSGGHTLGKARCTSFTARLQPLQTGQPANHGDNLEFLESLQQLCSTVGPSVGITQLDLVTPSTFDNQYYVNLLSGEGLLPSDQALAVQDPGTRAIVETYATDQSVFFEDFKNAMVKMGGIPGGSNSEIRKNCRMIN

SEQ ID NO: 73739 - protein, 339 aa, Arabidopsis thaliana
  peptide (1)..(339): Ceres Seq. ID no. 4976206
  misc_feature: Pfam Name: peroxidase Pfam Description: Peroxidase
  misc_feature (1)..(339): Homolog of NCBI NO: 26397553 NR Description: Peroxidase 40 precursor (Atperox P40)
  misc_feature (1)..(339): Homolog of NCBI NO: 15234882 NR Description: peroxidase family; protein id: At4g16270.1
  misc_feature (1)..(339): Homolog of NCBI NO: 34015359 NR Description: putative peroxidase [Oryza sativa (japonica
  misc_feature (25)..(339): Homolog of NCBI NO: 35215022 NR Description: putative peroxidase 40 precursor [Oryza sativa
  misc_feature (33)..(339): Homolog of NCBI NO: 34903044 NR Description: unnamed protein product [Oryza sativa (japonica group)] >gi|7242902|dbj|BAA92500.1| unnamed protein product
  misc_feature (46)..(339): Homolog of NCBI NO: 21554765 NR Description: peroxidase, putative [Arabidopsis thaliana]
  misc_feature (46)..(339): Homolog of NCBI NO: 15219493 NR Description: peroxidase, putative; protein id: At1g44970.1, by cDNA: 26375. [Arabidopsis thaliana] Peroxidase 9 precursor (Atperox P9) (ATP18a)
  misc_feature (31)..(339): Homolog of NCBI NO: 14031051 NR Description: peroxidase [Nicotiana tabacum]
  misc_feature (41)..(339): Homolog of NCBI NO: 34913714 NR Description: putative peroxidase [Oryza sativa (japonica >gi|20146478|dbj|BAB89258.1| putative peroxidase [Oryza sativa
  misc_feature (46)..(339): Homolog of NCBI NO: 7453855 NR Description: peroxidase prx15 precursor [Spinacia oleracea]
MFFFAMPILSLSENPTNFSESCEDGSGETGSSFGIGFDLVLDFGLYRNSCPEAESIVYSWVETTVLEDPRMAASLLRLHFHDCFVNGCDASVLLDDTEGLVGEKTAPPNLNSLRGFEVIDSIKSDIESVCPETVSCADILAMAARDSVVVSGGPRWEVEVGRKDSRTASKQAATNGLPSPNSTVSTLISTFQNLGLSQTDMVALSGGHTLGKARCTSFTARLQPLQTGQPANHGDNLEFLESLQQLCSTVGPSVGITQLDLVTPSTFDNQYYVNLLSGEGLLPSDQALAVQDPGTRAIVETYATDQSVFFEDFKNAMVKMGGIPGGSNSEIRKNCRMIN

SEQ ID NO: 73740 - DNA, 1455 bp, Arabidopsis thaliana
  misc_feature (1)..(1455): Ceres Seq. ID no. 4976645
  misc_feature: MA Experiment ID: 20000315 Result: Down-regulated in Transcription
  misc_feature: MA Experiment 20000315 PARAMETER Experiment Name: At_14day_Shoots-Roots_Sub_P Parameter: Age (day) Value: 14
  misc_feature: MA Experiment 20000315 PARAMETER Experiment Name: At_14day_Shoots-Roots_Sub_P Parameter: Organism Value: A. thaliana
  misc_feature: MA Experiment 20000315 PARAMETER Experiment Name: At_14day_Shoots-Roots_Sub_P Parameter: Plant Line Value: WS
  misc_feature: MA Experiment 20000315 PARAMETER Experiment Name: At_14day_Shoots-Roots_Sub_P Parameter: Tissue Value: Shoots vs. Whole Plant
  misc_feature: MA Experiment ID: 20000327 Result: Down-regulated in Transcription
  misc_feature: MA Experiment 20000327 PARAMETER Experiment Name: At_42deg_Heat_Sub_P Parameter: Age (day) Value: 14
  misc_feature: MA Experiment 20000327 PARAMETER Experiment Name: At_42deg_Heat_Sub_P Parameter: Organism Value: A. thaliana
  misc_feature: MA Experiment 20000327 PARAMETER Experiment Name: At_42deg_Heat_Sub_P Parameter: Plant Line Value: WS
  misc_feature: MA Experiment 20000327 PARAMETER Experiment Name: At_42deg_Heat_Sub_P Parameter: Temperature (deg C) Value: 42 vs. 22
  misc_feature: MA Experiment 20000327 PARAMETER Experiment Name: At_42deg_Heat_Sub_P Parameter: Timepoint (hr) Value: 1
  misc_feature: MA Experiment 20000327 PARAMETER Experiment Name: At_42deg_Heat_Sub_P Parameter: Tissue Value: Aerial
  misc_feature: MA Experiment ID: 20000328 Result: Down-regulated in Transcription
  misc_feature: MA Experiment 20000328 PARAMETER Experiment Name: At_42deg_Heat_Sub_P Parameter: Age (day) Value: 14
  misc_feature: MA Experiment 20000328 PARAMETER Experiment Name: At_42deg_Heat_Sub_P Parameter: Organism Value: A. thaliana
  misc_feature: MA Experiment 20000328 PARAMETER Experiment Name: At_42deg_Heat_Sub_P Parameter: Plant Line Value: WS
  misc_feature: MA Experiment 20000328 PARAMETER Experiment Name: At_42deg_Heat_Sub_P Parameter: Temperature (deg C) Value: 42 vs. 22
  misc_feature: MA Experiment 20000328 PARAMETER Experiment Name: At_42deg_Heat_Sub_P Parameter: Timepoint (hr) Value: 6
  misc_feature: MA Experiment 20000328 PARAMETER Experiment Name: At_42deg_Heat_Sub_P Parameter: Tissue Value: Aerial
  misc_feature: MA Experiment ID: 20000355 Result: Up-regulated in Transcription
  misc_feature: MA Experiment 20000355 PARAMETER Experiment Name: At_Siliques_Sub_P Parameter: Age (day) Value: 21
  misc_feature: MA Experiment 20000355 PARAMETER Experiment Name: At_Siliques_Sub_P Parameter: Organism Value: A. thaliana
  misc_feature: MA Experiment 20000355 PARAMETER Experiment Name: At_Siliques_Sub_P Parameter: Plant Line Value: WS
  misc_feature: MA Experiment 20000355 PARAMETER Experiment Name: At_Siliques_Sub_P Parameter: Tissue Value: Less Than 5mm Siliques vs. Whole Plant
  misc_feature: MA Experiment ID: 20000440 Result: Up-regulated in Transcription
  misc_feature: MA Experiment 20000440 PARAMETER Experiment Name: At_Closed-Flower__Sub_P Parameter: Tissue Value: Closed Flower vs. Whole Plant
atgaaaaagggaaaagacatggcgaaagaggagcaagaaacagcggcaatagagccacttagcccggtttcacagttgtttgtttcgccgagtctctactgcttcattattttcactttagggttccaaactagatgcaacccatccaccattgttgaaggtgtcaagaacacatggatcaagctccctcgcttctctagcaaagtggagataaagaaaaatggaaaagcgtcttgggttcctgttagtgttcgagtagaagatcatgttgttgttccagatcttgattattccaacattgaaaatcctgatcaatttatagaagactatacttcgaaattagctaatactccgatggacatgtcccgacctttatgggaacttcatttacttaatataaagacatcaaatgcagaatctttagctataggaaaatttcatcattctcttggcgatgggatgtctcttatatctcttctattagctagttcacggaaaacatcagatcctgacgctttgcctactaccgcggctacaagaaagcatgccagttccaataaaaagagttggtggttggttggaagattttggtttatgataagaatcattttcactactgttgttgaattgtttaagtatttgcttacactatgttttatgcgggacactaaaactcccctaatgggtaaaacgggtgatgcaatacgatctagaaaggttatacatcggatagtaagctttgatgatgtcaagttggtgaagaacaacatggatatgaaagtgaatgatgttcttcttggaatgacacaggcaggtctctcaagatatttgagcaggaaatatgatgaagatatggtggtcgagaagaaaaaaaacttggagaaaatccgtcttcgtggtacagtattcgtaaatttaagagcagacacaaaactcgaggatttggcgaatatgatggcaaaaggttcaaagtgtagatggggaaacttcgtaggtgttattatatttcctttatgggtgagatccgaagatgatccgttggaatacgttcgacgagccaaatctactatggatatcaaaaaactgtccatagaatcacttatttgctatggactcatcaaacttaccagaaaaatactcgggggaaaggtagtagaaactcttgttaggagactatttgatcatacgacattgacattttctaatgtgatgggtccagacgaagatataagtttttttgaccatccaatgtcttacgtagcagcaagcgcattaggtggaccacaagctcttattatccattacgtaacctatgtaaacaagattgtcatcaatctagcagtagacacatcagtgattcgagaccctcatctactatgtgatgatttggtagaatcgctcgatatcatcaaacttgctgccatggagaaaggagttcataaaatggaggtttga

SEQ ID NO: 73741 - protein, 484 aa, Arabidopsis thaliana
  peptide (1)..(484): Ceres Seq. ID no. 4976646
  misc_feature (18)..(299): Pfam Name: Condensation domain Pfam Description: Condensation domain
  misc_feature (7)..(484): Homolog of NCBI NO: 30687731 NR Description: hypothetical protein [Arabidopsis thaliana]
  misc_feature (3)..(484): Homolog of NCBI NO: 9758716 NR Description: emb|CAB66398.1~gene_id:MNJ8.9~strong similarity
  misc_feature (3)..(484): Homolog of NCBI NO: 18421632 NR Description: putative protein; protein id: At5g37300.1, by cDNA: gi_15810554 [Arabidopsis thaliana]
  misc_feature (4)..(484): Homolog of NCBI NO: 30696326 NR Description: expressed protein [Arabidopsis thaliana]
  misc_feature (4)..(484): Homolog of NCBI NO: 26451548 NR Description: unknown protein [Arabidopsis thaliana]
  misc_feature (4)..(484): Homolog of NCBI NO: 9759186 NR Description: emb|CAB66399.1~gene_id:K19E1.19~strong similarity
  misc_feature (7)..(484): Homolog of NCBI NO: 15218351 NR Description: hypothetical protein; protein id: At1g72110.1
  misc_feature (18)..(477): Homolog of NCBI NO: 15229102 NR Description: putative protein; protein id: At3g49190.1
  misc_feature (9)..(481): Homolog of NCBI NO: 15237329 NR Description: putative protein; protein id: At5g16350.1 thaliana] >gi|9759117|dbj|BAB09602.1| similarity to unknown protein [Arabidopsis thaliana]
  misc_feature (18)..(479): Homolog of NCBI NO: 18416859 NR Description: putative protein; protein id: At5g12420.1, by cDNA: gi_21280906 [Arabidopsis thaliana] putative protein [Arabidopsis thaliana]
MKKGKDMAKEEQETAAIEPLSPVSQLFVSPSLYCFIIFTLGFQTRCNPSTIVEGVKNTWIKLPRFSSKVEIKKNGKASWVPVSVRVEDHVVVPDLDYSNIENPDQFIEDYTSKLANTPMDMSRPLWELHLLNIKTSNAESLAIGKFHHSLGDGMSLISLLLASSRKTSDPDALPTTAATRKHASSNKKSWWLVGRFWFMIRIIFTTVVELFKYLLTLCFMRDTKTPLMGKTGDAIRSRKVIHRIVSFDDVKLVKNNMDMKVNDVLLGMTQAGLSRYLSRKYDEDMVVEKKKNLEKIRLRGTVFVNLRADTKLEDLANMMAKGSKCRWGNFVGVIIFPLWVRSEDDPLEYVRRAKSTMDIKKLSIESLICYGLIKLTRKILGGKVVETLVRRLFDHTTLTFSNVMGPDEDISFFDHPMSYVAASALGGPQALIIHYVTYVNKIVINLAVDTSVIRDPHLLCDDLVESLDIIKLAAMEKGVHKMEV

SEQ ID NO: 73742 - protein, 478 aa, Arabidopsis thaliana
  peptide (1)..(478): Ceres Seq. ID no. 4976647
  misc_feature (12)..(293): Pfam Name: Condensation domain Pfam Description: Condensation domain
  misc_feature (1)..(478): Homolog of NCBI NO: 30687731 NR Description: hypothetical protein [Arabidopsis thaliana]
  misc_feature (1)..(478): Homolog of NCBI NO: 9758716 NR Description: emb|CAB66398.1~gene_id:MNJ8.9~strong similarity
  misc_feature (1)..(478): Homolog of NCBI NO: 18421632 NR Description: putative protein; protein id: At5g37300.1, by cDNA: gi_15810554 [Arabidopsis thaliana]
  misc_feature (1)..(478): Homolog of NCBI NO: 30696326 NR Description: expressed protein [Arabidopsis thaliana]
  misc_feature (1)..(478): Homolog of NCBI NO: 26451548 NR Description: unknown protein [Arabidopsis thaliana]
  misc_feature (1)..(478): Homolog of NCBI NO: 9759186 NR Description: emb|CAB66399.1~gene_id:K19E1.19~strong similarity
  misc_feature (1)..(478): Homolog of NCBI NO: 15218351 NR Description: hypothetical protein; protein id: At1g72110.1
  misc_feature (12)..(471): Homolog of NCBI NO: 15229102 NR Description: putative protein; protein id: At3g49190.1
  misc_feature (3)..(475): Homolog of NCBI NO: 15237329 NR Description: putative protein; protein id: At5g16350.1 thaliana] >gi|9759117|dbj|BAB09602.1| similarity to unknown protein [Arabidopsis thaliana]
  misc_feature (12)..(473): Homolog of NCBI NO: 18416859 NR Description: putative protein; protein id: At5g12420.1, by cDNA: gi_21280906 [Arabidopsis thaliana] putative protein [Arabidopsis thaliana]
MAKEEQETAAIEPLSPVSQLFVSPSLYCFIIFTLGFQTRCNPSTIVEGVKNTWIKLPRFSSKVEIKKNGKASWVPVSVRVEDHVVVPDLDYSNIENPDQFIEDYTSKLANTPMDMSRPLWELHLLNIKTSNAESLAIGKFHHSLGDGMSLISLLLASSRKTSDPDALPTTAATRKHASSNKKSWWLVGRFWFMIRIIFTTVVELFKYLLTLCFMRDTKTPLMGKTGDAIRSRKVIHRIVSFDDVKLVKNNMDMKVNDVLLGMTQAGLSRYLSRKYDEDMVVEKKKNLEKIRLRGTVFVNLRADTKLEDLANMMAKGSKCRWGNFVGVIIFPLWVRSEDDPLEYVRRAKSTMDIKKLSIESLICYGLIKLTRKILGGKVVETLVRRLFDHTTLTFSNVMGPDEDISFFDHPMSYVAASALGGPQALIIHYVTYVNKIVINLAVDTSVIRDPHLLCDDLVESLDIIKLAAMEKGVHKMEV

SEQ ID NO: 73743 - protein, 366 aa, Arabidopsis thaliana
  peptide (1)..(366): Ceres Seq. ID no. 4976648
  misc_feature (1)..(181): Pfam Name: Condensation domain Pfam Description: Condensation domain
  misc_feature (1)..(366): Homolog of NCBI NO: 30687731 NR Description: hypothetical protein [Arabidopsis thaliana]
  misc_feature (1)..(366): Homolog of NCBI NO: 9758716 NR Description: emb|CAB66398.1~gene_id:MNJ8.9~strong similarity
  misc_feature (1)..(366): Homolog of NCBI NO: 18421632 NR Description: putative protein; protein id: At5g37300.1, by cDNA: gi_15810554 [Arabidopsis thaliana]
  misc_feature (1)..(366): Homolog of NCBI NO: 30696326 NR Description: expressed protein [Arabidopsis thaliana]
  misc_feature (1)..(366): Homolog of NCBI NO: 26451548 NR Description: unknown protein [Arabidopsis thaliana]
  misc_feature (1)..(366): Homolog of NCBI NO: 9759186 NR Description: emb|CAB66399.1~gene_id:K19E1.19~strong similarity
  misc_feature (1)..(366): Homolog of NCBI NO: 15218351 NR Description: hypothetical protein; protein id: At1g72110.1
  misc_feature (1)..(359): Homolog of NCBI NO: 15229102 NR Description: putative protein; protein id: At3g49190.1
  misc_feature (1)..(363): Homolog of NCBI NO: 15237329 NR Description: putative protein; protein id: At5g16350.1 thaliana] >gi|9759117|dbj|BAB09602.1| similarity to unknown protein [Arabidopsis thaliana]
  misc_feature (1)..(361): Homolog of NCBI NO: 18416859 NR Description: putative protein; protein id: At5g12420.1, by cDNA: gi_21280906 [Arabidopsis thaliana] putative protein [Arabidopsis thaliana]
MDMSRPLWELHLLNIKTSNAESLAIGKFHHSLGDGMSLISLLLASSRKTSDPDALPTTAATRKHASSNKKSWWLVGRFWFMIRIIFTTVVELFKYLLTLCFMRDTKTPLMGKTGDAIRSRKVIHRIVSFDDVKLVKNNMDMKVNDVLLGMTQAGLSRYLSRKYDEDMVVEKKKNLEKIRLRGTVFVNLRADTKLEDLANMMAKGSKCRWGNFVGVIIFPLWVRSEDDPLEYVRRAKSTMDIKKLSIESLICYGLIKLTRKILGGKVVETLVRRLFDHTTLTFSNVMGPDEDISFFDHPMSYVAASALGGPQALIIHYVTYVNKIVINLAVDTSVIRDPHLLCDDLVESLDIIKLAAMEKGVHKMEV

SEQ ID NO: 73744 - DNA, 1698 bp, Arabidopsis thaliana
  misc_feature (1)..(1698): Ceres Seq. ID no. 4976799
  misc_feature: MA Experiment ID: 20000184 Result: Down-regulated in Transcription
  misc_feature: MA Experiment 20000184 PARAMETER Experiment Name: At_Shoots__P Parameter: Age (day) Value: 7
  misc_feature: MA Experiment 20000184 PARAMETER Experiment Name: At_Shoots__P Parameter: Tissue Value: Shoots vs. Whole Plant
  misc_feature: MA Experiment ID: 20000234 Result: Up-regulated in Transcription
  misc_feature: MA Experiment 20000234 PARAMETER Experiment Name: At_Siliques_P Parameter: Age (day) Value: 21
  misc_feature: MA Experiment 20000234 PARAMETER Experiment Name: At_Siliques_P Parameter: Organism Value: A. thaliana
  misc_feature: MA Experiment 20000234 PARAMETER Experiment Name: At_Siliques_P Parameter: Plant Line Value: WS
  misc_feature: MA Experiment 20000234 PARAMETER Experiment Name: At_Siliques_P Parameter: Tissue Value: Less Than 5mm Siliques vs. Whole Plant
atggcttttcaacggcggcgcaacaattactacaaccgtctccgtcgtcttcttcctttcatttgcgctgtctctggagctcttctcatcctcttcgctcttctctccattctttcccctcctcctgatgattccgatcgccgcatctccaagcatattaactatggagccaatgatgagaagaagaacacaccagtggttttcacagttccgcagagaggtggaggaagatcggatcgtgatatctggcgttcatggaatgctgaattcttttatggttgttgtaatgcaagcagcaagttcccaaatgctaaagcaattactagaaatgatcgatacttggcgattgccactagtggcggtttaaaccaacaacggactggtattgtagatgctgttgttgctgcaaggattctaaacgctacgcttgttattccgaagttggaccagaaatcctactggaaagatgccagtgacttctcgaacattttcgatgttgattggtttatgtcatttctctcaaaagatgtcaaaatcattgagaaacttccacagaaaggagggcaaacatggagccctcgcagaatgcgtgtaccgagaaaatgcaatgagaaatgctatatcaatcgggtgttacctgttcttcagaaaaggcatgcagttcaattgaataaatttgattacagactctcaaacaagttgagagatgatttgcagaagctgaggtgtagagtaaactatcatgcgcttaagtttactgatccaattcttgaaatgggtaacgaattggtcagaagaatgcggaaaaggagcaaacacttcattgctttacatcttaggtttgaacctgatatgctcgccttctctggatgttactatggtggtggtgagaaggagaagaaagagttaggaacaatcagaaggagatggaaaactttgcatgtaaataaccctgaaaagcaaaggagacaaggaagatgtccacttacaccagaagaagttggattaatgcttagagctttgggatatggaagtgatgttcatatatatgttgcatcaggtgaagtttatggaggagaaaaatcattggctcctttgaaagcactttttccacatttctattcaaaagacaccatagctacaaaaatggagttaaaaccattttcttcttattcttcacgaatggctgcactcgatttccttgtgtgtgacgaaagcgatgttttcgttaccaacaataacggaaacatggcgagaatattagcaggtcgaaggagatactttggacataaaccaacaattagaccgaatgcgaaaaagctatacaagttgtttatgagcaaagagaatactacttgggaggagtttgcttcaagagtgagaacatttcagaaaggattcatgggagaaccaaaggaggtaagagccggaaaaggtgagtttcatgagaatccagcggcttgtatatgcgaagatactgatgctaaagtaaaagcgggaaagatggattcgagaaaattcgggaagaaagagcagaaagaagatgaagatgcagagttgtcgtcgtcagagacagattatgaggaagaccaaactgatttacaggacagaggcttgtataatggtacgaggttagattatgatgatgcgttatcggtttcagaagagcctgagctagaagaaatgctatcagattga

SEQ ID NO: 73745 - protein, 370 aa, Arabidopsis thaliana
  peptide (1)..(370): Ceres Seq. ID no. 4976800
  misc_feature (1)..(261): Pfam Name: Plant protein family Pfam Description: Plant protein family
  misc_feature (1)..(370): Homolog of NCBI NO: 8886957 NR Description: F2D10.3 [Arabidopsis thaliana]
  misc_feature (1)..(370): Homolog of NCBI NO: 8778600 NR Description: F5M15.13 [Arabidopsis thaliana]
  misc_feature (84)..(370): Homolog of NCBI NO: 30686880 NR Description: axi 1 protein -related [Arabidopsis thaliana]
  misc_feature (1)..(47): Homolog of NCBI NO: 30686880 NR Description: axi 1 protein -related [Arabidopsis thaliana]
  misc_feature (1)..(370): Homolog of NCBI NO: 18411065 NR Description: putative auxin-independent growth promoter; id: At1g76270.1, supported by cDNA: gi_15292904 [Arabidopsis
  misc_feature (1)..(370): Homolog of NCBI NO: 25406439 NR Description: hypothetical protein F15M4.23 [imported] -
  misc_feature (1)..(370): Homolog of NCBI NO: 6573718 NR Description: T23E18.20 [Arabidopsis thaliana]
  misc_feature (1)..(364): Homolog of NCBI NO: 322752 NR Description: auxin-independent growth promoter - common
  misc_feature (1)..(338): Homolog of NCBI NO: 15233840 NR Description: putative growth regulator protein; protein id: [Arabidopsis thaliana] >gi|7488119|pir||T05667 probable growth
  misc_feature (1)..(336): Homolog of NCBI NO: 22328730 NR Description: growth regulator like protein; protein id: supported by cDNA: gi_20856497 [Arabidopsis thaliana] AT4g16650/dl4350w [Arabidopsis thaliana]
MRVPRKCNEKCYINRVLPVLQKRHAVQLNKFDYRLSNKLRDDLQKLRCRVNYHALKFTDPILEMGNELVRRMRKRSKHFIALHLRFEPDMLAFSGCYYGGGEKEKKELGTIRRRWKTLHVNNPEKQRRQGRCPLTPEEVGLMLRALGYGSDVHIYVASGEVYGGEKSLAPLKALFPHFYSKDTIATKMELKPFSSYSSRMAALDFLVCDESDVFVTNNNGNMARILAGRRRYFGHKPTIRPNAKKLYKLFMSKENTTWEEFASRVRTFQKGFMGEPKEVRAGKGEFHENPAACICEDTDAKVKAGKMDSRKFGKKEQKEDEDAELSSSETDYEEDQTDLQDRGLYNGTRLDYDDALSVSEEPELEEMLSD

SEQ ID NO: 73746 - protein, 396 aa, Arabidopsis thaliana
  peptide (1)..(396): Ceres Seq. ID no. 4976801
  misc_feature (1)..(287): Pfam Name: Plant protein family Pfam Description: Plant protein family
  misc_feature (1)..(396): Homolog of NCBI NO: 8886957 NR Description: F2D10.3 [Arabidopsis thaliana]
  misc_feature (1)..(396): Homolog of NCBI NO: 8778600 NR Description: F5M15.13 [Arabidopsis thaliana]
  misc_feature (110)..(396): Homolog of NCBI NO: 30686880 NR Description: axi 1 protein -related [Arabidopsis thaliana]
  misc_feature (1)..(73): Homolog of NCBI NO: 30686880 NR Description: axi 1 protein -related [Arabidopsis thaliana]
  misc_feature (1)..(396): Homolog of NCBI NO: 18411065 NR Description: putative auxin-independent growth promoter; id: At1g76270.1, supported by cDNA: gi_15292904 [Arabidopsis
  misc_feature (1)..(396): Homolog of NCBI NO: 25406439 NR Description: hypothetical protein F15M4.23 [imported] -
  misc_feature (1)..(396): Homolog of NCBI NO: 6573718 NR Description: T23E18.20 [Arabidopsis thaliana]
  misc_feature (1)..(390): Homolog of NCBI NO: 322752 NR Description: auxin-independent growth promoter - common
  misc_feature (1)..(364): Homolog of NCBI NO: 15233840 NR Description: putative growth regulator protein; protein id: [Arabidopsis thaliana] >gi|7488119|pir||T05667 probable growth
  misc_feature (1)..(362): Homolog of NCBI NO: 22328730 NR Description: growth regulator like protein; protein id: supported by cDNA: gi_20856497 [Arabidopsis thaliana] AT4g16650/dl4350w [Arabidopsis thaliana]
MSFLSKDVKIIEKLPQKGGQTWSPRRMRVPRKCNEKCYINRVLPVLQKRHAVQLNKFDYRLSNKLRDDLQKLRCRVNYHALKFTDPILEMGNELVRRMRKRSKHFIALHLRFEPDMLAFSGCYYGGGEKEKKELGTIRRRWKTLHVNNPEKQRRQGRCPLTPEEVGLMLRALGYGSDVHIYVASGEVYGGEKSLAPLKALFPHFYSKDTIATKMELKPFSSYSSRMAALDFLVCDESDVFVTNNNGNMARILAGRRRYFGHKPTIRPNAKKLYKLFMSKENTTWEEFASRVRTFQKGFMGEPKEVRAGKGEFHENPAACICEDTDAKVKAGKMDSRKFGKKEQKEDEDAELSSSETDYEEDQTDLQDRGLYNGTRLDYDDALSVSEEPELEEMLSD

SEQ ID NO: 73747 - protein, 565 aa, Arabidopsis thaliana
  peptide (1)..(565): Ceres Seq. ID no. 4976802
  misc_feature (115)..(456): Pfam Name: Plant protein family Pfam Description: Plant protein family
  misc_feature (1)..(565): Homolog of NCBI NO: 8886957 NR Description: F2D10.3 [Arabidopsis thaliana]
  misc_feature (73)..(565): Homolog of NCBI NO: 8778600 NR Description: F5M15.13 [Arabidopsis thaliana]
  misc_feature (1)..(51): Homolog of NCBI NO: 8778600 NR Description: F5M15.13 [Arabidopsis thaliana]
  misc_feature (279)..(565): Homolog of NCBI NO: 30686880 NR Description: axi 1 protein -related [Arabidopsis thaliana]
  misc_feature (1)..(242): Homolog of NCBI NO: 30686880 NR Description: axi 1 protein -related [Arabidopsis thaliana]
  misc_feature (1)..(565): Homolog of NCBI NO: 18411065 NR Description: putative auxin-independent growth promoter; id: At1g76270.1, supported by cDNA: gi_15292904 [Arabidopsis
  misc_feature (1)..(565): Homolog of NCBI NO: 25406439 NR Description: hypothetical protein F15M4.23 [imported] -
  misc_feature (1)..(565): Homolog of NCBI NO: 6573718 NR Description: T23E18.20 [Arabidopsis thaliana]
  misc_feature (1)..(559): Homolog of NCBI NO: 322752 NR Description: auxin-independent growth promoter - common
  misc_feature (13)..(533): Homolog of NCBI NO: 15233840 NR Description: putative growth regulator protein; protein id: [Arabidopsis thaliana] >gi|7488119|pir||T05667 probable growth
MAFQRRRNNYYNRLRRLLPFICAVSGALLILFALLSILSPPPDDSDRRISKHINYGANDEKKNTPVVFTVPQRGGGRSDRDIWRSWNAEFFYGCCNASSKFPNAKAITRNDRYLAIATSGGLNQQRTGIVDAVVAARILNATLVIPKLDQKSYWKDASDFSNIFDVDWFMSFLSKDVKIIEKLPQKGGQTWSPRRMRVPRKCNEKCYINRVLPVLQKRHAVQLNKFDYRLSNKLRDDLQKLRCRVNYHALKFTDPILEMGNELVRRMRKRSKHFIALHLRFEPDMLAFSGCYYGGGEKEKKELGTIRRRWKTLHVNNPEKQRRQGRCPLTPEEVGLMLRALGYGSDVHIYVASGEVYGGEKSLAPLKALFPHFYSKDTIATKMELKPFSSYSSRMAALDFLVCDESDVFVTNNNGNMARILAGRRRYFGHKPTIRPNAKKLYKLFMSKENTTWEEFASRVRTFQKGFMGEPKEVRAGKGEFHENPAACICEDTDAKVKAGKMDSRKFGKKEQKEDEDAELSSSETDYEEDQTDLQDRGLYNGTRLDYDDALSVSEEPELEEMLSD

SEQ ID NO: 73748 - DNA, 1293 bp, Arabidopsis thaliana
  misc_feature (1)..(1293): Ceres Seq. ID no. 4976844
  misc_feature: MA Experiment ID: 20000527 Result: Down-regulated in Transcription
  misc_feature: MA Experiment 20000527 PARAMETER Experiment Name: At_10percent_PEG_P Parameter: Age (day) Value: 20
  misc_feature: MA Experiment 20000527 PARAMETER Experiment Name: At_10percent_PEG_P Parameter: Organism Value: A. thaliana
  misc_feature: MA Experiment 20000527 PARAMETER Experiment Name: At_10percent_PEG_P Parameter: Plant Line Value: WS
  misc_feature: MA Experiment 20000527 PARAMETER Experiment Name: At_10percent_PEG_P Parameter: Timepoint (day) Value: 20
  misc_feature: MA Experiment 20000527 PARAMETER Experiment Name: At_10percent_PEG_P Parameter: Tissue Value: Whole Plant
  misc_feature: MA Experiment 20000527 PARAMETER Experiment Name: At_10percent_PEG_P Parameter: Treatment Value: 10percent PEG vs. No Treatment
atggataatagatcgccaagatcaagaggaaacatgggtccgaaaccaacaccactgaaagtccgtggagattcgcacaagattatcaagaagccaccactagcgccgccacacccgcaaccacaaccaccacaaacccatcagcaagaaccgtcgcaatctcggcccccacctggtcccgtgaacatatacacagtaactcccagaattatccatacacaccctaataacttcatgacattggtccaacgtctcacaggtcaaacctctacctccacaacatcatcctcctcctcttcatccacgtcggaaccaaaagacacgtcaacaatggttgatacatctcatgggttgatatctccggcggctcggtttgctgttacagagaaggctaatatctcaaacgaactagggacatttgttggaggcgaagggactatggatcaatattatcatcatcatcatcaagaacaaccacatcaaaatcgagggttcgagcggccaagttttcaccatgctgggattttatcgccgggaccttattctctgccgtcggtatcaccggacttcttttccactattggaccaaccgatccacaagaaggtacaccatatttgattccttcaggtgatatgcacagttatttatcacaggatgaggatcgaggtatcccccattcagtaaaggatactagaagtattggatcagcttatgaccgctacctgcagagtatgcaaacgttttttgtgccatctgaagaagctggtccatttaatggtgttggcatggtacgacaaggaggttccaacatgatgcctggtccgtccatgggtgagctcatggctgggtgtggtgggagtttgccttcagatttcaggccaaatggtcgggatatgggttttggtcagctggattcagttggtaggccaggccgggaaccacatcctctacctccagatgtatccaacactctgtatgttgaaggacttccttctaattgctcaagaagggaaaggagtggagatcctactgttctgtgttttgttgattttgaaaactctgcctgtgcagcaactgctctgagcgctttgcaagactatcgaatggatgaagacgaacccgattccaagattttgcggctccaatttttcagaaacccaggtccaagaccaggacagcgtggaggaagaagattctacatgaacccaaatacacttgatcatatgctcaaatccttaggagtagtttcactcaaagaaacagagatgtatggagagacaccacggagatga

SEQ ID NO: 73749 - protein, 430 aa, Arabidopsis thaliana
  peptide (1)..(430): Ceres Seq. ID no. 4976845
  misc_feature (64)..(94): Pfam Name: VQ motif Pfam Description: VQ motif
  misc_feature (1)..(430): Homolog of NCBI NO: 25513502 NR Description: F16F4.3 protein - Arabidopsis thaliana
  misc_feature (12)..(325): Homolog of NCBI NO: 15218968 NR Description: hypothetical protein; protein id: At1g21320.1
  misc_feature (1)..(200): Homolog of NCBI NO: 22329705 NR Description: hypothetical protein; protein id: At1g21326.1
  misc_feature (36)..(398): Homolog of NCBI NO: 15218968 NR Description: hypothetical protein; protein id: At1g21320.1
  misc_feature (207)..(338): Homolog of NCBI NO: 23304837 NR Description: RNA-binding protein [Medicago truncatula]
  misc_feature (341)..(398): Homolog of NCBI NO: 23304837 NR Description: RNA-binding protein [Medicago truncatula]
  misc_feature (267)..(338): Homolog of NCBI NO: 26450151 NR Description: unknown protein [Arabidopsis thaliana]
  misc_feature (337)..(397): Homolog of NCBI NO: 26450151 NR Description: unknown protein [Arabidopsis thaliana]
  misc_feature (215)..(397): Homolog of NCBI NO: 30699215 NR Description: expressed protein [Arabidopsis thaliana]
  misc_feature (167)..(340): Homolog of NCBI NO: 25553563 NR Description: OSJNBa0038F22.13 [Oryza sativa (japonica
MDNRSPRSRGNMGPKPTPLKVRGDSHKIIKKPPLAPPHPQPQPPQTHQQEPSQSRPPPGPVNIYTVTPRIIHTHPNNFMTLVQRLTGQTSTSTTSSSSSSSTSEPKDTSTMVDTSHGLISPAARFAVTEKANISNELGTFVGGEGTMDQYYHHHHQEQPHQNRGFERPSFHHAGILSPGPYSLPSVSPDFFSTIGPTDPQEGTPYLIPSGDMHSYLSQDEDRGIPHSVKDTRSIGSAYDRYLQSMQTFFVPSEEAGPFNGVGMVRQGGSNMMPGPSMGELMAGCGGSLPSDFRPNGRDMGFGQLDSVGRPGREPHPLPPDVSNTLYVEGLPSNCSRRERSGDPTVLCFVDFENSACAATALSALQDYRMDEDEPDSKILRLQFFRNPGPRPGQRGGRRFYMNPNTLDHMLKSLGVVSLKETEMYGETPRR

SEQ ID NO: 73750 - protein, 419 aa, Arabidopsis thaliana
  peptide (1)..(419): Ceres Seq. ID no. 4976846
  misc_feature (53)..(83): Pfam Name: VQ motif Pfam Description: VQ motif
  misc_feature (1)..(419): Homolog of NCBI NO: 25513502 NR Description: F16F4.3 protein - Arabidopsis thaliana
  misc_feature (1)..(314): Homolog of NCBI NO: 15218968 NR Description: hypothetical protein; protein id: At1g21320.1
  misc_feature (1)..(189): Homolog of NCBI NO: 22329705 NR Description: hypothetical protein; protein id: At1g21326.1
  misc_feature (25)..(387): Homolog of NCBI NO: 15218968 NR Description: hypothetical protein; protein id: At1g21320.1
  misc_feature (196)..(327): Homolog of NCBI NO: 23304837 NR Description: RNA-binding protein [Medicago truncatula]
  misc_feature (330)..(387): Homolog of NCBI NO: 23304837 NR Description: RNA-binding protein [Medicago truncatula]
  misc_feature (256)..(327): Homolog of NCBI NO: 26450151 NR Description: unknown protein [Arabidopsis thaliana]
  misc_feature (326)..(386): Homolog of NCBI NO: 26450151 NR Description: unknown protein [Arabidopsis thaliana]
  misc_feature (204)..(386): Homolog of NCBI NO: 30699215 NR Description: expressed protein [Arabidopsis thaliana]
  misc_feature (156)..(329): Homolog of NCBI NO: 25553563 NR Description: OSJNBa0038F22.13 [Oryza sativa (japonica
MGPKPTPLKVRGDSHKIIKKPPLAPPHPQPQPPQTHQQEPSQSRPPPGPVNIYTVTPRIIHTHPNNFMTLVQRLTGQTSTSTTSSSSSSSTSEPKDTSTMVDTSHGLISPAARFAVTEKANISNELGTFVGGEGTMDQYYHHHHQEQPHQNRGFERPSFHHAGILSPGPYSLPSVSPDFFSTIGPTDPQEGTPYLIPSGDMHSYLSQDEDRGIPHSVKDTRSIGSAYDRYLQSMQTFFVPSEEAGPFNGVGMVRQGGSNMMPGPSMGELMAGCGGSLPSDFRPNGRDMGFGQLDSVGRPGREPHPLPPDVSNTLYVEGLPSNCSRRERSGDPTVLCFVDFENSACAATALSALQDYRMDEDEPDSKILRLQFFRNPGPRPGQRGGRRFYMNPNTLDHMLKSLGVVSLKETEMYGETPRR

SEQ ID NO: 73751 - protein, 352 aa, Arabidopsis thaliana
  peptide (1)..(352): Ceres Seq. ID no. 4976847
  misc_feature (1)..(352): Homolog of NCBI NO: 25513502 NR Description: F16F4.3 protein - Arabidopsis thaliana
  misc_feature (1)..(247): Homolog of NCBI NO: 15218968 NR Description: hypothetical protein; protein id: At1g21320.1
  misc_feature (1)..(122): Homolog of NCBI NO: 22329705 NR Description: hypothetical protein; protein id: At1g21326.1
  misc_feature (1)..(320): Homolog of NCBI NO: 15218968 NR Description: hypothetical protein; protein id: At1g21320.1
  misc_feature (129)..(260): Homolog of NCBI NO: 23304837 NR Description: RNA-binding protein [Medicago truncatula]
  misc_feature (263)..(320): Homolog of NCBI NO: 23304837 NR Description: RNA-binding protein [Medicago truncatula]
  misc_feature (189)..(260): Homolog of NCBI NO: 26450151 NR Description: unknown protein [Arabidopsis thaliana]
  misc_feature (259)..(319): Homolog of NCBI NO: 26450151 NR Description: unknown protein [Arabidopsis thaliana]
  misc_feature (137)..(319): Homolog of NCBI NO: 30699215 NR Description: expressed protein [Arabidopsis thaliana]
  misc_feature (89)..(262): Homolog of NCBI NO: 25553563 NR Description: OSJNBa0038F22.13 [Oryza sativa (japonica
MTLVQRLTGQTSTSTTSSSSSSSTSEPKDTSTMVDTSHGLISPAARFAVTEKANISNELGTFVGGEGTMDQYYHHHHQEQPHQNRGFERPSFHHAGILSPGPYSLPSVSPDFFSTIGPTDPQEGTPYLIPSGDMHSYLSQDEDRGIPHSVKDTRSIGSAYDRYLQSMQTFFVPSEEAGPFNGVGMVRQGGSNMMPGPSMGELMAGCGGSLPSDFRPNGRDMGFGQLDSVGRPGREPHPLPPDVSNTLYVEGLPSNCSRRERSGDPTVLCFVDFENSACAATALSALQDYRMDEDEPDSKILRLQFFRNPGPRPGQRGGRRFYMNPNTLDHMLKSLGVVSLKETEMYGETPRR

SEQ ID NO: 73752 - DNA, 1002 bp, Arabidopsis thaliana
  misc_feature (1)..(1002): Ceres Seq. ID no. 4977027
  misc_feature: MA Experiment ID: 20000227 Result: Up-regulated in Transcription
  misc_feature: MA Experiment 20000227 PARAMETER Experiment Name: At_Root-Tips-vs-Tops_P Parameter: Tissue Value: Root Tips vs. Root Tops
  misc_feature: MA Experiment ID: 20000451 Result: Up-regulated in Transcription
  misc_feature: MA Experiment 20000451 PARAMETER Experiment Name: At_CS6879_Shoots-Roots_P Parameter: Age (day) Value: 14
  misc_feature: MA Experiment 20000451 PARAMETER Experiment Name: At_CS6879_Shoots-Roots_P Parameter: Organism Value: A. thaliana
  misc_feature: MA Experiment 20000451 PARAMETER Experiment Name: At_CS6879_Shoots-Roots_P Parameter: Plant Line Value: CS6879 vs. WS
  misc_feature: MA Experiment 20000451 PARAMETER Experiment Name: At_CS6879_Shoots-Roots_P Parameter: Tissue Value: Roots
  misc_feature: MA Experiment ID: 20000709 Result: Up-regulated in Transcription
  misc_feature: MA Experiment 20000709 PARAMETER Experiment Name: At_15mM_NH4NO3_L-to-H_P Parameter: Age (hr) Value: 14
  misc_feature: MA Experiment 20000709 PARAMETER Experiment Name: At_15mM_NH4NO3_L-to-H_P Parameter: Organism Value: A. thaliana
  misc_feature: MA Experiment 20000709 PARAMETER Experiment Name: At_15mM_NH4NO3_L-to-H_P Parameter: Plant Line Value: WS
  misc_feature: MA Experiment 20000709 PARAMETER Experiment Name: At_15mM_NH4NO3_L-to-H_P Parameter: Timepoint (hr) Value: 4
  misc_feature: MA Experiment 20000709 PARAMETER Experiment Name: At_15mM_NH4NO3_L-to-H_P Parameter: Tissue Value: Aerial
  misc_feature: MA Experiment 20000709 PARAMETER Experiment Name: At_15mM_NH4NO3_L-to-H_P Parameter: Treatment Value: 15mM NH4NO3 vs. 30mM Mannitol
  misc_feature: MA Experiment ID: 20001248 Result: Up-regulated in Transcription
  misc_feature: MA Experiment 20001248 PARAMETER Experiment Name: At_Far-red-induction_P Parameter: Age (day) Value: 7
  misc_feature: MA Experiment 20001248 PARAMETER Experiment Name: At_Far-red-induction_P Parameter: Light Value: Far-red vs. White
  misc_feature: MA Experiment 20001248 PARAMETER Experiment Name: At_Far-red-induction_P Parameter: Organism Value: A. thaliana
  misc_feature: MA Experiment 20001248 PARAMETER Experiment Name: At_Far-red-induction_P Parameter: Plant Line Value: Columbia
  misc_feature: MA Experiment 20001248 PARAMETER Experiment Name: At_Far-red-induction_P Parameter: Timepoint (hr) Value: 4
  misc_feature: MA Experiment 20001248 PARAMETER Experiment Name: At_Far-red-induction_P Parameter: Tissue Value: Whole Plant
  misc_feature: MA Experiment ID: 20001557 Result: Up-regulated in Transcription
  misc_feature: MA Experiment 20001557 PARAMETER Experiment Name: At_Drought_Soil_Dry_P Parameter: Age (day) Value: 27
  misc_feature: MA Experiment 20001557 PARAMETER Experiment Name: At_Drought_Soil_Dry_P Parameter: Organism Value: A. thaliana
  misc_feature: MA Experiment 20001557 PARAMETER Experiment Name: At_Drought_Soil_Dry_P Parameter: Plant Line Value: WS
  misc_feature: MA Experiment 20001557 PARAMETER Experiment Name: At_Drought_Soil_Dry_P Parameter: Post Timepoint (hr) Value: 3
  misc_feature: MA Experiment 20001557 PARAMETER Experiment Name: At_Drought_Soil_Dry_P Parameter: Post-Treatment Value: Re-Water vs. No Drought
  misc_feature: MA Experiment 20001557 PARAMETER Experiment Name: At_Drought_Soil_Dry_P Parameter: Timepoint (day) Value: 13
  misc_feature: MA Experiment 20001557 PARAMETER Experiment Name: At_Drought_Soil_Dry_P Parameter: Treatment Value: Drought vs. No Drought
atggatgagtttatggatcttagaccagtgaagtacacagagcacaagactgttatcagaaagtacactaaaaagtcgtctatggagaggaagaccagtgttcgtgactcggccaggttggttcgggtctcaatgacggatcgtgacgccactgattcatcaagcgacgaggaagagtttctgttccctcgaagacgtgtcaagagattgattaacgagatcagagtcgagcctagcagctcttccaccggcgacgtctctgcttctccgacgaaggaccggaaaagaatcaacgttgattctacggttcaaaagccctctgtttccggccaaaaccagaagaagtaccgcggcgtgagacagcgaccatggggaaaatgggcggcggagattcgtgatcctgagcaacgccggagaatctggctcggtacttttgcaacggcggaggaagctgccatcgtctacgacaacgcagcaatcaaacttcgtggccctgatgctcttaccaacttcaccgtacaaccagaaccagaaccggtacaagaacaagaacaagaaccggagagcaacatgtcggtttcgatatcagaatcaatggacgattctcaacatctatcatctccgacatcggttctcaactaccaaacatatgtctcggaggaaccaatcgatagtcttatcaaaccggttaaacaagagtttcttgaaccagaacaagagccaataagctggcatcttggagaaggtaatactaatactaatgatgattcatttccattggacattacatttctcgacaactatttcaatgaatcattaccagacatctccatcttcgatcaacctatgtctcctattcaaccaacagagaatgatttcttcaacgaccttatgttattcgatagcaacgcagaagaatactactcctccgagatcaaagagattggttcatcgttcaacgatcttgatgattctttgatatccgatctcttacttgtgtga

SEQ ID NO: 73753 - protein, 333 aa, Arabidopsis thaliana; identical to SEQ ID NO: 69726
  peptide (1)..(333): Ceres Seq. ID no. 4977028
  misc_feature (113)..(177): Pfam Name: AP2 domain Pfam Description: AP2 domain
  misc_feature (1)..(333): Homolog of NCBI NO: 15234337 NR Description: putative protein; protein id: At4g27950.1
  misc_feature (1)..(332): Homolog of NCBI NO: 15238705 NR Description: putative protein; protein id: At5g53290.1
  misc_feature (5)..(328): Homolog of NCBI NO: 15236595 NR Description: putative Ap2 domain protein; protein id: supported by cDNA: gi_15982736 [Arabidopsis thaliana]
  misc_feature (5)..(328): Homolog of NCBI NO: 22655200 NR Description: putative Ap2 domain protein [Arabidopsis thaliana]
  misc_feature (8)..(289): Homolog of NCBI NO: 15233169 NR Description: putative protein; protein id: At3g61630.1, by cDNA: 100688. [Arabidopsis thaliana] >gi|11281604|pir||T47955
  misc_feature (29)..(260): Homolog of NCBI NO: 15237053 NR Description: putative Ap2 domain protein; protein id:
  misc_feature (27)..(226): Homolog of NCBI NO: 7531181 NR Description: PATHOGENESIS-RELATED GENES TRANSCRIPTIONAL
  misc_feature (16)..(277): Homolog of NCBI NO: 15225959 NR Description: putative AP2 domain transcription factor; protein At2g46310.1, supported by cDNA: gi_18491258 [Arabidopsis >gi|25347738|pir||C84901 probable AP2 domain transcription factor
  misc_feature (8)..(223): Homolog of NCBI NO: 7489208 NR Description: Tsi1 protein - common tobacco
  misc_feature (39)..(212): Homolog of NCBI NO: 34898320 NR Description: Similar to Nicotiana tabacum mRNA for ERF1,

SEQ ID NO: 73754 - protein, 329 aa, Arabidopsis thaliana; identical to SEQ ID NO: 69727
  peptide (1)..(329): Ceres Seq. ID no. 4977029
  misc_feature (109)..(173): Pfam Name: AP2 domain Pfam Description: AP2 domain
  misc_feature (1)..(329): Homolog of NCBI NO: 15234337 NR Description: putative protein; protein id: At4g27950.1
  misc_feature (1)..(328): Homolog of NCBI NO: 15238705 NR Description: putative protein; protein id: At5g53290.1
  misc_feature (1)..(324): Homolog of NCBI NO: 15236595 NR Description: putative Ap2 domain protein; protein id: supported by cDNA: gi_15982736 [Arabidopsis thaliana]
  misc_feature (1)..(324): Homolog of NCBI NO: 22655200 NR Description: putative Ap2 domain protein [Arabidopsis thaliana]
  misc_feature (4)..(285): Homolog of NCBI NO: 15233169 NR Description: putative protein; protein id: At3g61630.1, by cDNA: 100688. [Arabidopsis thaliana] >gi|11281604|pir||T47955
  misc_feature (25)..(256): Homolog of NCBI NO: 15237053 NR Description: putative Ap2 domain protein; protein id:
  misc_feature (23)..(222): Homolog of NCBI NO: 7531181 NR Description: PATHOGENESIS-RELATED GENES TRANSCRIPTIONAL
  misc_feature (12)..(273): Homolog of NCBI NO: 15225959 NR Description: putative AP2 domain transcription factor; protein At2g46310.1, supported by cDNA: gi_18491258 [Arabidopsis >gi|25347738|pir||C84901 probable AP2 domain transcription factor
  misc_feature (4)..(219): Homolog of NCBI NO: 7489208 NR Description: Tsi1 protein - common tobacco
  misc_feature (35)..(208): Homolog of NCBI NO: 34898320 NR Description: Similar to Nicotiana tabacum mRNA for ERF1,

SEQ ID NO: 73755 - protein, 306 aa, Arabidopsis thaliana
  peptide (1)..(306): Ceres Seq. ID no. 4977030
  misc_feature (86)..(150): Pfam Name: AP2 domain Pfam Description: AP2 domain
  misc_feature (1)..(306): Homolog of NCBI NO: 15234337 NR Description: putative protein; protein id: At4g27950.1
  misc_feature (1)..(305): Homolog of NCBI NO: 15238705 NR Description: putative protein; protein id: At5g53290.1
  misc_feature (1)..(301): Homolog of NCBI NO: 15236595 NR Description: putative Ap2 domain protein; protein id: supported by cDNA: gi_15982736 [Arabidopsis thaliana]
  misc_feature (1)..(301): Homolog of NCBI NO: 22655200 NR Description: putative Ap2 domain protein [Arabidopsis thaliana]
  misc_feature (1)..(262): Homolog of NCBI NO: 15233169 NR Description: putative protein; protein id: At3g61630.1, by cDNA: 100688. [Arabidopsis thaliana] >gi|11281604|pir||T47955
  misc_feature (2)..(233): Homolog of NCBI NO: 15237053 NR Description: putative Ap2 domain protein; protein id:
  misc_feature (1)..(199): Homolog of NCBI NO: 7531181 NR Description: PATHOGENESIS-RELATED GENES TRANSCRIPTIONAL
  misc_feature (1)..(250): Homolog of NCBI NO: 15225959 NR Description: putative AP2 domain transcription factor; protein At2g46310.1, supported by cDNA: gi_18491258 [Arabidopsis >gi|25347738|pir||C84901 probable AP2 domain transcription factor
  misc_feature (1)..(196): Homolog of NCBI NO: 7489208 NR Description: Tsi1 protein - common tobacco
  misc_feature (12)..(185): Homolog of NCBI NO: 34898320 NR Description: Similar to Nicotiana tabacum mRNA for ERF1,
MERKTSVRDSARLVRVSMTDRDATDSSSDEEEFLFPRRRVKRLINEIRVEPSSSSTGDVSASPTKDRKRINVDSTVQKPSVSGQNQKKYRGVRQRPWGKWAAEIRDPEQRRRIWLGTFATAEEAAIVYDNAAIKLRGPDALTNFTVQPEPEPVQEQEQEPESNMSVSISESMDDSQHLSSPTSVLNYQTYVSEEPIDSLIKPVKQEFLEPEQEPISWHLGEGNTNTNDDSFPLDITFLDNYFNESLPDISIFDQPMSPIQPTENDFFNDLMLFDSNAEEYYSSEIKEIGSSFNDLDDSLISDLLLV

SEQ ID NO: 73756 - DNA, 2046 bp, Arabidopsis thaliana
  misc_feature (1)..(2046): Ceres Seq. ID no. 4977055
  misc_feature: MA Experiment ID: 20000286 Result: Down-regulated in Transcription
  misc_feature: MA Experiment 20000286 PARAMETER Experiment Name: At_Open_Flower_P Parameter: Age (day) Value: 21
  misc_feature: MA Experiment 20000286 PARAMETER Experiment Name: At_Open_Flower_P Parameter: Plant Line Value: WS
  misc_feature: MA Experiment 20000286 PARAMETER Experiment Name: At_Open_Flower_P Parameter: Tissue Value: Half Open vs. Whole Plant
  misc_feature: MA Experiment ID: 20000437 Result: Up-regulated in Transcription
  misc_feature: MA Experiment 20000437 PARAMETER Experiment Name: At_Drought_P Parameter: Age (day) Value: 8
  misc_feature: MA Experiment 20000437 PARAMETER Experiment Name: At_Drought_P Parameter: Organism Value: A. thaliana
  misc_feature: MA Experiment 20000437 PARAMETER Experiment Name: At_Drought_P Parameter: Plant Line Value: WS
  misc_feature: MA Experiment 20000437 PARAMETER Experiment Name: At_Drought_P Parameter: Timepoint (hr) Value: 24
  misc_feature: MA Experiment 20000437 PARAMETER Experiment Name: At_Drought_P Parameter: Tissue Value: Whole Plant
  misc_feature: MA Experiment 20000437 PARAMETER Experiment Name: At_Drought_P Parameter: Treatment Value: Drought vs. No Drought
  misc_feature: MA Experiment ID: 20001905 Result: Up-regulated in Transcription
  misc_feature: MA Experiment 20001905 PARAMETER Experiment Name: At_Drought_Reproduction_P Parameter: Age (day) Value: 40
  misc_feature: MA Experiment 20001905 PARAMETER Experiment Name: At_Drought_Reproduction_P Parameter: Organism Value: A. thaliana
  misc_feature: MA Experiment 20001905 PARAMETER Experiment Name: At_Drought_Reproduction_P Parameter: Plant Line Value: WS
  misc_feature: MA Experiment 20001905 PARAMETER Experiment Name: At_Drought_Reproduction_P Parameter: Timepoint (day) Value: 10
  misc_feature: MA Experiment 20001905 PARAMETER Experiment Name: At_Drought_Reproduction_P Parameter: Tissue Value: Rosettes
  misc_feature: MA Experiment 20001905 PARAMETER Experiment Name: At_Drought_Reproduction_P Parameter: Treatment Value: Drought vs. No Drought
atgttctctaaagtttccattcttctcttttccctcgcatccctactcttgttccgatcaaccacaggcatcgaattcatctacaactccaatttcaccacaaccaacacacttctcctcggcaacgccactgttaaatctccaccgtcgatcctcaccctcaccaaccaaaccactttctccatcggacgtggcctctacccttcaagaatcaacgcctcctcctcctctgcctcgccgttacctttcgccacatcattcatcttctccatggctccttttaaacacctctctcctggccacggcttcgccttcgtcttccttcctttctccgaaacctccgccgcaagctcatctcagcatctcggcctcttcaacttcaccaataacggtgaccccaatagccgaatcttcgccgttgaattcgatgttttcgctaaccaagagttcaacgacatcaacgacaaccacgtcggcgtcgacgtcaattctctcacttccgttgcatctgaaactgcaggtttctatggaggcagagacggccagagattcacggagctgaagcttaacagtggcgagaattatcaggcgtggatcgagtttaatgggtcagcgatcaatgtcacgatggctagagctagctctagaaagcccataagaccactcataagcattccattaaatctcactggagtcttacttgatgatatgttcgttggattcactgcctccacaggacaactagtgcagagccataggattctctcatggagttttagtaactccaatttctccattggtgatgctttgatcactaggaatctaccttcgtttaaattgtcaggtgactctgttttgaagtctaaaggcttcattgctggggtctctagtggtgttgtgttgttagtctctgttattgggctcctctgtttctacgttgtaaggcgtcgaaggcagagactagaaggagacgtggaagattgggaaacagagtattggcctcacagagtgcaatacaaagatgttttggaagcaacaaaagggttttccgatgagaacatgatcggatacggagggaattctaaagtgtacaggggagtgttggaaggtaaagaagttgcggttaagagaataatgatgagtcctcgagagagcgttggcgcgacgagtgagttcttagctgaggtctcgagcttagggaggttgagacacaagaatatagttggactaaaaggttggtctaagaaaggaggagagagtctgatattgatttacgagtatatggagaatggaagtgtcgataagcggatatttgattgtaacgagatgttgaattgggaggaaagaatgagagtgataagagacctagcctcagggatgttgtatctacacgaagggtgggagacaaaggtgttacatagagatataaagtcaagcaatgtgttgcttgacaaggatatgaacgcgagggtaggtgattttgggttggctaagttgcagaacactagtaaagagatggttagcacgacacatgttgttggaacagcgggttatatggcgcctgagttggttaagacagggagagcatcagcgcaaaccgatgtgtatagctttggagtgtttgtgttggaggtagtgtgtggaaggaggccaatagaggaaggaagagaagggatagtggaatggatatggggactaatggagaaagacaaagtggttgatggtttagacgagagaataaaggcgaatggagtgttcgtggtcgaggaagtggagatggctctgagaataggactgttgtgtgtgcatcctgatccgagagtgcgtccgaagatgagacaagtggtgcagatattggaacaagggagattagtggaggatggtggtgaaagggaaataagcttgttggagagagtgaagagctcttacttgttggaaactggtgagggaagcagacaacaacatcccacgttccaagatgtatggaattcgtcttcttattctaattccttccaaacttatgattctattcttcatggaaggtga

SEQ ID NO: 73757 - protein, 681 aa, Arabidopsis thaliana
  peptide (1)..(681): Ceres Seq. ID no. 4977056
  misc_feature (349)..(551): Pfam Name: Protein kinase domain Pfam Description: Protein kinase domain
  misc_feature (8)..(681): Homolog of NCBI NO: 18412759 NR Description: score=179, E=5.7e-06, N=1); protein id: [Arabidopsis thaliana] >gi|25387046|pir||D85062 hypothetical
  misc_feature (8)..(681): Homolog of NCBI NO: 30794060 NR Description: putative protein kinase [Arabidopsis thaliana]
  misc_feature (1)..(619): Homolog of NCBI NO: 11346411 NR Description: receptor-type protein kinase LRK1 [imported] - thaliana >gi|1418331|emb|CAA65153.1| receptor like protein kinase
  misc_feature (1)..(619): Homolog of NCBI NO: 15224347 NR Description: putative receptor-like protein kinase; protein At2g37710.1, supported by cDNA: gi_20259540 [Arabidopsis
  misc_feature (7)..(620): Homolog of NCBI NO: 34395075 NR Description: putative receptor kinase Lecrk [Oryza sativa
  misc_feature (7)..(620): Homolog of NCBI NO: 34899508 NR Description: putative receptor-like protein kinase [Oryza
  misc_feature (23)..(620): Homolog of NCBI NO: 37534762 NR Description: putative serine/threonine-specific kinase like
  misc_feature (1)..(680): Homolog of NCBI NO: 38112427 NR Description: lectin-like receptor kinase 7;2 [Medicago
  misc_feature (1)..(620): Homolog of NCBI NO: 34899538 NR Description: putative receptor-type protein kinase LRK1 [Oryza
  misc_feature (1)..(619): Homolog of NCBI NO: 28416699 NR Description: At3g53810 [Arabidopsis thaliana]
MFSKVSILLFSLASLLLFRSTTGIEFIYNSNFTTTNTLLLGNATVKSPPSILTLTNQTTFSIGRGLYPSRINASSSSASPLPFATSFIFSMAPFKHLSPGHGFAFVFLPFSETSAASSSQHLGLFNFTNNGDPNSRIFAVEFDVFANQEFNDINDNHVGVDVNSLTSVASETAGFYGGRDGQRFTELKLNSGENYQAWIEFNGSAINVTMARASSRKPIRPLISIPLNLTGVLLDDMFVGFTASTGQLVQSHRILSWSFSNSNFSIGDALITRNLPSFKLSGDSVLKSKGFIAGVSSGVVLLVSVIGLLCFYVVRRRRQRLEGDVEDWETEYWPHRVQYKDVLEATKGFSDENMIGYGGNSKVYRGVLEGKEVAVKRIMMSPRESVGATSEFLAEVSSLGRLRHKNIVGLKGWSKKGGESLILIYEYMENGSVDKRIFDCNEMLNWEERMRVIRDLASGMLYLHEGWETKVLHRDIKSSNVLLDKDMNARVGDFGLAKLQNTSKEMVSTTHVVGTAGYMAPELVKTGRASAQTDVYSFGVFVLEVVCGRRPIEEGREGIVEWIWGLMEKDKVVDGLDERIKANGVFVVEEVEMALRIGLLCVHPDPRVRPKMRQVVQILEQGRLVEDGGEREISLLERVKSSYLLETGEGSRQQHPTFQDVWNSSSYSNSFQTYDSILHGR

SEQ ID NO: 73758 - protein, 591 aa, Arabidopsis thaliana
  peptide (1)..(591): Ceres Seq. ID no. 4977057
  misc_feature (259)..(461): Pfam Name: Protein kinase domain Pfam Description: Protein kinase domain
  misc_feature (1)..(591): Homolog of NCBI NO: 18412759 NR Description: score=179, E=5.7e-06, N=1); protein id: [Arabidopsis thaliana] >gi|25387046|pir||D85062 hypothetical
  misc_feature (1)..(591): Homolog of NCBI NO: 30794060 NR Description: putative protein kinase [Arabidopsis thaliana]
  misc_feature (1)..(529): Homolog of NCBI NO: 11346411 NR Description: receptor-type protein kinase LRK1 [imported] - thaliana >gi|1418331|emb|CAA65153.1| receptor like protein kinase
  misc_feature (1)..(529): Homolog of NCBI NO: 15224347 NR Description: putative receptor-like protein kinase; protein At2g37710.1, supported by cDNA: gi_20259540 [Arabidopsis
  misc_feature (1)..(530): Homolog of NCBI NO: 34395075 NR Description: putative receptor kinase Lecrk [Oryza sativa
  misc_feature (1)..(530): Homolog of NCBI NO: 34899508 NR Description: putative receptor-like protein kinase [Oryza
  misc_feature (1)..(530): Homolog of NCBI NO: 37534762 NR Description: putative serine/threonine-specific kinase like
  misc_feature (1)..(590): Homolog of NCBI NO: 38112427 NR Description: lectin-like receptor kinase 7;2 [Medicago
  misc_feature (1)..(530): Homolog of NCBI NO: 34899538 NR Description: putative receptor-type protein kinase LRK1 [Oryza
  misc_feature (1)..(529): Homolog of NCBI NO: 28416699 NR Description: At3g53810 [Arabidopsis thaliana]
MAPFKHLSPGHGFAFVFLPFSETSAASSSQHLGLFNFTNNGDPNSRIFAVEFDVFANQEFNDINDNHVGVDVNSLTSVASETAGFYGGRDGQRFTELKLNSGENYQAWIEFNGSAINVTMARASSRKPIRPLISIPLNLTGVLLDDMFVGFTASTGQLVQSHRILSWSFSNSNFSIGDALITRNLPSFKLSGDSVLKSKGFIAGVSSGVVLLVSVIGLLCFYVVRRRRQRLEGDVEDWETEYWPHRVQYKDVLEATKGFSDENMIGYGGNSKVYRGVLEGKEVAVKRIMMSPRESVGATSEFLAEVSSLGRLRHKNIVGLKGWSKKGGESLILIYEYMENGSVDKRIFDCNEMLNWEERMRVIRDLASGMLYLHEGWETKVLHRDIKSSNVLLDKDMNARVGDFGLAKLQNTSKEMVSTTHVVGTAGYMAPELVKTGRASAQTDVYSFGVFVLEVVCGRRPIEEGREGIVEWIWGLMEKDKVVDGLDERIKANGVFVVEEVEMALRIGLLCVHPDPRVRPKMRQVVQILEQGRLVEDGGEREISLLERVKSSYLLETGEGSRQQHPTFQDVWNSSSYSNSFQTYDSILHGR

SEQ ID NO: 73759 - protein, 472 aa, Arabidopsis thaliana
  peptide (1)..(472): Ceres Seq. ID no. 4977058
  misc_feature (140)..(342): Pfam Name: Protein kinase domain Pfam Description: Protein kinase domain
  misc_feature (1)..(472): Homolog of NCBI NO: 18412759 NR Description: score=179, E=5.7e-06, N=1); protein id: [Arabidopsis thaliana] >gi|25387046|pir||D85062 hypothetical
  misc_feature (1)..(472): Homolog of NCBI NO: 30794060 NR Description: putative protein kinase [Arabidopsis thaliana]
  misc_feature (1)..(410): Homolog of NCBI NO: 11346411 NR Description: receptor-type protein kinase LRK1 [imported] - thaliana >gi|1418331|emb|CAA65153.1| receptor like protein kinase
  misc_feature (1)..(410): Homolog of NCBI NO: 15224347 NR Description: putative receptor-like protein kinase; protein At2g37710.1, supported by cDNA: gi_20259540 [Arabidopsis
  misc_feature (1)..(411): Homolog of NCBI NO: 34395075 NR Description: putative receptor kinase Lecrk [Oryza sativa
  misc_feature (1)..(411): Homolog of NCBI NO: 34899508 NR Description: putative receptor-like protein kinase [Oryza
  misc_feature (1)..(411): Homolog of NCBI NO: 37534762 NR Description: putative serine/threonine-specific kinase like
  misc_feature (1)..(471): Homolog of NCBI NO: 38112427 NR Description: lectin-like receptor kinase 7;2 [Medicago
  misc_feature (1)..(411): Homolog of NCBI NO: 34899538 NR Description: putative receptor-type protein kinase LRK1 [Oryza
  misc_feature (1)..(410): Homolog of NCBI NO: 28416699 NR Description: At3g53810 [Arabidopsis thaliana]
MARASSRKPIRPLISIPLNLTGVLLDDMFVGFTASTGQLVQSHRILSWSFSNSNFSIGDALITRNLPSFKLSGDSVLKSKGFIAGVSSGVVLLVSVIGLLCFYVVRRRRQRLEGDVEDWETEYWPHRVQYKDVLEATKGFSDENMIGYGGNSKVYRGVLEGKEVAVKRIMMSPRESVGATSEFLAEVSSLGRLRHKNIVGLKGWSKKGGESLILIYEYMENGSVDKRIFDCNEMLNWEERMRVIRDLASGMLYLHEGWETKVLHRDIKSSNVLLDKDMNARVGDFGLAKLQNTSKEMVSTTHVVGTAGYMAPELVKTGRASAQTDVYSFGVFVLEVVCGRRPIEEGREGIVEWIWGLMEKDKVVDGLDERIKANGVFVVEEVEMALRIGLLCVHPDPRVRPKMRQVVQILEQGRLVEDGGEREISLLERVKSSYLLETGEGSRQQHPTFQDVWNSSSYSNSFQTYDSILHGR

SEQ ID NO: 73760 - DNA, 2658 bp, Arabidopsis thaliana
  misc_feature (1)..(2658): Ceres Seq. ID no. 4978442
  misc_feature: MA Experiment ID: 20000307 Result: Up-regulated in Transcription
  misc_feature: MA Experiment 20000307 PARAMETER Experiment Name: At_Germinating_Seeds_Sub_P Parameter: Age (hr) Value: 24 vs. 0
  misc_feature: MA Experiment 20000307 PARAMETER Experiment Name: At_Germinating_Seeds_Sub_P Parameter: Organism Value: A. thaliana
  misc_feature: MA Experiment 20000307 PARAMETER Experiment Name: At_Germinating_Seeds_Sub_P Parameter: Plant Line Value: WS
  misc_feature: MA Experiment 20000307 PARAMETER Experiment Name: At_Germinating_Seeds_Sub_P Parameter: Tissue Value: Germinating Seeds
  misc_feature: MA Experiment ID: 20000314 Result: Up-regulated in Transcription
  misc_feature: MA Experiment 20000314 PARAMETER Experiment Name: At_14day_Shoots-Roots_Sub_P Parameter: Age (day) Value: 14
  misc_feature: MA Experiment 20000314 PARAMETER Experiment Name: At_14day_Shoots-Roots_Sub_P Parameter: Organism Value: A. thaliana
  misc_feature: MA Experiment 20000314 PARAMETER Experiment Name: At_14day_Shoots-Roots_Sub_P Parameter: Plant Line Value: WS
  misc_feature: MA Experiment 20000314 PARAMETER Experiment Name: At_14day_Shoots-Roots_Sub_P Parameter: Tissue Value: Roots vs. Whole Plant
  misc_feature: MA Experiment ID: 20000328 Result: Down-regulated in Transcription
  misc_feature: MA Experiment 20000328 PARAMETER Experiment Name: At_42deg_Heat_Sub_P Parameter: Age (day) Value: 14
  misc_feature: MA Experiment 20000328 PARAMETER Experiment Name: At_42deg_Heat_Sub_P Parameter: Organism Value: A. thaliana
  misc_feature: MA Experiment 20000328 PARAMETER Experiment Name: At_42deg_Heat_Sub_P Parameter: Plant Line Value: WS
  misc_feature: MA Experiment 20000328 PARAMETER Experiment Name: At_42deg_Heat_Sub_P Parameter: Temperature (deg C) Value: 42 vs. 22
  misc_feature: MA Experiment 20000328 PARAMETER Experiment Name: At_42deg_Heat_Sub_P Parameter: Timepoint (hr) Value: 6
  misc_feature: MA Experiment 20000328 PARAMETER Experiment Name: At_42deg_Heat_Sub_P Parameter: Tissue Value: Aerial
  misc_feature: MA Experiment ID: 20000347 Result: Up-regulated in Transcription
  misc_feature: MA Experiment 20000347 PARAMETER Experiment Name: At_2mM_SA_Sub_P Parameter: Age (day) Value: 14
  misc_feature: MA Experiment 20000347 PARAMETER Experiment Name: At_2mM_SA_Sub_P Parameter: Organism Value: A. thaliana
  misc_feature: MA Experiment 20000347 PARAMETER Experiment Name: At_2mM_SA_Sub_P Parameter: Plant Line Value: WS
  misc_feature: MA Experiment 20000347 PARAMETER Experiment Name: At_2mM_SA_Sub_P Parameter: Timepoint (hr) Value: 6
  misc_feature: MA Experiment 20000347 PARAMETER Experiment Name: At_2mM_SA_Sub_P Parameter: Tissue Value: Aerial
  misc_feature: MA Experiment 20000347 PARAMETER Experiment Name: At_2mM_SA_Sub_P Parameter: Treatment Value: 2mM SA vs. No Treatment
  misc_feature: MA Experiment ID: 20000352 Result: Down-regulated in Transcription
  misc_feature: MA Experiment 20000352 PARAMETER Experiment Name: At_Drought_Sub_P Parameter: Age (day) Value: 7
  misc_feature: MA Experiment 20000352 PARAMETER Experiment Name: At_Drought_Sub_P Parameter: Organism Value: A. thaliana
  misc_feature: MA Experiment 20000352 PARAMETER Experiment Name: At_Drought_Sub_P Parameter: Plant Line Value: WS
  misc_feature: MA Experiment 20000352 PARAMETER Experiment Name: At_Drought_Sub_P Parameter: Timepoint (hr) Value: 6
  misc_feature: MA Experiment 20000352 PARAMETER Experiment Name: At_Drought_Sub_P Parameter: Tissue Value: Whole Plant
  misc_feature: MA Experiment 20000352 PARAMETER Experiment Name: At_Drought_Sub_P Parameter: Treatment Value: Drought vs. No Drought
  misc_feature: MA Experiment ID: 20000355 Result: Down-regulated in Transcription
  misc_feature: MA Experiment 20000355 PARAMETER Experiment Name: At_Siliques_Sub_P Parameter: Age (day) Value: 21
  misc_feature: MA Experiment 20000355 PARAMETER Experiment Name: At_Siliques_Sub_P Parameter: Organism Value: A. thaliana
  misc_feature: MA Experiment 20000355 PARAMETER Experiment Name: At_Siliques_Sub_P Parameter: Plant Line Value: WS
  misc_feature: MA Experiment 20000355 PARAMETER Experiment Name: At_Siliques_Sub_P Parameter: Tissue Value: Less Than 5mm Siliques vs. Whole Plant
  misc_feature: MA Experiment ID: 20000440 Result: Down-regulated in Transcription
  misc_feature: MA Experiment 20000440 PARAMETER Experiment Name: At_Closed-Flower__Sub_P Parameter: Tissue Value: Closed Flower vs. Whole Plant
  misc_feature: MA Experiment ID: 20000634 Result: Down-regulated in Transcription
  misc_feature: MA Experiment 20000634 PARAMETER Experiment Name: At_10percent_PEG_Sub_P Parameter: Age (day) Value: 12
  misc_feature: MA Experiment 20000634 PARAMETER Experiment Name: At_10percent_PEG_Sub_P Parameter: Organism Value: A. thaliana
  misc_feature: MA Experiment 20000634 PARAMETER Experiment Name: At_10percent_PEG_Sub_P Parameter: Plant Line Value: WS
  misc_feature: MA Experiment 20000634 PARAMETER Experiment Name: At_10percent_PEG_Sub_P Parameter: Timepoint (day) Value: 12
  misc_feature: MA Experiment 20000634 PARAMETER Experiment Name: At_10percent_PEG_Sub_P Parameter: Tissue Value: Whole Plant
  misc_feature: MA Experiment 20000634 PARAMETER Experiment Name: At_10percent_PEG_Sub_P Parameter: Treatment Value: 10% PEG vs. No Treatment
atggagagacattgtgtgttagttgccacttttttgctgatgcttcatatcgttcatgctcaggatcaaattggattcattagtgtggattgtggtttggcacctcgtgagtctccttacaatgaagccaaaactggtttaacatatacatcagatgacggtctagtcaacgttgggaaacccggtagaatcgccaaggaattcgaaccgctcgccgataagccgactttgacactgagatattttccagagggagtacgaaactgctacaatctaaatgtcaccagcgacaccaactatctgatcaaggccacattcgtatatggaaattacgatggtcttaatgttgggccaaacttcgacctttacttcggtccgaatttgtggactacggtgagtagtaatgatactataaaggagatcattcatgtgaccaaaaccaattctttacaggtatgtcttattaagactggaataagtataccttttataaatgttttggagctacgaccgatgaagaaaaacatgtacgttactcaaggcgaatcactgaattacttattcagggtgtatattagcaattcaagtactcgtataaggttcccggatgatgtctatgatcgtaaatggtacccgtacttcgacaactcatggacacaagtaactacgactctcgatgtaaacacaagtcttacttatgaactaccacaaagtgtaatggcaaaagccgcaacgccaattaaggctaacgacaccttgaacattacatggacagtagagcctcctactacaaagttttactcctacatgcactttgcagagcttcagactttaagagccaacgatgcaagggaattcaatgtgacgatgaatggaatatatacatatggaccttatagtcctaaaccactaaaaaccgaaaccatatacgacaaaatccctgagcaatgcgatggaggtgcatgccttttgcaggttgtgaagacacttaaatctacccttccacctttacttaatgctatcgaggctttcaccgtgattgatttcccgcagatggagactaatggagatgacgttgatgcaatcaagaatgttcaagatacgtatggaattagtagaattagttggcaaggagatccatgtgtccccaaactgtttttgtgggatggtctaaattgcaacaactccgataattcgacatcaccaatcatcacttccttagacttatcttcaagtggactaactgggagcatcacccaagccattcagaatctaactaacctgcaagaactggacttgtcagataacaatttgactggagaaatacctgatttcttaggggacattaaatcactcttggtcataaacttaagtggtaataatctaagtggctcagttcctccctcacttcttcagaagaaaggaatgaagttaaatgtcgaaggaaaccctcatcttctttgcacagctgattcatgtgtgaaaaaaggagaggatggacacaagaaaaagagtgtcatagtgccagttgttgcatcaattgcttcaatagctgttcttataggtgcattggttctgtttttcattcttagaaagaaaaagtcaccaaaagttgaaggaccaccaccatcttatatgcaagcatcagatggtagatcgccaagatcatctgaaccggcaatagtgacaaagaatagaaggtttacttactcacaagttgcgataatgacaaataacttccaaagaatccttggaaaaggagggtttggaatggtttatcatggttttgtgaacggtacagaacaagtagctgttaagatactctcccattcatcgtctcaaggatataaagaatttaaagcggaggtagaacttcttcttagagttcatcacaagaacttggtcggtcttgttgggtactgcgacgaaggagagaacatggctcttatctatgaatacatggccaatggagatctaaaagaacatatgtcaggaacacgtaaccggtttactttgaattggggaactagactgaaaatagtcgtcgagtctgcacaaggacttgagtacttgcataatggatgcaaaccaccaatggttcatagagatgtcaaaaccacaaatatattgctgaacgaacacttccaagccaaactagctgattttgggctttcaaggtcatttccaattgaaggtgaaactcatgtgtcaacagttgttgctggaacgcctggatatcttgatcccgaatactataaaacaaattggttgacagaaaagagtgatgtttatagttttgggattgtattgttggagcttatcacaaatcgacccgtgatcgacaaaagccgtgaaaagccacatatagcagaatgggtaggagtaatgcttacaaaaggagacatcaacagtatcatggatcctaatttaaatgaagattatgattctggttctgtttggaaagctgttgagctagccatgagttgtctcaatccttcttcagcaagaagaccgaccatgtcccaagttgttattgaactaaacgagtgtatagcatcagaaaattcaaggggaggagcgagtcgggatatggactcgaagagttccatagaagtgagcttgacctttgataccgaactgagcccaacggctcggtag

SEQ ID NO: 73761 - protein, 885 aa, Arabidopsis thaliana
  peptide (1)..(885): Ceres Seq. ID no. 4978443
  misc_feature (199)..(885): Homolog of NCBI NO: 25387133 NR Description: probable protein kinase [imported] - Arabidopsis >gi|9802785|gb|AAF99854.1|AC015448_4 Putative protein kinase
  misc_feature (6)..(885): Homolog of NCBI NO: 39104601 NR Description: unknown protein [Arabidopsis thaliana]
  misc_feature (12)..(358): Homolog of NCBI NO: 8778538 NR Description: F22G5.7 [Arabidopsis thaliana]
  misc_feature (563)..(851): Homolog of NCBI NO: 8778538 NR Description: F22G5.7 [Arabidopsis thaliana]
  misc_feature (359)..(539): Homolog of NCBI NO: 8778538 NR Description: F22G5.7 [Arabidopsis thaliana]
  misc_feature (298)..(622): Homolog of NCBI NO: 15238490 NR Description: leucine-rich repeat transmembrane protein kinase,
  misc_feature (648)..(885): Homolog of NCBI NO: 15238490 NR Description: leucine-rich repeat transmembrane protein kinase,
  misc_feature (62)..(262): Homolog of NCBI NO: 15238490 NR Description: leucine-rich repeat transmembrane protein kinase,
  misc_feature (11)..(149): Homolog of NCBI NO: 15238490 NR Description: leucine-rich repeat transmembrane protein kinase,
  misc_feature (25)..(568): Homolog of NCBI NO: 25387154 NR Description: protein F22G5.6 [imported] - Arabidopsis thaliana
MERHCVLVATFLLMLHIVHAQDQIGFISVDCGLAPRESPYNEAKTGLTYTSDDGLVNVGKPGRIAKEFEPLADKPTLTLRYFPEGVRNCYNLNVTSDTNYLIKATFVYGNYDGLNVGPNFDLYFGPNLWTTVSSNDTIKEIIHVTKTNSLQVCLIKTGISIPFINVLELRPMKKNMYVTQGESLNYLFRVYISNSSTRIRFPDDVYDRKWYPYFDNSWTQVTTTLDVNTSLTYELPQSVMAKAATPIKANDTLNITWTVEPPTTKFYSYMHFAELQTLRANDAREFNVTMNGIYTYGPYSPKPLKTETIYDKIPEQCDGGACLLQVVKTLKSTLPPLLNAIEAFTVIDFPQMETNGDDVDAIKNVQDTYGISRISWQGDPCVPKLFLWDGLNCNNSDNSTSPIITSLDLSSSGLTGSITQAIQNLTNLQELDLSDNNLTGEIPDFLGDIKSLLVINLSGNNLSGSVPPSLLQKKGMKLNVEGNPHLLCTADSCVKKGEDGHKKKSVIVPVVASIASIAVLIGALVLFFILRKKKSPKVEGPPPSYMQASDGRSPRSSEPAIVTKNRRFTYSQVAIMTNNFQRILGKGGFGMVYHGFVNGTEQVAVKILSHSSSQGYKEFKAEVELLLRVHHKNLVGLVGYCDEGENMALIYEYMANGDLKEHMSGTRNRFTLNWGTRLKIVVESAQGLEYLHNGCKPPMVHRDVKTTNILLNEHFQAKLADFGLSRSFPIEGETHVSTVVAGTPGYLDPEYYKTNWLTEKSDVYSFGIVLLELITNRPVIDKSREKPHIAEWVGVMLTKGDINSIMDPNLNEDYDSGSVWKAVELAMSCLNPSSARRPTMSQVVIELNECIASENSRGGASRDMDSKSSIEVSLTFDTELSPTAR

SEQ ID NO: 73762 - protein, 872 aa, Arabidopsis thaliana
  peptide (1)..(872): Ceres Seq. ID no. 4978444
  misc_feature (186)..(872): Homolog of NCBI NO: 25387133 NR Description: probable protein kinase [imported] - Arabidopsis >gi|9802785|gb|AAF99854.1|AC015448_4 Putative protein kinase
  misc_feature (1)..(872): Homolog of NCBI NO: 39104601 NR Description: unknown protein [Arabidopsis thaliana]
  misc_feature (1)..(345): Homolog of NCBI NO: 8778538 NR Description: F22G5.7 [Arabidopsis thaliana]
  misc_feature (550)..(838): Homolog of NCBI NO: 8778538 NR Description: F22G5.7 [Arabidopsis thaliana]
  misc_feature (346)..(526): Homolog of NCBI NO: 8778538 NR Description: F22G5.7 [Arabidopsis thaliana]
  misc_feature (285)..(609): Homolog of NCBI NO: 15238490 NR Description: leucine-rich repeat transmembrane protein kinase,
  misc_feature (635)..(872): Homolog of NCBI NO: 15238490 NR Description: leucine-rich repeat transmembrane protein kinase,
  misc_feature (49)..(249): Homolog of NCBI NO: 15238490 NR Description: leucine-rich repeat transmembrane protein kinase,
  misc_feature (1)..(136): Homolog of NCBI NO: 15238490 NR Description: leucine-rich repeat transmembrane protein kinase,
  misc_feature (12)..(555): Homolog of NCBI NO: 25387154 NR Description: protein F22G5.6 [imported] - Arabidopsis thaliana
MLHIVHAQDQIGFISVDCGLAPRESPYNEAKTGLTYTSDDGLVNVGKPGRIAKEFEPLADKPTLTLRYFPEGVRNCYNLNVTSDTNYLIKATFVYGNYDGLNVGPNFDLYFGPNLWTTVSSNDTIKEIIHVTKTNSLQVCLIKTGISIPFINVLELRPMKKNMYVTQGESLNYLFRVYISNSSTRIRFPDDVYDRKWYPYFDNSWTQVTTTLDVNTSLTYELPQSVMAKAATPIKANDTLNITWTVEPPTTKFYSYMHFAELQTLRANDAREFNVTMNGIYTYGPYSPKPLKTETIYDKIPEQCDGGACLLQVVKTLKSTLPPLLNAIEAFTVIDFPQMETNGDDVDAIKNVQDTYGISRISWQGDPCVPKLFLWDGLNCNNSDNSTSPIITSLDLSSSGLTGSITQAIQNLTNLQELDLSDNNLTGEIPDFLGDIKSLLVINLSGNNLSGSVPPSLLQKKGMKLNVEGNPHLLCTADSCVKKGEDGHKKKSVIVPVVASIASIAVLIGALVLFFILRKKKSPKVEGPPPSYMQASDGRSPRSSEPAIVTKNRRFTYSQVAIMTNNFQRILGKGGFGMVYHGFVNGTEQVAVKILSHSSSQGYKEFKAEVELLLRVHHKNLVGLVGYCDEGENMALIYEYMANGDLKEHMSGTRNRFTLNWGTRLKIVVESAQGLEYLHNGCKPPMVHRDVKTTNILLNEHFQAKLADFGLSRSFPIEGETHVSTVVAGTPGYLDPEYYKTNWLTEKSDVYSFGIVLLELITNRPVIDKSREKPHIAEWVGVMLTKGDINSIMDPNLNEDYDSGSVWKAVELAMSCLNPSSARRPTMSQVVIELNECIASENSRGGASRDMDSKSSIEVSLTFDTELSPTAR

SEQ ID NO: 73763 - protein, 714 aa, Arabidopsis thaliana; identical to SEQ ID NO: 71421
  peptide (1)..(714): Ceres Seq. ID no. 4978445
  misc_feature (28)..(714): Homolog of NCBI NO: 25387133 NR Description: probable protein kinase [imported] - Arabidopsis >gi|9802785|gb|AAF99854.1|AC015448_4 Putative protein kinase
  misc_feature (1)..(714): Homolog of NCBI NO: 39104601 NR Description: unknown protein [Arabidopsis thaliana]
  misc_feature (1)..(187): Homolog of NCBI NO: 8778538 NR Description: F22G5.7 [Arabidopsis thaliana]
  misc_feature (392)..(680): Homolog of NCBI NO: 8778538 NR Description: F22G5.7 [Arabidopsis thaliana]
  misc_feature (188)..(368): Homolog of NCBI NO: 8778538 NR Description: F22G5.7 [Arabidopsis thaliana]
  misc_feature (127)..(451): Homolog of NCBI NO: 15238490 NR Description: leucine-rich repeat transmembrane protein kinase,
  misc_feature (477)..(714): Homolog of NCBI NO: 15238490 NR Description: leucine-rich repeat transmembrane protein kinase,
  misc_feature (1)..(91): Homolog of NCBI NO: 15238490 NR Description: leucine-rich repeat transmembrane protein kinase,
  misc_feature (1)..(397): Homolog of NCBI NO: 25387154 NR Description: protein F22G5.6 [imported] - Arabidopsis thaliana
  misc_feature (242)..(714): Homolog of NCBI NO: 25387154 NR Description: protein F22G5.6 [imported] - Arabidopsis thaliana

SEQ ID NO: 73764 - DNA, 1428 bp, Arabidopsis thaliana
  misc_feature (1)..(1428): Ceres Seq. ID no. 4978521
  misc_feature: MA Experiment ID: 20000347 Result: Up-regulated in Transcription
  misc_feature: MA Experiment 20000347 PARAMETER Experiment Name: At_2mM_SA_Sub_P Parameter: Age (day) Value: 14
  misc_feature: MA Experiment 20000347 PARAMETER Experiment Name: At_2mM_SA_Sub_P Parameter: Organism Value: A. thaliana
  misc_feature: MA Experiment 20000347 PARAMETER Experiment Name: At_2mM_SA_Sub_P Parameter: Plant Line Value: WS
  misc_feature: MA Experiment 20000347 PARAMETER Experiment Name: At_2mM_SA_Sub_P Parameter: Timepoint (hr) Value: 6
  misc_feature: MA Experiment 20000347 PARAMETER Experiment Name: At_2mM_SA_Sub_P Parameter: Tissue Value: Aerial
  misc_feature: MA Experiment 20000347 PARAMETER Experiment Name: At_2mM_SA_Sub_P Parameter: Treatment Value: 2mM SA vs. No Treatment
  misc_feature: MA Experiment ID: 20000440 Result: Up-regulated in Transcription
  misc_feature: MA Experiment 20000440 PARAMETER Experiment Name: At_Closed-Flower__Sub_P Parameter: Tissue Value: Closed Flower vs. Whole Plant
atgggaaatacatttggttcaagtttggcgagtttattcttcttgtgggcaactattcaacaaatcttcccaaaccatctcagaatcgccattaaagagtttcttatctccacaatacaacaactctcatttgtccagagattttccgacagattcatcaacttcttttcgccttatgtcgaaatcagcttctctcaatacgaagattatcaattcaatcacgcatttgcagccattgagacttaccttggggcaaaagcaactgataaagccaagcatctaagagcaagccaagttaaagagagtaaaggtttggtcttgaaacgagacgagactaaagtccgagatgagtatgaaggaggtactgtctggtgggagatggaaaccgactccacaggatatagaacattcaaactcactttccatagacgctcgcgagatattgtaaccgactcttacataaaatatgtttttgaagaaggcaaatcgattcaagccaagagcaagcagatgaagttgttcacaaataatccgagttctcactggggcactagcaagaagagtttttggagatatattgattttgagcatcccgcaagttttcacacgctagctatggatacaaagaagaaagaggagatcttgaatgatcttgctgcgtttagcaatggtaaagagtattacaagaaaataggtaaagcttggaagaggggttacttgctacatggaccaccagggaccggtaaatcaacaatgatcgctgcaatggcgaatcatttaaactatagtatctatgatcttgaactcacggctatacgtaacaactcggagttgaggaagctactcactgctacttctagcaagtcgatcatcgtgattgaagatatagattgttctttggatcttacgggaaagagaaagaaagagaaaaacttgatgacctcgagagaagatggagaacaaggtaccgaagaagacaagagttttgtaacactctcggggcttttgaacttcattgatggcatttggtctgcttgtggacaagagaggattattatcttcactacgaatcactttgagaaacttgacccggctttgatcaggagagggagaatggacatgcatattgagttgtcatactgttctttcgaggcgtttaagattctcgccaagaactatcttgatcttgatactcatcctctattcaagaagatcgaatcattattgaaggaaacgaagatcgcaccagctgatgttgctgagaacttgatgaagaagaatactgaaatagatgctgatggatctcttaaagatctaattcaagctctggaggggaagaagaagattcatggagctcaagtagatgaaccgaaggacaaatataccaagaagttttataaagcattttgcatgtcatctaaagcctga

SEQ ID NO: 73765 - protein, 475 aa, Arabidopsis thaliana
  peptide (1)..(475): Ceres Seq. ID no. 4978522
  misc_feature (238)..(433): Pfam Name: ATPase family associated with various cellular Pfam Description: ATPase family associated with various cellular
  misc_feature (1)..(475): Homolog of NCBI NO: 15233039 NR Description: unknown protein; protein id: At3g28600.1
  misc_feature (1)..(469): Homolog of NCBI NO: 9294274 NR Description: mitochondrial protein-like [Arabidopsis thaliana]
  misc_feature (1)..(469): Homolog of NCBI NO: 15233040 NR Description: unknown protein; protein id: At3g28610.1
  misc_feature (1)..(461): Homolog of NCBI NO: 10176992 NR Description: contains similarity to AAA-type
  misc_feature (1)..(461): Homolog of NCBI NO: 15242534 NR Description: putative protein; protein id: At5g40000.1
  misc_feature (6)..(456): Homolog of NCBI NO: 9294271 NR Description: mitochondrial protein-like [Arabidopsis thaliana]
  misc_feature (6)..(456): Homolog of NCBI NO: 15233036 NR Description: unknown protein; protein id: At3g28570.1
  misc_feature (6)..(468): Homolog of NCBI NO: 15233010 NR Description: hypothetical protein; protein id: At3g28510.1, by cDNA: gi_20466451 [Arabidopsis thaliana]
  misc_feature (3)..(460): Homolog of NCBI NO: 15242536 NR Description: putative protein; protein id: At5g40010.1
  misc_feature (3)..(464): Homolog of NCBI NO: 15233037 NR Description: hypothetical protein; protein id: At3g28580.1, by cDNA: gi_18175626 [Arabidopsis thaliana]
MGNTFGSSLASLFFLWATIQQIFPNHLRIAIKEFLISTIQQLSFVQRFSDRFINFFSPYVEISFSQYEDYQFNHAFAAIETYLGAKATDKAKHLRASQVKESKGLVLKRDETKVRDEYEGGTVWWEMETDSTGYRTFKLTFHRRSRDIVTDSYIKYVFEEGKSIQAKSKQMKLFTNNPSSHWGTSKKSFWRYIDFEHPASFHTLAMDTKKKEEILNDLAAFSNGKEYYKKIGKAWKRGYLLHGPPGTGKSTMIAAMANHLNYSIYDLELTAIRNNSELRKLLTATSSKSIIVIEDIDCSLDLTGKRKKEKNLMTSREDGEQGTEEDKSFVTLSGLLNFIDGIWSACGQERIIIFTTNHFEKLDPALIRRGRMDMHIELSYCSFEAFKILAKNYLDLDTHPLFKKIESLLKETKIAPADVAENLMKKNTEIDADGSLKDLIQALEGKKKIHGAQVDEPKDKYTKKFYKAFCMSSKA

SEQ ID NO: 73766 - protein, 349 aa, Arabidopsis thaliana
  peptide (1)..(349): Ceres Seq. ID no. 4978523
  misc_feature (112)..(307): Pfam Name: ATPase family associated with various cellular Pfam Description: ATPase family associated with various cellular
  misc_feature (1)..(349): Homolog of NCBI NO: 15233039 NR Description: unknown protein; protein id: At3g28600.1
  misc_feature (1)..(343): Homolog of NCBI NO: 9294274 NR Description: mitochondrial protein-like [Arabidopsis thaliana]
  misc_feature (1)..(343): Homolog of NCBI NO: 15233040 NR Description: unknown protein; protein id: At3g28610.1
  misc_feature (1)..(335): Homolog of NCBI NO: 10176992 NR Description: contains similarity to AAA-type
  misc_feature (1)..(335): Homolog of NCBI NO: 15242534 NR Description: putative protein; protein id: At5g40000.1
  misc_feature (1)..(330): Homolog of NCBI NO: 9294271 NR Description: mitochondrial protein-like [Arabidopsis thaliana]
  misc_feature (1)..(330): Homolog of NCBI NO: 15233036 NR Description: unknown protein; protein id: At3g28570.1
  misc_feature (1)..(342): Homolog of NCBI NO: 15233010 NR Description: hypothetical protein; protein id: At3g28510.1, by cDNA: gi_20466451 [Arabidopsis thaliana]
  misc_feature (1)..(334): Homolog of NCBI NO: 15242536 NR Description: putative protein; protein id: At5g40010.1
  misc_feature (1)..(338): Homolog of NCBI NO: 15233037 NR Description: hypothetical protein; protein id: At3g28580.1, by cDNA: gi_18175626 [Arabidopsis thaliana]
METDSTGYRTFKLTFHRRSRDIVTDSYIKYVFEEGKSIQAKSKQMKLFTNNPSSHWGTSKKSFWRYIDFEHPASFHTLAMDTKKKEEILNDLAAFSNGKEYYKKIGKAWKRGYLLHGPPGTGKSTMIAAMANHLNYSIYDLELTAIRNNSELRKLLTATSSKSIIVIEDIDCSLDLTGKRKKEKNLMTSREDGEQGTEEDKSFVTLSGLLNFIDGIWSACGQERIIIFTTNHFEKLDPALIRRGRMDMHIELSYCSFEAFKILAKNYLDLDTHPLFKKIESLLKETKIAPADVAENLMKKNTEIDADGSLKDLIQALEGKKKIHGAQVDEPKDKYTKKFYKAFCMSSKA

SEQ ID NO: 73767 - protein, 305 aa, Arabidopsis thaliana
  peptide (1)..(305): Ceres Seq. ID no. 4978524
  misc_feature (68)..(263): Pfam Name: ATPase family associated with various cellular Pfam Description: ATPase family associated with various cellular
  misc_feature (1)..(305): Homolog of NCBI NO: 15233039 NR Description: unknown protein; protein id: At3g28600.1
  misc_feature (1)..(299): Homolog of NCBI NO: 9294274 NR Description: mitochondrial protein-like [Arabidopsis thaliana]
  misc_feature (1)..(299): Homolog of NCBI NO: 15233040 NR Description: unknown protein; protein id: At3g28610.1
  misc_feature (1)..(291): Homolog of NCBI NO: 10176992 NR Description: contains similarity to AAA-type
  misc_feature (1)..(291): Homolog of NCBI NO: 15242534 NR Description: putative protein; protein id: At5g40000.1
  misc_feature (1)..(286): Homolog of NCBI NO: 9294271 NR Description: mitochondrial protein-like [Arabidopsis thaliana]
  misc_feature (1)..(286): Homolog of NCBI NO: 15233036 NR Description: unknown protein; protein id: At3g28570.1
  misc_feature (1)..(298): Homolog of NCBI NO: 15233010 NR Description: hypothetical protein; protein id: At3g28510.1, by cDNA: gi_20466451 [Arabidopsis thaliana]
  misc_feature (1)..(290): Homolog of NCBI NO: 15242536 NR Description: putative protein; protein id: At5g40010.1
  misc_feature (1)..(294): Homolog of NCBI NO: 15233037 NR Description: hypothetical protein; protein id: At3g28580.1, by cDNA: gi_18175626 [Arabidopsis thaliana]
MKLFTNNPSSHWGTSKKSFWRYIDFEHPASFHTLAMDTKKKEEILNDLAAFSNGKEYYKKIGKAWKRGYLLHGPPGTGKSTMIAAMANHLNYSIYDLELTAIRNNSELRKLLTATSSKSIIVIEDIDCSLDLTGKRKKEKNLMTSREDGEQGTEEDKSFVTLSGLLNFIDGIWSACGQERIIIFTTNHFEKLDPALIRRGRMDMHIELSYCSFEAFKILAKNYLDLDTHPLFKKIESLLKETKIAPADVAENLMKKNTEIDADGSLKDLIQALEGKKKIHGAQVDEPKDKYTKKFYKAFCMSSKA

SEQ ID NO: 73768 - DNA, 435 bp, Arabidopsis thaliana
  misc_feature (1)..(435): Ceres Seq. ID no. 4978568
  misc_feature: MA Experiment ID: 20000180 Result: Up-regulated in Transcription
  misc_feature: MA Experiment 20000180 PARAMETER Experiment Name: At_Germinating_Seeds_P Parameter: Age (hr) Value: 24 vs. 0
  misc_feature: MA Experiment 20000180 PARAMETER Experiment Name: At_Germinating_Seeds_P Parameter: Tissue Value: Germinating Seeds
  misc_feature: MA Experiment ID: 20000184 Result: Up-regulated in Transcription
  misc_feature: MA Experiment 20000184 PARAMETER Experiment Name: At_Shoots__P Parameter: Age (day) Value: 7
  misc_feature: MA Experiment 20000184 PARAMETER Experiment Name: At_Shoots__P Parameter: Tissue Value: Shoots vs. Whole Plant
  misc_feature: MA Experiment ID: 20000185 Result: Down-regulated in Transcription
  misc_feature: MA Experiment 20000185 PARAMETER Experiment Name: At_Roots__P Parameter: Age (day) Value: 7 vs. 21
  misc_feature: MA Experiment 20000185 PARAMETER Experiment Name: At_Roots__P Parameter: Organism Value: A. thaliana
  misc_feature: MA Experiment 20000185 PARAMETER Experiment Name: At_Roots__P Parameter: Tissue Value: Roots vs. Whole Plant
  misc_feature: MA Experiment ID: 20000437 Result: Down-regulated in Transcription
  misc_feature: MA Experiment 20000437 PARAMETER Experiment Name: At_Drought_P Parameter: Age (day) Value: 8
  misc_feature: MA Experiment 20000437 PARAMETER Experiment Name: At_Drought_P Parameter: Organism Value: A. thaliana
  misc_feature: MA Experiment 20000437 PARAMETER Experiment Name: At_Drought_P Parameter: Plant Line Value: WS
  misc_feature: MA Experiment 20000437 PARAMETER Experiment Name: At_Drought_P Parameter: Timepoint (hr) Value: 24
  misc_feature: MA Experiment 20000437 PARAMETER Experiment Name: At_Drought_P Parameter: Tissue Value: Whole Plant
  misc_feature: MA Experiment 20000437 PARAMETER Experiment Name: At_Drought_P Parameter: Treatment Value: Drought vs. No Drought
  misc_feature: MA Experiment ID: 20000438 Result: Up-regulated in Transcription
  misc_feature: MA Experiment 20000438 PARAMETER Experiment Name: At_Shoots__P Parameter: Age (day) Value: 14
  misc_feature: MA Experiment 20000438 PARAMETER Experiment Name: At_Shoots__P Parameter: Tissue Value: Shoots vs. Whole Plant
  misc_feature: MA Experiment ID: 20000439 Result: Down-regulated in Transcription
  misc_feature: MA Experiment 20000439 PARAMETER Experiment Name: At_Roots__P Parameter: Age (day) Value: 14 vs. 21
  misc_feature: MA Experiment 20000439 PARAMETER Experiment Name: At_Roots__P Parameter: Organism Value: A. thaliana
  misc_feature: MA Experiment 20000439 PARAMETER Experiment Name: At_Roots__P Parameter: Tissue Value: Roots vs. Whole Plant
  misc_feature: MA Experiment ID: 20000453 Result: Down-regulated in Transcription
  misc_feature: MA Experiment 20000453 PARAMETER Experiment Name: At_100uM_ABA_P Parameter: Age (day) Value: 15
  misc_feature: MA Experiment 20000453 PARAMETER Experiment Name: At_100uM_ABA_P Parameter: Organism Value: A. thaliana
  misc_feature: MA Experiment 20000453 PARAMETER Experiment Name: At_100uM_ABA_P Parameter: Plant Line Value: WS
  misc_feature: MA Experiment 20000453 PARAMETER Experiment Name: At_100uM_ABA_P Parameter: Timepoint (hr) Value: 24
  misc_feature: MA Experiment 20000453 PARAMETER Experiment Name: At_100uM_ABA_P Parameter: Tissue Value: Aerial
  misc_feature: MA Experiment 20000453 PARAMETER Experiment Name: At_100uM_ABA_P Parameter: Treatment Value: 100uM ABA vs. No Treatment
  misc_feature: MA Experiment ID: 20000495 Result: Down-regulated in Transcription
  misc_feature: MA Experiment 20000495 PARAMETER Experiment Name: At_Guard_Cells_P Parameter: Harvest Date Value: 8/2/2002
  misc_feature: MA Experiment 20000495 PARAMETER Experiment Name: At_Guard_Cells_P Parameter: Organism Value: A. thaliana
  misc_feature: MA Experiment 20000495 PARAMETER Experiment Name: At_Guard_Cells_P Parameter: Tissue Value: Guard Cells vs. Leaves
  misc_feature: MA Experiment ID: 20001248 Result: Down-regulated in Transcription
  misc_feature: MA Experiment 20001248 PARAMETER Experiment Name: At_Far-red-induction_P Parameter: Age (day) Value: 7
  misc_feature: MA Experiment 20001248 PARAMETER Experiment Name: At_Far-red-induction_P Parameter: Light Value: Far-red vs. White
  misc_feature: MA Experiment 20001248 PARAMETER Experiment Name: At_Far-red-induction_P Parameter: Organism Value: A. thaliana
  misc_feature: MA Experiment 20001248 PARAMETER Experiment Name: At_Far-red-induction_P Parameter: Plant Line Value: Columbia
  misc_feature: MA Experiment 20001248 PARAMETER Experiment Name: At_Far-red-induction_P Parameter: Timepoint (hr) Value: 4
  misc_feature: MA Experiment 20001248 PARAMETER Experiment Name: At_Far-red-induction_P Parameter: Tissue Value: Whole Plant
  misc_feature: MA Experiment ID: 20001450 Result: Down-regulated in Transcription
  misc_feature: MA Experiment 20001450 PARAMETER Experiment Name: At_Far-red-induction_P Parameter: Age (day) Value: 7
  misc_feature: MA Experiment 20001450 PARAMETER Experiment Name: At_Far-red-induction_P Parameter: Light Value: Far-red vs. White
  misc_feature: MA Experiment 20001450 PARAMETER Experiment Name: At_Far-red-induction_P Parameter: Organism Value: A. thaliana
  misc_feature: MA Experiment 20001450 PARAMETER Experiment Name: At_Far-red-induction_P Parameter: Plant Line Value: Columbia
  misc_feature: MA Experiment 20001450 PARAMETER Experiment Name: At_Far-red-induction_P Parameter: Timepoint (hr) Value: 8
  misc_feature: MA Experiment 20001450 PARAMETER Experiment Name: At_Far-red-induction_P Parameter: Tissue Value: Whole Plant
  misc_feature: MA Experiment ID: 20001757 Result: Up-regulated in Transcription
  misc_feature: MA Experiment 20001757 PARAMETER Experiment Name: At_50mM_NH4NO3_L-to-H_P Parameter: Timepoint (hr) Value: 6
  misc_feature: MA Experiment 20001757 PARAMETER Experiment Name: At_50mM_NH4NO3_L-to-H_P Parameter: Tissue Value: Leaf
  misc_feature: MA Experiment 20001757 PARAMETER Experiment Name: At_50mM_NH4NO3_L-to-H_P Parameter: Treatment Value: 50mM NH4NO3 vs 100mM Mannitol
  misc_feature: MA Experiment ID: 20001905 Result: Down-regulated in Transcription
  misc_feature: MA Experiment 20001905 PARAMETER Experiment Name: At_Drought_Reproduction_P Parameter: Age (day) Value: 40
  misc_feature: MA Experiment 20001905 PARAMETER Experiment Name: At_Drought_Reproduction_P Parameter: Organism Value: A. thaliana
  misc_feature: MA Experiment 20001905 PARAMETER Experiment Name: At_Drought_Reproduction_P Parameter: Plant Line Value: WS
  misc_feature: MA Experiment 20001905 PARAMETER Experiment Name: At_Drought_Reproduction_P Parameter: Timepoint (day) Value: 10
  misc_feature: MA Experiment 20001905 PARAMETER Experiment Name: At_Drought_Reproduction_P Parameter: Tissue Value: Rosettes
  misc_feature: MA Experiment 20001905 PARAMETER Experiment Name: At_Drought_Reproduction_P Parameter: Treatment Value: Drought vs. No Drought
atggcaaataagaagccatcaccttctgctgcaacaagaacaataacctcaaagaagagcacagcgactccacaggtgaaactgctgacaagagtcgagcagctcaagcttctgaccaaagccgagaaagcaggacttttgtctttagcagagaaatcaggtttctctctatcgaccatcgagcgtcttggattgctgaccaaagcagaggagttcggcgttttgtctgccgccacaaacccggaaacgcctggaacgttattcactttgagcctcggtttactccttcttggaccggtttttgcatatgtggttcctgaagattacacttgggaagtagtgattcaggttcttgtggctctactctctgttcttggtggctctgctgcttttgctgcttctggttttgtctccaatttgcagaaatctgattag

SEQ ID NO: 73769 - protein, 144 aa, Arabidopsis thaliana; identical to SEQ ID NO: 31057
  peptide (1)..(144): Ceres Seq. ID no. 4978569
  misc_feature (1)..(144): Homolog of NCBI NO: 15241507 NR Description: putative protein; protein id: At5g08050.1, by cDNA: gi_17978980 [Arabidopsis thaliana]
  misc_feature (1)..(144): Homolog of NCBI NO: 17978981 NR Description: AT5g08050/F13G24_250 [Arabidopsis thaliana]
  misc_feature (25)..(144): Homolog of NCBI NO: 34912136 NR Description: OSJNBb0024F06.20 [Oryza sativa (japonica
  misc_feature (26)..(144): Homolog of NCBI NO: 18410681 NR Description: expressed protein; protein id: At1g74730.1, by cDNA: 12408., supported by cDNA: gi_14423495 [Arabidopsis >gi|14423496|gb|AAK62430.1|AF386985_1 Unknown protein
  misc_feature (26)..(144): Homolog of NCBI NO: 25406370 NR Description: hypothetical protein F25A4.30 [imported] - thaliana >gi|5882720|gb|AAD55273.1|AC008263_4 Similar to phosphoribosylanthranilate transferase from Pisum sativum and

SEQ ID NO: 73770 - DNA, 1653 bp, Arabidopsis thaliana
  misc_feature (1)..(1653): Ceres Seq. ID no. 4979423
  misc_feature: MA Experiment ID: 108463 Result: Down-regulated in Transcription
  misc_feature: MA Experiment 108463 PARAMETER Experiment Name: At_Germinating_Seeds_cDNA_P Parameter: Age (day) Value: 3 vs. 0
  misc_feature: MA Experiment 108463 PARAMETER Experiment Name: At_Germinating_Seeds_cDNA_P Parameter: Tissue Value: Germinating Seeds
atgacagagatcttcagtgacaccagcatcagacagttatctcaaatgctactatcactaatcttcttccacatatccgaatacattctagccatcaccattcacggagcatcaaacgtaactcttagttcgcttttaatcaccaagcattacgctttagcaatgcttctgtcgcttctcgaatacctaacggagattatcctcttcccggggctgaaacaacactggtgggtcagcaactttggactcataatgatcatcgttggggaaatcatcaggaaggcagcgataataacagcgggaagatcgttcactcacctcataaagatcaactacgaagagcatcacgggcttgtgactcatggtgtgtatagactaatgaggcatccaagttactgcggttttctcatctggtcggtcgggacacaagttatgctctgtaaccccgtttcagcagttgcgttcgcggttgtcgtgtggcggttttttgctcagagaataccgtacgaggagtattttctgaatcagttttttggggtacagtatctagagtatgcagagagtgttgcctctgtggagtcggtaaccatgttatgcggaggctctcgcgcctccgtgcatttgtgggaccatcgtcatcctcctaggctcggtgctaaggttttgcggaaatcttcgttcatgctcagaccttgttcggctatatcgcagcagcggataaagtcgtcgtttaggtctcactgtaaaactccaagaaaaatcccagctcctctcgattgtttcagccagggagatgatcatcctgagctttcagctgaagggctttccccagttgcaggaggcattgttgctctagggaagtttgatgccctgcatatcggtcatcgagagcttgcaattcaagctgcaagaattggtactccgtatctactgtcgtttgttggattggctgaagtacttggttggaagcctagagcaccaatagtagccaaatgcgacagaaaacgagtgctttcctcttgggcatcgtattgtggtaacatagcaccggtagagtttgagattgaatttgccagcgttcgacaccttaacccacaacagtttgtcgagaagttgtcaagagagcttagagtctgcggagttgtggcaggcgaaaattacaggtttggataccgggcttctggtgacgcctctgaacttgtgaggttatgcaaagactttggtatcagcgcttacatcattaactccgtgatggataagaaccaagtctctgtaaacacagaggaggaggactcaaagtcgaaagaaagaggtcaagtctcatccacacgagtccgtcatgctctagctgcaggagatgtgaggtatgtaacagagctcctcggcagaccacacagggtcatctctcggacaagaacacaagatttaacgagcaaaagagggaggatctcgcttcagacatcttcgctactaaatttaccaccagggaatggagtttacaaagcatgctcgcttatagttggtgataagcatccaatttcgtgtaaggttattgtcgatacatcgaatctctatatagaaacagaggaagaacgtttccacaactcagatgagtctcaagagtttcaactcttagggattgagttcggttaa

SEQ ID NO: 73771 - protein, 550 aa, Arabidopsis thaliana
  peptide (1)..(550): Ceres Seq. ID no. 4979424
  misc_feature (197)..(550): Homolog of NCBI NO: 18420664 NR Description: expressed protein; protein id: At5g23330.1, by cDNA: 158431. [Arabidopsis thaliana]
  misc_feature (197)..(550): Homolog of NCBI NO: 21553715 NR Description: unknown [Arabidopsis thaliana]
  misc_feature (118)..(531): Homolog of NCBI NO: 10178276 NR Description: putative protein [Arabidopsis thaliana]
  misc_feature (1)..(100): Homolog of NCBI NO: 10178276 NR Description: putative protein [Arabidopsis thaliana]
  misc_feature (197)..(550): Homolog of NCBI NO: 22326656 NR Description: putative protein; protein id: At5g08340.1, by cDNA: gi_17380945, supported by cDNA: gi_20258952 [Arabidopsis >gi|17380946|gb|AAL36285.1| unknown protein [Arabidopsis
  misc_feature (1)..(191): Homolog of NCBI NO: 15237283 NR Description: farnesyl cysteine carboxyl methyltransferase-like protein id: At5g23320.1 [Arabidopsis thaliana]
  misc_feature (1)..(191): Homolog of NCBI NO: 18415785 NR Description: Expressed protein; protein id: At5g08335.1, by cDNA: gi_14334709 [Arabidopsis thaliana] unknown protein [Arabidopsis thaliana]
  misc_feature (278)..(550): Homolog of NCBI NO: 29150370 NR Description: unknow protein [Oryza sativa (japonica
  misc_feature (19)..(191): Homolog of NCBI NO: 38344151 NR Description: OSJNBa0041A02.18 [Oryza sativa (japonica
  misc_feature (5)..(189): Homolog of NCBI NO: 6912430 NR Description: isoprenylcysteine carboxyl methyltransferase
MTEIFSDTSIRQLSQMLLSLIFFHISEYILAITIHGASNVTLSSLLITKHYALAMLLSLLEYLTEIILFPGLKQHWWVSNFGLIMIIVGEIIRKAAIITAGRSFTHLIKINYEEHHGLVTHGVYRLMRHPSYCGFLIWSVGTQVMLCNPVSAVAFAVVVWRFFAQRIPYEEYFLNQFFGVQYLEYAESVASVESVTMLCGGSRASVHLWDHRHPPRLGAKVLRKSSFMLRPCSAISQQRIKSSFRSHCKTPRKIPAPLDCFSQGDDHPELSAEGLSPVAGGIVALGKFDALHIGHRELAIQAARIGTPYLLSFVGLAEVLGWKPRAPIVAKCDRKRVLSSWASYCGNIAPVEFEIEFASVRHLNPQQFVEKLSRELRVCGVVAGENYRFGYRASGDASELVRLCKDFGISAYIINSVMDKNQVSVNTEEEDSKSKERGQVSSTRVRHALAAGDVRYVTELLGRPHRVISRTRTQDLTSKRGRISLQTSSLLNLPPGNGVYKACSLIVGDKHPISCKVIVDTSNLYIETEEERFHNSDESQEFQLLGIEFG

SEQ ID NO: 73772 - protein, 535 aa, Arabidopsis thaliana
  peptide (1)..(535): Ceres Seq. ID no. 4979425
  misc_feature (182)..(535): Homolog of NCBI NO: 18420664 NR Description: expressed protein; protein id: At5g23330.1, by cDNA: 158431. [Arabidopsis thaliana]
  misc_feature (182)..(535): Homolog of NCBI NO: 21553715 NR Description: unknown [Arabidopsis thaliana]
  misc_feature (103)..(516): Homolog of NCBI NO: 10178276 NR Description: putative protein [Arabidopsis thaliana]
  misc_feature (1)..(85): Homolog of NCBI NO: 10178276 NR Description: putative protein [Arabidopsis thaliana]
  misc_feature (182)..(535): Homolog of NCBI NO: 22326656 NR Description: putative protein; protein id: At5g08340.1, by cDNA: gi_17380945, supported by cDNA: gi_20258952 [Arabidopsis >gi|17380946|gb|AAL36285.1| unknown protein [Arabidopsis
  misc_feature (1)..(176): Homolog of NCBI NO: 15237283 NR Description: farnesyl cysteine carboxyl methyltransferase-like protein id: At5g23320.1 [Arabidopsis thaliana]
  misc_feature (1)..(176): Homolog of NCBI NO: 18415785 NR Description: Expressed protein; protein id: At5g08335.1, by cDNA: gi_14334709 [Arabidopsis thaliana] unknown protein [Arabidopsis thaliana]
  misc_feature (263)..(535): Homolog of NCBI NO: 29150370 NR Description: unknow protein [Oryza sativa (japonica
  misc_feature (4)..(176): Homolog of NCBI NO: 38344151 NR Description: OSJNBa0041A02.18 [Oryza sativa (japonica
  misc_feature (1)..(174): Homolog of NCBI NO: 6912430 NR Description: isoprenylcysteine carboxyl methyltransferase
MLLSLIFFHISEYILAITIHGASNVTLSSLLITKHYALAMLLSLLEYLTEIILFPGLKQHWWVSNFGLIMIIVGEIIRKAAIITAGRSFTHLIKINYEEHHGLVTHGVYRLMRHPSYCGFLIWSVGTQVMLCNPVSAVAFAVVVWRFFAQRIPYEEYFLNQFFGVQYLEYAESVASVESVTMLCGGSRASVHLWDHRHPPRLGAKVLRKSSFMLRPCSAISQQRIKSSFRSHCKTPRKIPAPLDCFSQGDDHPELSAEGLSPVAGGIVALGKFDALHIGHRELAIQAARIGTPYLLSFVGLAEVLGWKPRAPIVAKCDRKRVLSSWASYCGNIAPVEFEIEFASVRHLNPQQFVEKLSRELRVCGVVAGENYRFGYRASGDASELVRLCKDFGISAYIINSVMDKNQVSVNTEEEDSKSKERGQVSSTRVRHALAAGDVRYVTELLGRPHRVISRTRTQDLTSKRGRISLQTSSLLNLPPGNGVYKACSLIVGDKHPISCKVIVDTSNLYIETEEERFHNSDESQEFQLLGIEFG

SEQ ID NO: 73773 - protein, 496 aa, Arabidopsis thaliana
  peptide (1)..(496): Ceres Seq. ID no. 4979426
  misc_feature (143)..(496): Homolog of NCBI NO: 18420664 NR Description: expressed protein; protein id: At5g23330.1, by cDNA: 158431. [Arabidopsis thaliana]
  misc_feature (143)..(496): Homolog of NCBI NO: 21553715 NR Description: unknown [Arabidopsis thaliana]
  misc_feature (64)..(477): Homolog of NCBI NO: 10178276 NR Description: putative protein [Arabidopsis thaliana]
  misc_feature (1)..(46): Homolog of NCBI NO: 10178276 NR Description: putative protein [Arabidopsis thaliana]
  misc_feature (143)..(496): Homolog of NCBI NO: 22326656 NR Description: putative protein; protein id: At5g08340.1, by cDNA: gi_17380945, supported by cDNA: gi_20258952 [Arabidopsis >gi|17380946|gb|AAL36285.1| unknown protein [Arabidopsis
  misc_feature (1)..(137): Homolog of NCBI NO: 15237283 NR Description: farnesyl cysteine carboxyl methyltransferase-like protein id: At5g23320.1 [Arabidopsis thaliana]
  misc_feature (1)..(137): Homolog of NCBI NO: 18415785 NR Description: Expressed protein; protein id: At5g08335.1, by cDNA: gi_14334709 [Arabidopsis thaliana] unknown protein [Arabidopsis thaliana]
  misc_feature (224)..(496): Homolog of NCBI NO: 29150370 NR Description: unknow protein [Oryza sativa (japonica
  misc_feature (1)..(137): Homolog of NCBI NO: 38344151 NR Description: OSJNBa0041A02.18 [Oryza sativa (japonica
  misc_feature (1)..(135): Homolog of NCBI NO: 6912430 NR Description: isoprenylcysteine carboxyl methyltransferase
MLLSLLEYLTEIILFPGLKQHWWVSNFGLIMIIVGEIIRKAAIITAGRSFTHLIKINYEEHHGLVTHGVYRLMRHPSYCGFLIWSVGTQVMLCNPVSAVAFAVVVWRFFAQRIPYEEYFLNQFFGVQYLEYAESVASVESVTMLCGGSRASVHLWDHRHPPRLGAKVLRKSSFMLRPCSAISQQRIKSSFRSHCKTPRKIPAPLDCFSQGDDHPELSAEGLSPVAGGIVALGKFDALHIGHRELAIQAARIGTPYLLSFVGLAEVLGWKPRAPIVAKCDRKRVLSSWASYCGNIAPVEFEIEFASVRHLNPQQFVEKLSRELRVCGVVAGENYRFGYRASGDASELVRLCKDFGISAYIINSVMDKNQVSVNTEEEDSKSKERGQVSSTRVRHALAAGDVRYVTELLGRPHRVISRTRTQDLTSKRGRISLQTSSLLNLPPGNGVYKACSLIVGDKHPISCKVIVDTSNLYIETEEERFHNSDESQEFQLLGIEFG

SEQ ID NO: 73774 - DNA, 723 bp, Arabidopsis thaliana
  misc_feature (1)..(723): Ceres Seq. ID no. 4979462
  misc_feature: MA Experiment ID: 20000314 Result: Down-regulated in Transcription
  misc_feature: MA Experiment 20000314 PARAMETER Experiment Name: At_14day_Shoots-Roots_Sub_P Parameter: Age (day) Value: 14
  misc_feature: MA Experiment 20000314 PARAMETER Experiment Name: At_14day_Shoots-Roots_Sub_P Parameter: Organism Value: A. thaliana
  misc_feature: MA Experiment 20000314 PARAMETER Experiment Name: At_14day_Shoots-Roots_Sub_P Parameter: Plant Line Value: WS
  misc_feature: MA Experiment 20000314 PARAMETER Experiment Name: At_14day_Shoots-Roots_Sub_P Parameter: Tissue Value: Roots vs. Whole Plant
  misc_feature: MA Experiment ID: 20000328 Result: Down-regulated in Transcription
  misc_feature: MA Experiment 20000328 PARAMETER Experiment Name: At_42deg_Heat_Sub_P Parameter: Age (day) Value: 14
  misc_feature: MA Experiment 20000328 PARAMETER Experiment Name: At_42deg_Heat_Sub_P Parameter: Organism Value: A. thaliana
  misc_feature: MA Experiment 20000328 PARAMETER Experiment Name: At_42deg_Heat_Sub_P Parameter: Plant Line Value: WS
  misc_feature: MA Experiment 20000328 PARAMETER Experiment Name: At_42deg_Heat_Sub_P Parameter: Temperature (deg C) Value: 42 vs. 22
  misc_feature: MA Experiment 20000328 PARAMETER Experiment Name: At_42deg_Heat_Sub_P Parameter: Timepoint (hr) Value: 6
  misc_feature: MA Experiment 20000328 PARAMETER Experiment Name: At_42deg_Heat_Sub_P Parameter: Tissue Value: Aerial
  misc_feature: MA Experiment ID: 20000355 Result: Up-regulated in Transcription
  misc_feature: MA Experiment 20000355 PARAMETER Experiment Name: At_Siliques_Sub_P Parameter: Age (day) Value: 21
  misc_feature: MA Experiment 20000355 PARAMETER Experiment Name: At_Siliques_Sub_P Parameter: Organism Value: A. thaliana
  misc_feature: MA Experiment 20000355 PARAMETER Experiment Name: At_Siliques_Sub_P Parameter: Plant Line Value: WS
  misc_feature: MA Experiment 20000355 PARAMETER Experiment Name: At_Siliques_Sub_P Parameter: Tissue Value: Less Than 5mm Siliques vs. Whole Plant
atgttactgattcgaacagcgacggtcgctcttcttctaatcgcgtttcttgaaaacgctgcgtggtgctgcaatgatgcttgtgtttcgggctctctcggggttcatcgacttgttgaggctctgaaacacgctttcgcagttagaatgaaccttggggatccggattttgtcgatgtttctaaggttatttctgatatgttgtctacaaattttgcacaaggcttgaagaaaaagataaacgacaacaaaacctttgatccaaattattacggtggcaggtgggatcagattaacgaccatgggacaagccatttatcaatcatagatagcgagaggaatgttgtttcactgactagtacaataaacagttactttggggcattgatgttatctccaagcaccggaattgttctgaacaacgaaatggatgatttctcaatccccatgaaatccagcagtaacctaactgtgccaccaccggcaccggccaatttcattcgtcctgggaaacgacctctgtcttctatgacacccaccattgtactcaaggatggtaaagtgaaagcctccgtgggtgcgagcggaggactgtacatcatcgctgggacaacagaagtttttctgaattatttcttcctcaagatggatcctctttcttccgttttggctccaagaatctaccatcagctgataccaaacatagtttcgtatgaaaactag

SEQ ID NO: 73775 - protein, 240 aa, Arabidopsis thaliana
  peptide (1)..(240): Ceres Seq. ID no. 4979463
  misc_feature (50)..(240): Pfam Name: Gamma-glutamyltranspeptidase Pfam Description: Gamma-glutamyltranspeptidase
  misc_feature (50)..(240): Homolog of NCBI NO: 15222461 NR Description: putative gamma-glutamyltransferase (light chain protein id: At1g69820.1 [Arabidopsis thaliana]
  misc_feature (29)..(240): Homolog of NCBI NO: 15235951 NR Description: putative gamma-glutamyltransferase; protein id:
  misc_feature (1)..(20): Homolog of NCBI NO: 15235951 NR Description: putative gamma-glutamyltransferase; protein id:
  misc_feature (29)..(240): Homolog of NCBI NO: 27348118 NR Description: gamma-glutamyl transferase [Raphanus sativus]
  misc_feature (29)..(240): Homolog of NCBI NO: 7433816 NR Description: probable gamma-glutamyltransferase (EC 2.3.2.2)
  misc_feature (29)..(240): Homolog of NCBI NO: 22329258 NR Description: putative gamma-glutamyltransferase; protein id: supported by cDNA: gi_17978921 [Arabidopsis thaliana] AT4g39640/T19P19_30 [Arabidopsis thaliana]
  misc_feature (29)..(240): Homolog of NCBI NO: 28208262 NR Description: gamma-glutamyl transferase [Raphanus sativus]
  misc_feature (33)..(240): Homolog of NCBI NO: 2129587 NR Description: gamma-glutamyltransferase (EC 2.3.2.2) -
  misc_feature (30)..(240): Homolog of NCBI NO: 38567882 NR Description: OSJNBa0036B21.10 [Oryza sativa (japonica
  misc_feature (30)..(240): Homolog of NCBI NO: 15233493 NR Description: gamma-glutamyltransferase-like protein; protein
MLLIRTATVALLLIAFLENAAWCCNDACVSGSLGVHRLVEALKHAFAVRMNLGDPDFVDVSKVISDMLSTNFAQGLKKKINDNKTFDPNYYGGRWDQINDHGTSHLSIIDSERNVVSLTSTINSYFGALMLSPSTGIVLNNEMDDFSIPMKSSSNLTVPPPAPANFIRPGKRPLSSMTPTIVLKDGKVKASVGASGGLYIIAGTTEVFLNYFFLKMDPLSSVLAPRIYHQLIPNIVSYEN

SEQ ID NO: 73776 - protein, 191 aa, Arabidopsis thaliana; identical to SEQ ID NO: 71559
  peptide (1)..(191): Ceres Seq. ID no. 4979464
  misc_feature (1)..(191): Pfam Name: Gamma-glutamyltranspeptidase Pfam Description: Gamma-glutamyltranspeptidase
  misc_feature (1)..(191): Homolog of NCBI NO: 15222461 NR Description: putative gamma-glutamyltransferase (light chain protein id: At1g69820.1 [Arabidopsis thaliana]
  misc_feature (1)..(191): Homolog of NCBI NO: 15235951 NR Description: putative gamma-glutamyltransferase; protein id:
  misc_feature (1)..(191): Homolog of NCBI NO: 27348118 NR Description: gamma-glutamyl transferase [Raphanus sativus]
  misc_feature (1)..(191): Homolog of NCBI NO: 7433816 NR Description: probable gamma-glutamyltransferase (EC 2.3.2.2)
  misc_feature (1)..(191): Homolog of NCBI NO: 22329258 NR Description: putative gamma-glutamyltransferase; protein id: supported by cDNA: gi_17978921 [Arabidopsis thaliana] AT4g39640/T19P19_30 [Arabidopsis thaliana]
  misc_feature (1)..(191): Homolog of NCBI NO: 28208262 NR Description: gamma-glutamyl transferase [Raphanus sativus]
  misc_feature (1)..(191): Homolog of NCBI NO: 2129587 NR Description: gamma-glutamyltransferase (EC 2.3.2.2) -
  misc_feature (1)..(191): Homolog of NCBI NO: 38567882 NR Description: OSJNBa0036B21.10 [Oryza sativa (japonica
  misc_feature (1)..(191): Homolog of NCBI NO: 15233493 NR Description: gamma-glutamyltransferase-like protein; protein
  misc_feature (1)..(191): Homolog of NCBI NO: 34895870 NR Description: putative gamma-glutamyltransferase [Oryza sativa

SEQ ID NO: 73777 - protein, 174 aa, Arabidopsis thaliana; identical to SEQ ID NO: 71560
  peptide (1)..(174): Ceres Seq. ID no. 4979465
  misc_feature (1)..(174): Pfam Name: Gamma-glutamyltranspeptidase Pfam Description: Gamma-glutamyltranspeptidase
  misc_feature (1)..(174): Homolog of NCBI NO: 15222461 NR Description: putative gamma-glutamyltransferase (light chain protein id: At1g69820.1 [Arabidopsis thaliana]
  misc_feature (1)..(174): Homolog of NCBI NO: 15235951 NR Description: putative gamma-glutamyltransferase; protein id:
  misc_feature (1)..(174): Homolog of NCBI NO: 27348118 NR Description: gamma-glutamyl transferase [Raphanus sativus]
  misc_feature (1)..(174): Homolog of NCBI NO: 7433816 NR Description: probable gamma-glutamyltransferase (EC 2.3.2.2)
  misc_feature (1)..(174): Homolog of NCBI NO: 22329258 NR Description: putative gamma-glutamyltransferase; protein id: supported by cDNA: gi_17978921 [Arabidopsis thaliana] AT4g39640/T19P19_30 [Arabidopsis thaliana]
  misc_feature (1)..(174): Homolog of NCBI NO: 28208262 NR Description: gamma-glutamyl transferase [Raphanus sativus]
  misc_feature (1)..(174): Homolog of NCBI NO: 2129587 NR Description: gamma-glutamyltransferase (EC 2.3.2.2) -
  misc_feature (1)..(174): Homolog of NCBI NO: 38567882 NR Description: OSJNBa0036B21.10 [Oryza sativa (japonica
  misc_feature (1)..(174): Homolog of NCBI NO: 15233493 NR Description: gamma-glutamyltransferase-like protein; protein
  misc_feature (1)..(174): Homolog of NCBI NO: 34895870 NR Description: putative gamma-glutamyltransferase [Oryza sativa

SEQ ID NO: 73778 - DNA, 1422 bp, Arabidopsis thaliana
  misc_feature (1)..(1422): Ceres Seq. ID no. 4980355
  misc_feature: MA Experiment ID: 20000171 Result: Up-regulated in Transcription
  misc_feature: MA Experiment 20000171 PARAMETER Experiment Name: At_42deg_Heat_P Parameter: Age (day) Value: 14
  misc_feature: MA Experiment 20000171 PARAMETER Experiment Name: At_42deg_Heat_P Parameter: Organism Value: A. thaliana
  misc_feature: MA Experiment 20000171 PARAMETER Experiment Name: At_42deg_Heat_P Parameter: Plant Line Value: WS
  misc_feature: MA Experiment 20000171 PARAMETER Experiment Name: At_42deg_Heat_P Parameter: Temperature (deg C) Value: 42 vs. 22
  misc_feature: MA Experiment 20000171 PARAMETER Experiment Name: At_42deg_Heat_P Parameter: Timepoint (hr) Value: 1
  misc_feature: MA Experiment 20000171 PARAMETER Experiment Name: At_42deg_Heat_P Parameter: Tissue Value: Aerial
  misc_feature: MA Experiment ID: 20000185 Result: Up-regulated in Transcription
  misc_feature: MA Experiment 20000185 PARAMETER Experiment Name: At_Roots__P Parameter: Age (day) Value: 7 vs. 21
  misc_feature: MA Experiment 20000185 PARAMETER Experiment Name: At_Roots__P Parameter: Organism Value: A. thaliana
  misc_feature: MA Experiment 20000185 PARAMETER Experiment Name: At_Roots__P Parameter: Tissue Value: Roots vs. Whole Plant
  misc_feature: MA Experiment ID: 20000269 Result: Up-regulated in Transcription
  misc_feature: MA Experiment 20000269 PARAMETER Experiment Name: At_1mM_KNO3_L-vs-H_Roots_P Parameter: Age (day) Value: 7,10,12
  misc_feature: MA Experiment 20000269 PARAMETER Experiment Name: At_1mM_KNO3_L-vs-H_Roots_P Parameter: Organism Value: A. thaliana
  misc_feature: MA Experiment 20000269 PARAMETER Experiment Name: At_1mM_KNO3_L-vs-H_Roots_P Parameter: Plant Line Value: WS
  misc_feature: MA Experiment 20000269 PARAMETER Experiment Name: At_1mM_KNO3_L-vs-H_Roots_P Parameter: Timepoint (day) Value: 7,10,12
  misc_feature: MA Experiment 20000269 PARAMETER Experiment Name: At_1mM_KNO3_L-vs-H_Roots_P Parameter: Tissue Value: Roots
  misc_feature: MA Experiment 20000269 PARAMETER Experiment Name: At_1mM_KNO3_L-vs-H_Roots_P Parameter: Treatment Value: 1mM KNO3 vs. 50mM KNO3
  misc_feature: MA Experiment ID: 20000439 Result: Up-regulated in Transcription
  misc_feature: MA Experiment 20000439 PARAMETER Experiment Name: At_Roots__P Parameter: Age (day) Value: 14 vs. 21
  misc_feature: MA Experiment 20000439 PARAMETER Experiment Name: At_Roots__P Parameter: Organism Value: A. thaliana
  misc_feature: MA Experiment 20000439 PARAMETER Experiment Name: At_Roots__P Parameter: Tissue Value: Roots vs. Whole Plant
  misc_feature: MA Experiment ID: 20000451 Result: Up-regulated in Transcription
  misc_feature: MA Experiment 20000451 PARAMETER Experiment Name: At_CS6879_Shoots-Roots_P Parameter: Age (day) Value: 14
  misc_feature: MA Experiment 20000451 PARAMETER Experiment Name: At_CS6879_Shoots-Roots_P Parameter: Organism Value: A. thaliana
  misc_feature: MA Experiment 20000451 PARAMETER Experiment Name: At_CS6879_Shoots-Roots_P Parameter: Plant Line Value: CS6879 vs. WS
  misc_feature: MA Experiment 20000451 PARAMETER Experiment Name: At_CS6879_Shoots-Roots_P Parameter: Tissue Value: Roots
  misc_feature: MA Experiment ID: 20000527 Result: Down-regulated in Transcription
  misc_feature: MA Experiment 20000527 PARAMETER Experiment Name: At_10percent_PEG_P Parameter: Age (day) Value: 20
  misc_feature: MA Experiment 20000527 PARAMETER Experiment Name: At_10percent_PEG_P Parameter: Organism Value: A. thaliana
  misc_feature: MA Experiment 20000527 PARAMETER Experiment Name: At_10percent_PEG_P Parameter: Plant Line Value: WS
  misc_feature: MA Experiment 20000527 PARAMETER Experiment Name: At_10percent_PEG_P Parameter: Timepoint (day) Value: 20
  misc_feature: MA Experiment 20000527 PARAMETER Experiment Name: At_10percent_PEG_P Parameter: Tissue Value: Whole Plant
  misc_feature: MA Experiment 20000527 PARAMETER Experiment Name: At_10percent_PEG_P Parameter: Treatment Value: 10percent PEG vs. No Treatment
atgtatttgacaataatattcctcttcattagctccattattttccctctcctattcttccttggaaaacatttatcaaacttccgttatcccaaccttcctccgggaaagattggctttcccttaataggagagactttatcctttctctctgctggccgtcaaggccacccggagaagtttgtcaccgaccgagttcgtcatttctcctcaggtatcttcaagacccacctctttgggtctcccttcgcggtggtgactggtgcctctgggaacaagtttctattcaccaacgaaaacaagcttgtgatctcatggtggccagattcggtgaacaagatcttcccttcttcaacgcagaccagctctaaggaagaggccatcaagacgaggatgcttcttatgccgtccatgaagcctgaggctttgagaaggtatgttggtgttatggatgagattgctcagaaacattttgagacggaatgggccaaccaagatcaacttattgtcttccctctcaccaaaaagttcacgttttctatagcatgccgtttgttcctgagcatggacgacctcgaaagagtaagaaaactcgaagagccattcactacggttatgacgggtgtcttctcaatcccaatagatttaccgggaacacggtttaaccgtgccatcaaggcgtcaaggttactcagcaaagaggtttcaacgatcattaggcagagaaaagaagagctgaaggccgggaaagtatcagtggaacaggacatcctatctcatatgttgatgaatataggagagaccaaagacgaggatttggctgataagattattgccttgttaatcggaggacatgacacaacaagtatcgtatgcacattcgttgtcaactatcttgctgagttccctcatatctaccaacgtgtgctagaagagcaaaaggagatactaaacaacaaagacgtaaacgaaaaattaacgtgggaggacattgagaaaatgagatattcatggaatgttgcatgtgaagtgatgagaattgttcctcctcttgctggcacttttcgtgaggccatcgatcacttctcttttaagggtttttacatccccaaaggatggaagttatattggagtgccaccgctacgcataagaatccagaatactttccggaaccagagaaatttgagccaagccgatttgaaggaagtggtccgaagccttatacatatgttccctttggaggaggatccaggatatgtccagggagggagtatgctcgtctagagattcttatatttatgcacaatcttgttaagagatttaagtgggaaaaagtgtttccaaaagaaaataaattagtggctgatcccgcaccaataccagccaaaggtctccctattagaatctttcctcagtcttga

SEQ ID NO: 73779 - protein, 473 aa, Arabidopsis thaliana
  peptide (1)..(473): Ceres Seq. ID no. 4980356
  misc_feature (1)..(473): Homolog of NCBI NO: 15239304 NR Description: cytochrome p450 family; protein id: At5g36110.1
  misc_feature (1)..(311): Homolog of NCBI NO: 15239310 NR Description: putative protein; protein id: At5g36140.1 thaliana] >gi|8777299|dbj|BAA96889.1| contains similarity to
  misc_feature (5)..(469): Homolog of NCBI NO: 24745923 NR Description: cytochrome P450 [Solanum tuberosum]
  misc_feature (4)..(473): Homolog of NCBI NO: 28380196 NR Description: Taxane 13-alpha-hydroxylase
  misc_feature (3)..(473): Homolog of NCBI NO: 28380205 NR Description: Taxane 10-beta-hydroxylase
  misc_feature (3)..(473): Homolog of NCBI NO: 30350220 NR Description: taxane 14b-hydroxylase [Taxus cuspidata]
  misc_feature (5)..(473): Homolog of NCBI NO: 24266823 NR Description: 5-alpha-taxadienol-10-beta-hydroxylase [Taxus
  misc_feature (7)..(473): Homolog of NCBI NO: 34901946 NR Description: 5-alpha-taxadienol-10-beta-hydroxylase-like
  misc_feature (6)..(469): Homolog of NCBI NO: 30694740 NR Description: cytochrome P450 family [Arabidopsis thaliana] cytochrome P450 [Arabidopsis thaliana] AT5g45340/K9E15_12 [Arabidopsis thaliana]
  misc_feature (6)..(442): Homolog of NCBI NO: 30694744 NR Description: cytochrome P450 family [Arabidopsis thaliana]
MYLTIIFLFISSIIFPLLFFLGKHLSNFRYPNLPPGKIGFPLIGETLSFLSAGRQGHPEKFVTDRVRHFSSGIFKTHLFGSPFAVVTGASGNKFLFTNENKLVISWWPDSVNKIFPSSTQTSSKEEAIKTRMLLMPSMKPEALRRYVGVMDEIAQKHFETEWANQDQLIVFPLTKKFTFSIACRLFLSMDDLERVRKLEEPFTTVMTGVFSIPIDLPGTRFNRAIKASRLLSKEVSTIIRQRKEELKAGKVSVEQDILSHMLMNIGETKDEDLADKIIALLIGGHDTTSIVCTFVVNYLAEFPHIYQRVLEEQKEILNNKDVNEKLTWEDIEKMRYSWNVACEVMRIVPPLAGTFREAIDHFSFKGFYIPKGWKLYWSATATHKNPEYFPEPEKFEPSRFEGSGPKPYTYVPFGGGSRICPGREYARLEILIFMHNLVKRFKWEKVFPKENKLVADPAPIPAKGLPIRIFPQS

SEQ ID NO: 73780 - protein, 342 aa, Arabidopsis thaliana
  peptide (1)..(342): Ceres Seq. ID no. 4980357
  misc_feature (1)..(342): Homolog of NCBI NO: 15239304 NR Description: cytochrome p450 family; protein id: At5g36110.1
  misc_feature (1)..(180): Homolog of NCBI NO: 15239310 NR Description: putative protein; protein id: At5g36140.1 thaliana] >gi|8777299|dbj|BAA96889.1| contains similarity to
  misc_feature (1)..(338): Homolog of NCBI NO: 24745923 NR Description: cytochrome P450 [Solanum tuberosum]
  misc_feature (1)..(342): Homolog of NCBI NO: 28380196 NR Description: Taxane 13-alpha-hydroxylase
  misc_feature (1)..(342): Homolog of NCBI NO: 28380205 NR Description: Taxane 10-beta-hydroxylase
  misc_feature (1)..(342): Homolog of NCBI NO: 30350220 NR Description: taxane 14b-hydroxylase [Taxus cuspidata]
  misc_feature (1)..(342): Homolog of NCBI NO: 24266823 NR Description: 5-alpha-taxadienol-10-beta-hydroxylase [Taxus
  misc_feature (1)..(342): Homolog of NCBI NO: 34901946 NR Description: 5-alpha-taxadienol-10-beta-hydroxylase-like
  misc_feature (1)..(338): Homolog of NCBI NO: 30694740 NR Description: cytochrome P450 family [Arabidopsis thaliana] cytochrome P450 [Arabidopsis thaliana] AT5g45340/K9E15_12 [Arabidopsis thaliana]
  misc_feature (1)..(311): Homolog of NCBI NO: 30694744 NR Description: cytochrome P450 family [Arabidopsis thaliana]
MLLMPSMKPEALRRYVGVMDEIAQKHFETEWANQDQLIVFPLTKKFTFSIACRLFLSMDDLERVRKLEEPFTTVMTGVFSIPIDLPGTRFNRAIKASRLLSKEVSTIIRQRKEELKAGKVSVEQDILSHMLMNIGETKDEDLADKIIALLIGGHDTTSIVCTFVVNYLAEFPHIYQRVLEEQKEILNNKDVNEKLTWEDIEKMRYSWNVACEVMRIVPPLAGTFREAIDHFSFKGFYIPKGWKLYWSATATHKNPEYFPEPEKFEPSRFEGSGPKPYTYVPFGGGSRICPGREYARLEILIFMHNLVKRFKWEKVFPKENKLVADPAPIPAKGLPIRIFPQS

SEQ ID NO: 73781 - protein, 339 aa, Arabidopsis thaliana
  peptide (1)..(339): Ceres Seq. ID no. 4980358
  misc_feature (1)..(339): Homolog of NCBI NO: 15239304 NR Description: cytochrome p450 family; protein id: At5g36110.1
  misc_feature (1)..(177): Homolog of NCBI NO: 15239310 NR Description: putative protein; protein id: At5g36140.1 thaliana] >gi|8777299|dbj|BAA96889.1| contains similarity to
  misc_feature (1)..(335): Homolog of NCBI NO: 24745923 NR Description: cytochrome P450 [Solanum tuberosum]
  misc_feature (1)..(339): Homolog of NCBI NO: 28380196 NR Description: Taxane 13-alpha-hydroxylase
  misc_feature (1)..(339): Homolog of NCBI NO: 28380205 NR Description: Taxane 10-beta-hydroxylase
  misc_feature (1)..(339): Homolog of NCBI NO: 30350220 NR Description: taxane 14b-hydroxylase [Taxus cuspidata]
  misc_feature (1)..(339): Homolog of NCBI NO: 24266823 NR Description: 5-alpha-taxadienol-10-beta-hydroxylase [Taxus
  misc_feature (1)..(339): Homolog of NCBI NO: 34901946 NR Description: 5-alpha-taxadienol-10-beta-hydroxylase-like
  misc_feature (1)..(335): Homolog of NCBI NO: 30694740 NR Description: cytochrome P450 family [Arabidopsis thaliana] cytochrome P450 [Arabidopsis thaliana] AT5g45340/K9E15_12 [Arabidopsis thaliana]
  misc_feature (1)..(308): Homolog of NCBI NO: 30694744 NR Description: cytochrome P450 family [Arabidopsis thaliana]
MPSMKPEALRRYVGVMDEIAQKHFETEWANQDQLIVFPLTKKFTFSIACRLFLSMDDLERVRKLEEPFTTVMTGVFSIPIDLPGTRFNRAIKASRLLSKEVSTIIRQRKEELKAGKVSVEQDILSHMLMNIGETKDEDLADKIIALLIGGHDTTSIVCTFVVNYLAEFPHIYQRVLEEQKEILNNKDVNEKLTWEDIEKMRYSWNVACEVMRIVPPLAGTFREAIDHFSFKGFYIPKGWKLYWSATATHKNPEYFPEPEKFEPSRFEGSGPKPYTYVPFGGGSRICPGREYARLEILIFMHNLVKRFKWEKVFPKENKLVADPAPIPAKGLPIRIFPQS

SEQ ID NO: 73782 - DNA, 1515 bp, Arabidopsis thaliana
  misc_feature (1)..(1515): Ceres Seq. ID no. 4981130
  misc_feature: MA Experiment ID: 20000166 Result: Down-regulated in Transcription
  misc_feature: MA Experiment 20000166 PARAMETER Experiment Name: At_100uM_ABA_P Parameter: Age (day) Value: 14
  misc_feature: MA Experiment 20000166 PARAMETER Experiment Name: At_100uM_ABA_P Parameter: Organism Value: A. thaliana
  misc_feature: MA Experiment 20000166 PARAMETER Experiment Name: At_100uM_ABA_P Parameter: Plant Line Value: WS
  misc_feature: MA Experiment 20000166 PARAMETER Experiment Name: At_100uM_ABA_P Parameter: Timepoint (hr) Value: 1
  misc_feature: MA Experiment 20000166 PARAMETER Experiment Name: At_100uM_ABA_P Parameter: Tissue Value: Aerial
  misc_feature: MA Experiment 20000166 PARAMETER Experiment Name: At_100uM_ABA_P Parameter: Treatment Value: 100uM ABA vs. No Treatment
  misc_feature: MA Experiment ID: 20000173 Result: Down-regulated in Transcription
  misc_feature: MA Experiment 20000173 PARAMETER Experiment Name: At_42deg_Heat_P Parameter: Age (day) Value: 14
  misc_feature: MA Experiment 20000173 PARAMETER Experiment Name: At_42deg_Heat_P Parameter: Organism Value: A. thaliana
  misc_feature: MA Experiment 20000173 PARAMETER Experiment Name: At_42deg_Heat_P Parameter: Plant Line Value: WS
  misc_feature: MA Experiment 20000173 PARAMETER Experiment Name: At_42deg_Heat_P Parameter: Temperature (deg C) Value: 42 vs. 22
  misc_feature: MA Experiment 20000173 PARAMETER Experiment Name: At_42deg_Heat_P Parameter: Timepoint (hr) Value: 6
  misc_feature: MA Experiment 20000173 PARAMETER Experiment Name: At_42deg_Heat_P Parameter: Tissue Value: Aerial
  misc_feature: MA Experiment ID: 20000182 Result: Up-regulated in Transcription
  misc_feature: MA Experiment 20000182 PARAMETER Experiment Name: At_2mM_SA_P Parameter: Age (day) Value: 14
  misc_feature: MA Experiment 20000182 PARAMETER Experiment Name: At_2mM_SA_P Parameter: Organism Value: A. thaliana
  misc_feature: MA Experiment 20000182 PARAMETER Experiment Name: At_2mM_SA_P Parameter: Plant Line Value: WS
  misc_feature: MA Experiment 20000182 PARAMETER Experiment Name: At_2mM_SA_P Parameter: Timepoint (hr) Value: 6
  misc_feature: MA Experiment 20000182 PARAMETER Experiment Name: At_2mM_SA_P Parameter: Tissue Value: Aerial
  misc_feature: MA Experiment 20000182 PARAMETER Experiment Name: At_2mM_SA_P Parameter: Treatment Value: 2mM SA vs. No Treatment
  misc_feature: MA Experiment ID: 20000184 Result: Down-regulated in Transcription
  misc_feature: MA Experiment 20000184 PARAMETER Experiment Name: At_Shoots__P Parameter: Age (day) Value: 7
  misc_feature: MA Experiment 20000184 PARAMETER Experiment Name: At_Shoots__P Parameter: Tissue Value: Shoots vs. Whole Plant
  misc_feature: MA Experiment ID: 20000234 Result: Down-regulated in Transcription
  misc_feature: MA Experiment 20000234 PARAMETER Experiment Name: At_Siliques_P Parameter: Age (day) Value: 21
  misc_feature: MA Experiment 20000234 PARAMETER Experiment Name: At_Siliques_P Parameter: Organism Value: A. thaliana
  misc_feature: MA Experiment 20000234 PARAMETER Experiment Name: At_Siliques_P Parameter: Plant Line Value: WS
  misc_feature: MA Experiment 20000234 PARAMETER Experiment Name: At_Siliques_P Parameter: Tissue Value: Less Than 5mm Siliques vs. Whole Plant
  misc_feature: MA Experiment ID: 20000235 Result: Down-regulated in Transcription
  misc_feature: MA Experiment 20000235 PARAMETER Experiment Name: At_Siliques_P Parameter: Age (day) Value: 21
  misc_feature: MA Experiment 20000235 PARAMETER Experiment Name: At_Siliques_P Parameter: Organism Value: A. thaliana
  misc_feature: MA Experiment 20000235 PARAMETER Experiment Name: At_Siliques_P Parameter: Plant Line Value: WS
  misc_feature: MA Experiment 20000235 PARAMETER Experiment Name: At_Siliques_P Parameter: Tissue Value: 5-10mm Siliques vs. Whole Plant
  misc_feature: MA Experiment ID: 20000264 Result: Down-regulated in Transcription
  misc_feature: MA Experiment 20000264 PARAMETER Experiment Name: At_Open_Flower_P Parameter: Age (day) Value: 21
  misc_feature: MA Experiment 20000264 PARAMETER Experiment Name: At_Open_Flower_P Parameter: Plant Line Value: WS
  misc_feature: MA Experiment 20000264 PARAMETER Experiment Name: At_Open_Flower_P Parameter: Tissue Value: Open Flower vs. Whole Plant
  misc_feature: MA Experiment ID: 20000265 Result: Down-regulated in Transcription
  misc_feature: MA Experiment 20000265 PARAMETER Experiment Name: At_Open_Flower_P Parameter: Age (day) Value: 21
  misc_feature: MA Experiment 20000265 PARAMETER Experiment Name: At_Open_Flower_P Parameter: Plant Line Value: WS
  misc_feature: MA Experiment 20000265 PARAMETER Experiment Name: At_Open_Flower_P Parameter: Tissue Value: Closed Flower vs. Whole Plant
  misc_feature: MA Experiment ID: 20000439 Result: Down-regulated in Transcription
  misc_feature: MA Experiment 20000439 PARAMETER Experiment Name: At_Roots__P Parameter: Age (day) Value: 14 vs. 21
  misc_feature: MA Experiment 20000439 PARAMETER Experiment Name: At_Roots__P Parameter: Organism Value: A. thaliana
  misc_feature: MA Experiment 20000439 PARAMETER Experiment Name: At_Roots__P Parameter: Tissue Value: Roots vs. Whole Plant
  misc_feature: MA Experiment ID: 20001248 Result: Up-regulated in Transcription
  misc_feature: MA Experiment 20001248 PARAMETER Experiment Name: At_Far-red-induction_P Parameter: Age (day) Value: 7
  misc_feature: MA Experiment 20001248 PARAMETER Experiment Name: At_Far-red-induction_P Parameter: Light Value: Far-red vs. White
  misc_feature: MA Experiment 20001248 PARAMETER Experiment Name: At_Far-red-induction_P Parameter: Organism Value: A. thaliana
  misc_feature: MA Experiment 20001248 PARAMETER Experiment Name: At_Far-red-induction_P Parameter: Plant Line Value: Columbia
  misc_feature: MA Experiment 20001248 PARAMETER Experiment Name: At_Far-red-induction_P Parameter: Timepoint (hr) Value: 4
  misc_feature: MA Experiment 20001248 PARAMETER Experiment Name: At_Far-red-induction_P Parameter: Tissue Value: Whole Plant
  misc_feature: MA Experiment ID: 20001451 Result: Up-regulated in Transcription
  misc_feature: MA Experiment 20001451 PARAMETER Experiment Name: At_Far-red-induction_P Parameter: Age (day) Value: 7
  misc_feature: MA Experiment 20001451 PARAMETER Experiment Name: At_Far-red-induction_P Parameter: Light Value: Far-red vs. White
  misc_feature: MA Experiment 20001451 PARAMETER Experiment Name: At_Far-red-induction_P Parameter: Organism Value: A. thaliana
  misc_feature: MA Experiment 20001451 PARAMETER Experiment Name: At_Far-red-induction_P Parameter: Plant Line Value: Columbia
  misc_feature: MA Experiment 20001451 PARAMETER Experiment Name: At_Far-red-induction_P Parameter: Timepoint (hr) Value: 24
  misc_feature: MA Experiment 20001451 PARAMETER Experiment Name: At_Far-red-induction_P Parameter: Tissue Value: Whole Plant
  misc_feature: MA Experiment ID: 20001905 Result: Down-regulated in Transcription
  misc_feature: MA Experiment 20001905 PARAMETER Experiment Name: At_Drought_Reproduction_P Parameter: Age (day) Value: 40
  misc_feature: MA Experiment 20001905 PARAMETER Experiment Name: At_Drought_Reproduction_P Parameter: Organism Value: A. thaliana
  misc_feature: MA Experiment 20001905 PARAMETER Experiment Name: At_Drought_Reproduction_P Parameter: Plant Line Value: WS
  misc_feature: MA Experiment 20001905 PARAMETER Experiment Name: At_Drought_Reproduction_P Parameter: Timepoint (day) Value: 10
  misc_feature: MA Experiment 20001905 PARAMETER Experiment Name: At_Drought_Reproduction_P Parameter: Tissue Value: Rosettes
  misc_feature: MA Experiment 20001905 PARAMETER Experiment Name: At_Drought_Reproduction_P Parameter: Treatment Value: Drought vs. No Drought
atggctaaatcagtatctggcgggaagattacttattttgtggtggcttcatgtgtcatggccgccatgggcggtgtcatcttcggctacgacatcggggtttcaggtggagtgatgtcaatggggccatttctaaaaagatttttcccaaaagtgtataagctccaagaagaagatagaagaagaagaggcaatagcaataaccactactgccttttcaatagccaacttcttacatccttcacatcttctctatacgtttccggtctcatcgctactctgttagcttcgtccgtgactcgttcatggggtcgcaagccctctatatttcttggcggtgtgtcctttctcgccggcgctgctcttggtggctctgctcaaaacgttgctatgctcattattgcgcgtctcttgctcggcgtaggagttggattcgctaaccagtcggttcctctgtatctctccgagatggcgccggcaaaatacagaggagcaatcagcaatggtttccagctctgtatcggaattggatttctatctgcaaatgtaataaactacgaaacccaaaatatcaaacatggttggagaatctctttagccacagctgcaatacctgcttcaatcctcactttaggatcactgtttctcccggaaacgccgaatagtatcatccagaccaccggagatgttcacaagaccgagcttatgcttcgccgtgtccgtggaactaacgacgttcaagatgagcttactgatctcgttgaagcgagttctggttctgatacagattcaaacgcgtttttgaaactgcttcaaagaaaatataggcctgagttagtgatggctttggtgatacctttctttcagcaagttactggaatcaatgttgttgctttctacgcaccggttttgtatagaaccgttgggtttggagagagtggttcgttgatgtcgaccctcgtgactggaatcgtgggaacctcgtcgacgttgttgtcgatgcttgtcgttgacagaatcggtagaaagactctgtttttgattggagggttacagatgctcgtgtcgcaagttaccattggtgtgatcgttatggtggctgatgttcacgacggtgtgatcaaggaagggtatggttacgcggttgtggttttggtgtgtgtctacgtggccgggtttggttggtcttggggtccattaggatggcttgtaccgagtgagatttttccgttggagataagatcggtggcgcagagtgtaactgtggcagtgagttttgtgtttacttttgcggtggctcaaagtgcaccaccgatgttgtgtaagtttcgagctgggattttcttcttttatggagggtggttggtggtaatgacggtagcggtgcagctgtttttgccggagactaagaatgttccaatcgagaaggtggttggactttgggagaagcattggttttggaggagaatgacgagcaagcgtgatatccaagaaaccaccattcttagccattga

SEQ ID NO: 73783 - protein, 504 aa, Arabidopsis thaliana
  peptide (1)..(504): Ceres Seq. ID no. 4981131
  misc_feature (17)..(481): Pfam Name: Sugar (and other) transporter Pfam Description: Sugar (and other) transporter
  misc_feature (1)..(504): Homolog of NCBI NO: 30697543 NR Description: hexose transporter, putative [Arabidopsis >gi|4127417|emb|CAA05384.1| monosaccharide transporter thaliana] >gi|9758468|dbj|BAB08997.1| monosaccharide transporter
  misc_feature (157)..(504): Homolog of NCBI NO: 22135848 NR Description: AT5g61520/k11j9_40 [Arabidopsis thaliana]
  misc_feature (8)..(498): Homolog of NCBI NO: 1708191 NR Description: Hexose carrier protein HEX6
  misc_feature (8)..(490): Homolog of NCBI NO: 5803244 NR Description: Similar to hexose carrier protein HEX6 &RCCHCP_1
  misc_feature (8)..(496): Homolog of NCBI NO: 34915514 NR Description: monosaccharide transporter 3 [Oryza sativa
  misc_feature (7)..(495): Homolog of NCBI NO: 37536854 NR Description: putative monosaccharide transporter [Oryza sativa
  misc_feature (8)..(499): Homolog of NCBI NO: 100347 NR Description: monosaccharide transport protein MST1 - common >gi|19885|emb|CAA47324.1| monosaccharid transporter [Nicotiana
  misc_feature (8)..(489): Homolog of NCBI NO: 34899540 NR Description: putative hexose carrier protein HEX6 [Oryza
  misc_feature (8)..(490): Homolog of NCBI NO: 347855 NR Description: glucose transporter [Saccharum hybrid cultivar
  misc_feature (8)..(495): Homolog of NCBI NO: 30349804 NR Description: monosaccharide-H+ symporter [Datisca glomerata]
MAKSVSGGKITYFVVASCVMAAMGGVIFGYDIGVSGGVMSMGPFLKRFFPKVYKLQEEDRRRRGNSNNHYCLFNSQLLTSFTSSLYVSGLIATLLASSVTRSWGRKPSIFLGGVSFLAGAALGGSAQNVAMLIIARLLLGVGVGFANQSVPLYLSEMAPAKYRGAISNGFQLCIGIGFLSANVINYETQNIKHGWRISLATAAIPASILTLGSLFLPETPNSIIQTTGDVHKTELMLRRVRGTNDVQDELTDLVEASSGSDTDSNAFLKLLQRKYRPELVMALVIPFFQQVTGINVVAFYAPVLYRTVGFGESGSLMSTLVTGIVGTSSTLLSMLVVDRIGRKTLFLIGGLQMLVSQVTIGVIVMVADVHDGVIKEGYGYAVVVLVCVYVAGFGWSWGPLGWLVPSEIFPLEIRSVAQSVTVAVSFVFTFAVAQSAPPMLCKFRAGIFFFYGGWLVVMTVAVQLFLPETKNVPIEKVVGLWEKHWFWRRMTSKRDIQETTILSH

SEQ ID NO: 73784 - protein, 485 aa, Arabidopsis thaliana
  peptide (1)..(485): Ceres Seq. ID no. 4981132
  misc_feature (1)..(462): Pfam Name: Sugar (and other) transporter Pfam Description: Sugar (and other) transporter
  misc_feature (1)..(485): Homolog of NCBI NO: 30697543 NR Description: hexose transporter, putative [Arabidopsis >gi|4127417|emb|CAA05384.1| monosaccharide transporter thaliana] >gi|9758468|dbj|BAB08997.1| monosaccharide transporter
  misc_feature (138)..(485): Homolog of NCBI NO: 22135848 NR Description: AT5g61520/k11j9_40 [Arabidopsis thaliana]
  misc_feature (1)..(479): Homolog of NCBI NO: 1708191 NR Description: Hexose carrier protein HEX6
  misc_feature (1)..(471): Homolog of NCBI NO: 5803244 NR Description: Similar to hexose carrier protein HEX6 &RCCHCP_1
  misc_feature (1)..(477): Homolog of NCBI NO: 34915514 NR Description: monosaccharide transporter 3 [Oryza sativa
  misc_feature (1)..(476): Homolog of NCBI NO: 37536854 NR Description: putative monosaccharide transporter [Oryza sativa
  misc_feature (1)..(480): Homolog of NCBI NO: 100347 NR Description: monosaccharide transport protein MST1 - common >gi|19885|emb|CAA47324.1| monosaccharid transporter [Nicotiana
  misc_feature (1)..(470): Homolog of NCBI NO: 34899540 NR Description: putative hexose carrier protein HEX6 [Oryza
  misc_feature (1)..(471): Homolog of NCBI NO: 347855 NR Description: glucose transporter [Saccharum hybrid cultivar
  misc_feature (1)..(476): Homolog of NCBI NO: 30349804 NR Description: monosaccharide-H+ symporter [Datisca glomerata]
MAAMGGVIFGYDIGVSGGVMSMGPFLKRFFPKVYKLQEEDRRRRGNSNNHYCLFNSQLLTSFTSSLYVSGLIATLLASSVTRSWGRKPSIFLGGVSFLAGAALGGSAQNVAMLIIARLLLGVGVGFANQSVPLYLSEMAPAKYRGAISNGFQLCIGIGFLSANVINYETQNIKHGWRISLATAAIPASILTLGSLFLPETPNSIIQTTGDVHKTELMLRRVRGTNDVQDELTDLVEASSGSDTDSNAFLKLLQRKYRPELVMALVIPFFQQVTGINVVAFYAPVLYRTVGFGESGSLMSTLVTGIVGTSSTLLSMLVVDRIGRKTLFLIGGLQMLVSQVTIGVIVMVADVHDGVIKEGYGYAVVVLVCVYVAGFGWSWGPLGWLVPSEIFPLEIRSVAQSVTVAVSFVFTFAVAQSAPPMLCKFRAGIFFFYGGWLVVMTVAVQLFLPETKNVPIEKVVGLWEKHWFWRRMTSKRDIQETTILSH

SEQ ID NO: 73785 - protein, 482 aa, Arabidopsis thaliana
  peptide (1)..(482): Ceres Seq. ID no. 4981133
  misc_feature (1)..(459): Pfam Name: Sugar (and other) transporter Pfam Description: Sugar (and other) transporter
  misc_feature (1)..(482): Homolog of NCBI NO: 30697543 NR Description: hexose transporter, putative [Arabidopsis >gi|4127417|emb|CAA05384.1| monosaccharide transporter thaliana] >gi|9758468|dbj|BAB08997.1| monosaccharide transporter
  misc_feature (135)..(482): Homolog of NCBI NO: 22135848 NR Description: AT5g61520/k11j9_40 [Arabidopsis thaliana]
  misc_feature (1)..(476): Homolog of NCBI NO: 1708191 NR Description: Hexose carrier protein HEX6
  misc_feature (1)..(468): Homolog of NCBI NO: 5803244 NR Description: Similar to hexose carrier protein HEX6 &RCCHCP_1
  misc_feature (1)..(474): Homolog of NCBI NO: 34915514 NR Description: monosaccharide transporter 3 [Oryza sativa
  misc_feature (1)..(473): Homolog of NCBI NO: 37536854 NR Description: putative monosaccharide transporter [Oryza sativa
  misc_feature (1)..(477): Homolog of NCBI NO: 100347 NR Description: monosaccharide transport protein MST1 - common >gi|19885|emb|CAA47324.1| monosaccharid transporter [Nicotiana
  misc_feature (1)..(467): Homolog of NCBI NO: 34899540 NR Description: putative hexose carrier protein HEX6 [Oryza
  misc_feature (1)..(468): Homolog of NCBI NO: 347855 NR Description: glucose transporter [Saccharum hybrid cultivar
  misc_feature (1)..(473): Homolog of NCBI NO: 30349804 NR Description: monosaccharide-H+ symporter [Datisca glomerata]
MGGVIFGYDIGVSGGVMSMGPFLKRFFPKVYKLQEEDRRRRGNSNNHYCLFNSQLLTSFTSSLYVSGLIATLLASSVTRSWGRKPSIFLGGVSFLAGAALGGSAQNVAMLIIARLLLGVGVGFANQSVPLYLSEMAPAKYRGAISNGFQLCIGIGFLSANVINYETQNIKHGWRISLATAAIPASILTLGSLFLPETPNSIIQTTGDVHKTELMLRRVRGTNDVQDELTDLVEASSGSDTDSNAFLKLLQRKYRPELVMALVIPFFQQVTGINVVAFYAPVLYRTVGFGESGSLMSTLVTGIVGTSSTLLSMLVVDRIGRKTLFLIGGLQMLVSQVTIGVIVMVADVHDGVIKEGYGYAVVVLVCVYVAGFGWSWGPLGWLVPSEIFPLEIRSVAQSVTVAVSFVFTFAVAQSAPPMLCKFRAGIFFFYGGWLVVMTVAVQLFLPETKNVPIEKVVGLWEKHWFWRRMTSKRDIQETTILSH

SEQ ID NO: 73786 - DNA, 1101 bp, Arabidopsis thaliana
  misc_feature (1)..(1101): Ceres Seq. ID no. 4981193
  misc_feature: MA Experiment ID: 108573 Result: Up-regulated in Transcription
  misc_feature: MA Experiment 108573 PARAMETER Experiment Name: At_Drought_cDNA_P Parameter: Timepoint (hr) Value: 6
  misc_feature: MA Experiment 108573 PARAMETER Experiment Name: At_Drought_cDNA_P Parameter: Tissue Value: Aerial
  misc_feature: MA Experiment 108573 PARAMETER Experiment Name: At_Drought_cDNA_P Parameter: Treatment Value: Drought vs. No Drought
  misc_feature: MA Experiment ID: 20000171 Result: Up-regulated in Transcription
  misc_feature: MA Experiment 20000171 PARAMETER Experiment Name: At_42deg_Heat_P Parameter: Age (day) Value: 14
  misc_feature: MA Experiment 20000171 PARAMETER Experiment Name: At_42deg_Heat_P Parameter: Organism Value: A. thaliana
  misc_feature: MA Experiment 20000171 PARAMETER Experiment Name: At_42deg_Heat_P Parameter: Plant Line Value: WS
  misc_feature: MA Experiment 20000171 PARAMETER Experiment Name: At_42deg_Heat_P Parameter: Temperature (deg C) Value: 42 vs. 22
  misc_feature: MA Experiment 20000171 PARAMETER Experiment Name: At_42deg_Heat_P Parameter: Timepoint (hr) Value: 1
  misc_feature: MA Experiment 20000171 PARAMETER Experiment Name: At_42deg_Heat_P Parameter: Tissue Value: Aerial
  misc_feature: MA Experiment ID: 20000224 Result: Down-regulated in Transcription
  misc_feature: MA Experiment ID: 20001905 Result: Up-regulated in Transcription
  misc_feature: MA Experiment 20001905 PARAMETER Experiment Name: At_Drought_Reproduction_P Parameter: Age (day) Value: 40
  misc_feature: MA Experiment 20001905 PARAMETER Experiment Name: At_Drought_Reproduction_P Parameter: Organism Value: A. thaliana
  misc_feature: MA Experiment 20001905 PARAMETER Experiment Name: At_Drought_Reproduction_P Parameter: Plant Line Value: WS
  misc_feature: MA Experiment 20001905 PARAMETER Experiment Name: At_Drought_Reproduction_P Parameter: Timepoint (day) Value: 10
  misc_feature: MA Experiment 20001905 PARAMETER Experiment Name: At_Drought_Reproduction_P Parameter: Tissue Value: Rosettes
  misc_feature: MA Experiment 20001905 PARAMETER Experiment Name: At_Drought_Reproduction_P Parameter: Treatment Value: Drought vs. No Drought
cttctttcctctttcttctttctgttttctggtcgctcgttaccaccaagacctcgtcgaggtttctctctctctgaaaaagtgcttttgctgcgtttccatgctctcggaaggaacttggctgaatcgttggagaattatcgatctggcgtcgttggtgcatctctagctgcgccaattcatcggatccggtttgatttctccctttcgcgaatctagccttccgtgatcttagccatgttctatggcacagctgtatgggacccttggcttatcgttggccagattatttgcctccaatgctcttactatctcactcttggactcttcaccatggtctttcttggccttcgtgttcctcgccttagtcttgtctacttcttcgattacgctactctcactacttccaccttcaccggttggtctgttattgcctcattcctcttctcttcactcgctggggctgtgtacatgatatttttggtggagcgagcacggaaatgcttagatttctctgcaactctctacatcatacatctcttcttttgcatcatgtatggaggatggccttcctctatggcgtggtgggttgttaatggaaccggactcgctgttatggctttgctagctgagtacttgtgcattaaacgcgaacagcgagagatccctatggatcgcttccactcaagggtttgaagattggtgaaagaacaagtgatgaagattcttgtgggttagcagcgcgactcgtagagcctagtagagcctagtactcttaacaattgtgatgtacagagatgaaatcagaggagtagaatgggcgaaaggaagttcagctagccaagcaacaatgttggacactggtgcaccaactctgactgcaatttttagtgacttcaaatactaagactttggaatacgtttcaatttgttcttttgtatgaaaaaaacattagactcgaataggttattgatttcatgttgcttcttttttttgtttatactggattttctcttctatcctctacttggtgcagctttgtgtgttttaaaaccagtgtctcattcatcatactcttttaccaccaattgaatccttcc

SEQ ID NO: 73787 - protein, 152 aa, Arabidopsis thaliana; identical to SEQ ID NO: 27739
  peptide (1)..(152): Ceres Seq. ID no. 4981194
  misc_feature (1)..(152): Homolog of NCBI NO: 18412584 NR Description: Expressed protein; protein id: At1g79975.1, by cDNA: 7260. [Arabidopsis thaliana] >gi|25373347|pir||B96831
  misc_feature (1)..(150): Homolog of NCBI NO: 12324600 NR Description: unknown protein; 19658-19089 [Arabidopsis
  misc_feature (1)..(146): Homolog of NCBI NO: 14270398 NR Description: hypothetical protein [Homo sapiens]
  misc_feature (7)..(146): Homolog of NCBI NO: 11561813 NR Description: dJ453C12.4.1 (novel protein (similar to
  misc_feature (7)..(146): Homolog of NCBI NO: 23618848 NR Description: chromosome 20 open reading frame 169; similar to cDNA 2610042O14 gene (M. musculus) [Homo sapiens] unnamed protein product [Homo sapiens]
  misc_feature (1)..(75): Homolog of NCBI NO: 34912286 NR Description: P0451D05.3 [Oryza sativa (japonica
  misc_feature (1)..(145): Homolog of NCBI NO: 34860687 NR Description: similar to chromosome 20 open reading frame 169
  misc_feature (7)..(145): Homolog of NCBI NO: 12833500 NR Description: unnamed protein product [Mus musculus]
  misc_feature (7)..(145): Homolog of NCBI NO: 12838117 NR Description: unnamed protein product [Mus musculus]
  misc_feature (8)..(145): Homolog of NCBI NO: 31241315 NR Description: ENSANGP00000018407 [Anopheles gambiae]

SEQ ID NO: 73788 - protein, 120 aa, Arabidopsis thaliana; identical to SEQ ID NO: 27740
  peptide (1)..(120): Ceres Seq. ID no. 4981195
  misc_feature (1)..(120): Homolog of NCBI NO: 18412584 NR Description: Expressed protein; protein id: At1g79975.1, by cDNA: 7260. [Arabidopsis thaliana] >gi|25373347|pir||B96831
  misc_feature (1)..(118): Homolog of NCBI NO: 12324600 NR Description: unknown protein; 19658-19089 [Arabidopsis
  misc_feature (1)..(114): Homolog of NCBI NO: 14270398 NR Description: hypothetical protein [Homo sapiens]
  misc_feature (1)..(114): Homolog of NCBI NO: 11561813 NR Description: dJ453C12.4.1 (novel protein (similar to
  misc_feature (1)..(114): Homolog of NCBI NO: 23618848 NR Description: chromosome 20 open reading frame 169; similar to cDNA 2610042O14 gene (M. musculus) [Homo sapiens] unnamed protein product [Homo sapiens]
  misc_feature (1)..(43): Homolog of NCBI NO: 34912286 NR Description: P0451D05.3 [Oryza sativa (japonica
  misc_feature (1)..(113): Homolog of NCBI NO: 34860687 NR Description: similar to chromosome 20 open reading frame 169
  misc_feature (1)..(113): Homolog of NCBI NO: 12833500 NR Description: unnamed protein product [Mus musculus]
  misc_feature (1)..(113): Homolog of NCBI NO: 12838117 NR Description: unnamed protein product [Mus musculus]
  misc_feature (1)..(113): Homolog of NCBI NO: 31241315 NR Description: ENSANGP00000018407 [Anopheles gambiae]

SEQ ID NO: 73789 - protein, 76 aa, Arabidopsis thaliana; identical to SEQ ID NO: 27741
  peptide (1)..(76): Ceres Seq. ID no. 4981196

SEQ ID NO: 73790 - DNA, 797 bp, Arabidopsis thaliana
  misc_feature (1)..(797): Ceres Seq. ID no. 4981253
  misc_feature: MA Experiment ID: 108435 Result: Up-regulated in Transcription
  misc_feature: MA Experiment 108435 PARAMETER Experiment Name: At_stm_Mutants_cDNA_P Parameter: Plant Line Value: wt Landsburg vs stm
  misc_feature: MA Experiment 108435 PARAMETER Experiment Name: At_stm_Mutants_cDNA_P Parameter: Tissue Value: Shoot Apical Meristem Region
  misc_feature: MA Experiment ID: 20000069 Result: Down-regulated in Transcription
  misc_feature: MA Experiment 20000069 PARAMETER Experiment Name: At_100uM_ABA_Mutants_cDNA_P Parameter: Plant Line Value: CS23
  misc_feature: MA Experiment 20000069 PARAMETER Experiment Name: At_100uM_ABA_Mutants_cDNA_P Parameter: Timepoint (hr) Value: 6
  misc_feature: MA Experiment 20000069 PARAMETER Experiment Name: At_100uM_ABA_Mutants_cDNA_P Parameter: Tissue Value: Aerial
  misc_feature: MA Experiment 20000069 PARAMETER Experiment Name: At_100uM_ABA_Mutants_cDNA_P Parameter: Treatment Value: 100uM ABA vs. No Treatment
  misc_feature: MA Experiment ID: 20000071 Result: Down-regulated in Transcription
  misc_feature: MA Experiment 20000071 PARAMETER Experiment Name: At_100uM_ABA_Mutants_cDNA_P Parameter: Plant Line Value: CS8104
  misc_feature: MA Experiment 20000071 PARAMETER Experiment Name: At_100uM_ABA_Mutants_cDNA_P Parameter: Timepoint (hr) Value: 6
  misc_feature: MA Experiment 20000071 PARAMETER Experiment Name: At_100uM_ABA_Mutants_cDNA_P Parameter: Tissue Value: Aerial
  misc_feature: MA Experiment 20000071 PARAMETER Experiment Name: At_100uM_ABA_Mutants_cDNA_P Parameter: Treatment Value: 100uM ABA vs. No Treatment
  misc_feature: MA Experiment ID: 20000117 Result: Down-regulated in Transcription
  misc_feature: MA Experiment 20000117 PARAMETER Experiment Name: At_100uM_ABA_Mutants_cDNA_P Parameter: Plant Line Value: Columbia
  misc_feature: MA Experiment 20000117 PARAMETER Experiment Name: At_100uM_ABA_Mutants_cDNA_P Parameter: Timepoint (hr) Value: 6
  misc_feature: MA Experiment 20000117 PARAMETER Experiment Name: At_100uM_ABA_Mutants_cDNA_P Parameter: Tissue Value: Aerial
  misc_feature: MA Experiment 20000117 PARAMETER Experiment Name: At_100uM_ABA_Mutants_cDNA_P Parameter: Treatment Value: 100uM ABA vs. No Treatment
  misc_feature: MA Experiment ID: 20000437 Result: Down-regulated in Transcription
  misc_feature: MA Experiment 20000437 PARAMETER Experiment Name: At_Drought_P Parameter: Age (day) Value: 8
  misc_feature: MA Experiment 20000437 PARAMETER Experiment Name: At_Drought_P Parameter: Organism Value: A. thaliana
  misc_feature: MA Experiment 20000437 PARAMETER Experiment Name: At_Drought_P Parameter: Plant Line Value: WS
  misc_feature: MA Experiment 20000437 PARAMETER Experiment Name: At_Drought_P Parameter: Timepoint (hr) Value: 24
  misc_feature: MA Experiment 20000437 PARAMETER Experiment Name: At_Drought_P Parameter: Tissue Value: Whole Plant
  misc_feature: MA Experiment 20000437 PARAMETER Experiment Name: At_Drought_P Parameter: Treatment Value: Drought vs. No Drought
  misc_feature: MA Experiment ID: 20000439 Result: Down-regulated in Transcription
  misc_feature: MA Experiment 20000439 PARAMETER Experiment Name: At_Roots__P Parameter: Age (day) Value: 14 vs. 21
  misc_feature: MA Experiment 20000439 PARAMETER Experiment Name: At_Roots__P Parameter: Organism Value: A. thaliana
  misc_feature: MA Experiment 20000439 PARAMETER Experiment Name: At_Roots__P Parameter: Tissue Value: Roots vs. Whole Plant
  misc_feature: MA Experiment ID: 20000451 Result: Up-regulated in Transcription
  misc_feature: MA Experiment 20000451 PARAMETER Experiment Name: At_CS6879_Shoots-Roots_P Parameter: Age (day) Value: 14
  misc_feature: MA Experiment 20000451 PARAMETER Experiment Name: At_CS6879_Shoots-Roots_P Parameter: Organism Value: A. thaliana
  misc_feature: MA Experiment 20000451 PARAMETER Experiment Name: At_CS6879_Shoots-Roots_P Parameter: Plant Line Value: CS6879 vs. WS
  misc_feature: MA Experiment 20000451 PARAMETER Experiment Name: At_CS6879_Shoots-Roots_P Parameter: Tissue Value: Roots
  misc_feature: MA Experiment ID: 20001248 Result: Down-regulated in Transcription
  misc_feature: MA Experiment 20001248 PARAMETER Experiment Name: At_Far-red-induction_P Parameter: Age (day) Value: 7
  misc_feature: MA Experiment 20001248 PARAMETER Experiment Name: At_Far-red-induction_P Parameter: Light Value: Far-red vs. White
  misc_feature: MA Experiment 20001248 PARAMETER Experiment Name: At_Far-red-induction_P Parameter: Organism Value: A. thaliana
  misc_feature: MA Experiment 20001248 PARAMETER Experiment Name: At_Far-red-induction_P Parameter: Plant Line Value: Columbia
  misc_feature: MA Experiment 20001248 PARAMETER Experiment Name: At_Far-red-induction_P Parameter: Timepoint (hr) Value: 4
  misc_feature: MA Experiment 20001248 PARAMETER Experiment Name: At_Far-red-induction_P Parameter: Tissue Value: Whole Plant
acgatagcctctcatcttcttttttcctctccatcatcttcaccataaccgaaaaaccaaacaaaaaatccttagataatcagatcttgatattatggatcatatcatcggctttatgggcacaacaaacatgtcacataacacaaaccttatgatcgctgccgcagccactaccactacgacctcttcgtcttcctcttcgtcctccggaggctcggggactaaccagctaagcaggtacgagaatcagaagagaagagattggaacactttcggacagtatctacgcaatcaccgtccaccactttctctctcccgttgcagtggtgctcatgttcttgaattcctcaggtacctcgaccaattcggcaagactaaggttcacacacacctatgtccgttcttcggacacccaaacccaccagcaccatgtgcctgtccactccgacaagcgtggggtagtctggacgcactcattggccgtcttagagctgcttttgaagagaacggtggttcaccagagacgaacccttttggtgcacgagccgttcgactctacctaagggaagtacgtgactcgcaggctaaagcacgtgggatcagctatgaaaaaaagaagcgcaagcgacctcctccgccactaccaccggctcagccggcgatttcaagtagccctaattaacattaagtcatgagtaagatgtttcaatgaactacgtttgtttacaaatttttatcaatgacgaacatgcacgagttcttttaaagtcacatgccctttcctaaacttttatttg

SEQ ID NO: 73791 - protein, 195 aa, Arabidopsis thaliana; identical to SEQ ID NO: 22865
  peptide (1)..(195): Ceres Seq. ID no. 4981254
  misc_feature (30)..(162): Pfam Name: Protein of unknown function (DUF640) Pfam Description: Protein of unknown function (DUF640)
  misc_feature (1)..(193): Homolog of NCBI NO: 18402578 NR Description: expressed protein; protein id: At2g31160.1, by cDNA: gi_15912210, supported by cDNA: gi_19547988 [Arabidopsis >gi|25408134|pir||C84717 hypothetical protein At2g31160
  misc_feature (30)..(179): Homolog of NCBI NO: 38344650 NR Description: OSJNBb0072M01.12 [Oryza sativa (japonica
  misc_feature (30)..(182): Homolog of NCBI NO: 37535384 NR Description: hypothetical protein [Oryza sativa (japonica group)] >gi|10140752|gb|AAG13584.1| hypothetical protein [Oryza >gi|31432676|gb|AAP54281.1| hypothetical protein [Oryza sativa
  misc_feature (45)..(193): Homolog of NCBI NO: 34907938 NR Description: B1088C09.17 [Oryza sativa (japonica
  misc_feature (47)..(180): Homolog of NCBI NO: 18390725 NR Description: expressed protein; protein id: At1g07090.1, by cDNA: 28780. [Arabidopsis thaliana] >gi|25341953|pir||G86205
  misc_feature (47)..(190): Homolog of NCBI NO: 15241821 NR Description: putative protein; protein id: At5g28490.1
  misc_feature (8)..(194): Homolog of NCBI NO: 15229310 NR Description: unknown protein; protein id: At3g04510.1 thaliana] >gi|7547110|gb|AAF63782.1| unknown protein [Arabidopsis
  misc_feature (34)..(179): Homolog of NCBI NO: 15237680 NR Description: putative protein; protein id: At5g58500.1 thaliana] >gi|10177027|dbj|BAB10265.1|
  misc_feature (33)..(193): Homolog of NCBI NO: 18406012 NR Description: expressed protein; protein id: At2g42610.1, by cDNA: gi_6691164 [Arabidopsis thaliana]
  misc_feature (46)..(183): Homolog of NCBI NO: 18412120 NR Description: Expressed protein; protein id: At1g78815.1, by cDNA: 230925. [Arabidopsis thaliana] >gi|25341951|pir||D96817

SEQ ID NO: 73792 - protein, 188 aa, Arabidopsis thaliana; identical to SEQ ID NO: 22866
  peptide (1)..(188): Ceres Seq. ID no. 4981255
  misc_feature (23)..(155): Pfam Name: Protein of unknown function (DUF640) Pfam Description: Protein of unknown function (DUF640)
  misc_feature (1)..(186): Homolog of NCBI NO: 18402578 NR Description: expressed protein; protein id: At2g31160.1, by cDNA: gi_15912210, supported by cDNA: gi_19547988 [Arabidopsis >gi|25408134|pir||C84717 hypothetical protein At2g31160
  misc_feature (23)..(172): Homolog of NCBI NO: 38344650 NR Description: OSJNBb0072M01.12 [Oryza sativa (japonica
  misc_feature (23)..(175): Homolog of NCBI NO: 37535384 NR Description: hypothetical protein [Oryza sativa (japonica group)] >gi|10140752|gb|AAG13584.1| hypothetical protein [Oryza >gi|31432676|gb|AAP54281.1| hypothetical protein [Oryza sativa
  misc_feature (38)..(186): Homolog of NCBI NO: 34907938 NR Description: B1088C09.17 [Oryza sativa (japonica
  misc_feature (40)..(173): Homolog of NCBI NO: 18390725 NR Description: expressed protein; protein id: At1g07090.1, by cDNA: 28780. [Arabidopsis thaliana] >gi|25341953|pir||G86205
  misc_feature (40)..(183): Homolog of NCBI NO: 15241821 NR Description: putative protein; protein id: At5g28490.1
  misc_feature (1)..(187): Homolog of NCBI NO: 15229310 NR Description: unknown protein; protein id: At3g04510.1 thaliana] >gi|7547110|gb|AAF63782.1| unknown protein [Arabidopsis
  misc_feature (27)..(172): Homolog of NCBI NO: 15237680 NR Description: putative protein; protein id: At5g58500.1 thaliana] >gi|10177027|dbj|BAB10265.1|
  misc_feature (26)..(186): Homolog of NCBI NO: 18406012 NR Description: expressed protein; protein id: At2g42610.1, by cDNA: gi_6691164 [Arabidopsis thaliana]
  misc_feature (39)..(176): Homolog of NCBI NO: 18412120 NR Description: Expressed protein; protein id: At1g78815.1, by cDNA: 230925. [Arabidopsis thaliana] >gi|25341951|pir||D96817

SEQ ID NO: 73793 - protein, 183 aa, Arabidopsis thaliana; identical to SEQ ID NO: 22867
  peptide (1)..(183): Ceres Seq. ID no. 4981256
  misc_feature (18)..(150): Pfam Name: Protein of unknown function (DUF640) Pfam Description: Protein of unknown function (DUF640)
  misc_feature (1)..(181): Homolog of NCBI NO: 18402578 NR Description: expressed protein; protein id: At2g31160.1, by cDNA: gi_15912210, supported by cDNA: gi_19547988 [Arabidopsis >gi|25408134|pir||C84717 hypothetical protein At2g31160
  misc_feature (18)..(167): Homolog of NCBI NO: 38344650 NR Description: OSJNBb0072M01.12 [Oryza sativa (japonica
  misc_feature (18)..(170): Homolog of NCBI NO: 37535384 NR Description: hypothetical protein [Oryza sativa (japonica group)] >gi|10140752|gb|AAG13584.1| hypothetical protein [Oryza >gi|31432676|gb|AAP54281.1| hypothetical protein [Oryza sativa
  misc_feature (33)..(181): Homolog of NCBI NO: 34907938 NR Description: B1088C09.17 [Oryza sativa (japonica
  misc_feature (35)..(168): Homolog of NCBI NO: 18390725 NR Description: expressed protein; protein id: At1g07090.1, by cDNA: 28780. [Arabidopsis thaliana] >gi|25341953|pir||G86205
  misc_feature (35)..(178): Homolog of NCBI NO: 15241821 NR Description: putative protein; protein id: At5g28490.1
  misc_feature (1)..(182): Homolog of NCBI NO: 15229310 NR Description: unknown protein; protein id: At3g04510.1 thaliana] >gi|7547110|gb|AAF63782.1| unknown protein [Arabidopsis
  misc_feature (22)..(167): Homolog of NCBI NO: 15237680 NR Description: putative protein; protein id: At5g58500.1 thaliana] >gi|10177027|dbj|BAB10265.1|
  misc_feature (21)..(181): Homolog of NCBI NO: 18406012 NR Description: expressed protein; protein id: At2g42610.1, by cDNA: gi_6691164 [Arabidopsis thaliana]
  misc_feature (34)..(171): Homolog of NCBI NO: 18412120 NR Description: Expressed protein; protein id: At1g78815.1, by cDNA: 230925. [Arabidopsis thaliana] >gi|25341951|pir||D96817

SEQ ID NO: 73794 - DNA, 1117 bp, Arabidopsis thaliana
  misc_feature (1)..(1117): Ceres Seq. ID no. 4981295
  misc_feature: MA Experiment ID: 108595 Result: Down-regulated in Transcription
  misc_feature: MA Experiment 108595 PARAMETER Experiment Name: At_Ler-pi_Ovule_cDNA_P Parameter: Plant Line Value: null
  misc_feature: MA Experiment ID: 20000111 Result: Down-regulated in Transcription
  misc_feature: MA Experiment 20000111 PARAMETER Experiment Name: At_42deg_Heat_cDNA_P Parameter: Temperature (deg C) Value: 42 vs. 22
  misc_feature: MA Experiment 20000111 PARAMETER Experiment Name: At_42deg_Heat_cDNA_P Parameter: Timepoint (hr) Value: 6
  misc_feature: MA Experiment 20000111 PARAMETER Experiment Name: At_42deg_Heat_cDNA_P Parameter: Tissue Value: Aerial
  misc_feature: MA Experiment ID: 20000264 Result: Up-regulated in Transcription
  misc_feature: MA Experiment 20000264 PARAMETER Experiment Name: At_Open_Flower_P Parameter: Age (day) Value: 21
  misc_feature: MA Experiment 20000264 PARAMETER Experiment Name: At_Open_Flower_P Parameter: Plant Line Value: WS
  misc_feature: MA Experiment 20000264 PARAMETER Experiment Name: At_Open_Flower_P Parameter: Tissue Value: Open Flower vs. Whole Plant
  misc_feature: MA Experiment ID: 20000794 Result: Up-regulated in Transcription
  misc_feature: MA Experiment 20000794 PARAMETER Experiment Name: At_Petals_P Parameter: Age (day) Value: 23-25 days
  misc_feature: MA Experiment 20000794 PARAMETER Experiment Name: At_Petals_P Parameter: Plant Line Value: WS
  misc_feature: MA Experiment 20000794 PARAMETER Experiment Name: At_Petals_P Parameter: Tissue Value: Petals vs. Whole plant
  misc_feature: MA Experiment ID: 20001557 Result: Down-regulated in Transcription
  misc_feature: MA Experiment 20001557 PARAMETER Experiment Name: At_Drought_Soil_Dry_P Parameter: Age (day) Value: 27
  misc_feature: MA Experiment 20001557 PARAMETER Experiment Name: At_Drought_Soil_Dry_P Parameter: Organism Value: A. thaliana
  misc_feature: MA Experiment 20001557 PARAMETER Experiment Name: At_Drought_Soil_Dry_P Parameter: Plant Line Value: WS
  misc_feature: MA Experiment 20001557 PARAMETER Experiment Name: At_Drought_Soil_Dry_P Parameter: Post Timepoint (hr) Value: 3
  misc_feature: MA Experiment 20001557 PARAMETER Experiment Name: At_Drought_Soil_Dry_P Parameter: Post-Treatment Value: Re-Water vs. No Drought
  misc_feature: MA Experiment 20001557 PARAMETER Experiment Name: At_Drought_Soil_Dry_P Parameter: Timepoint (day) Value: 13
  misc_feature: MA Experiment 20001557 PARAMETER Experiment Name: At_Drought_Soil_Dry_P Parameter: Treatment Value: Drought vs. No Drought
  misc_feature: MA Experiment ID: 20001558 Result: Down-regulated in Transcription
  misc_feature: MA Experiment 20001558 PARAMETER Experiment Name: At_Drought_Soil_Dry_P Parameter: Age (day) Value: 27
  misc_feature: MA Experiment 20001558 PARAMETER Experiment Name: At_Drought_Soil_Dry_P Parameter: Organism Value: A. thaliana
  misc_feature: MA Experiment 20001558 PARAMETER Experiment Name: At_Drought_Soil_Dry_P Parameter: Plant Line Value: WS
  misc_feature: MA Experiment 20001558 PARAMETER Experiment Name: At_Drought_Soil_Dry_P Parameter: Post Timepoint (hr) Value: 6
  misc_feature: MA Experiment 20001558 PARAMETER Experiment Name: At_Drought_Soil_Dry_P Parameter: Post-Treatment Value: Re-Water vs. No Drought
  misc_feature: MA Experiment 20001558 PARAMETER Experiment Name: At_Drought_Soil_Dry_P Parameter: Timepoint (day) Value: 13
  misc_feature: MA Experiment 20001558 PARAMETER Experiment Name: At_Drought_Soil_Dry_P Parameter: Treatment Value: Drought vs. No Drought
  misc_feature: Pfam Name: Peptidase_M24 Pfam Description: metallopeptidase family M24
agggaaaaatgttgcagaagatttctcagtctatttctttatgtaacggcgatcaatttaagccgttaatatacctcgccggagctccgacgaacttcatctcttcccctctctcagtttcaggcaagaagaaatcatcttctctgagaattaaaaggatacaacaacttcaaagtacattagaagatagaataaatccaccactagtatgtggaacagtatcgccacgtcttagtgttcctgatcatatactaaagcctctatatgttgagtctagcaaagttccagagatatcaagtgaattacagattcctgactctataggcattgtgaaaatgaagaaagcgtgtgagctcgcggctcgtgtattagactatgcaggaactttggttagaccgtttgttactacagatgaaattgataaagcagtgcatcagatggttattgagtttggtgcatatccttcacctcttggatatggtggatttcctaaaagtgtttgtacatcggttaatgaatgtatgtttcacgggattcccgattctcgtccgctacagaatggagatattataaacatcgatgttgcggtttacttggatgggtatcatggagatacgtcaaagactttcttatgtggagacgtcaatggaagccttaaacaacttgtcaaggtcacagaagaatgcttggagaaaggtatatcggtttgtaaagatggagcaagcttcaaacaaatcgggaagataatcagtgagcatgctgcaaagtatggctataatatggagcgattcatcggtcatggtgtaggaacggtattacactcggaacctcttatatatcttcatagtaactatgattatgaacttgaatatatgattgaaggtcaaacttttacgctcgaaccaattctcaccattggaacaacagagtttgtaacatggcctgacaaatggacaattgtgaccgcagatggtggtccggccgcacagtttgagcatacaattcttattaccaccactggtgcagaaattctcaccatatcatcatgaattatatcacaatgttacggaatttacattatgaaccatccatttctgttgtaaataaaagaaaatat

SEQ ID NO: 73795 - protein, 348 aa, Arabidopsis thaliana
  peptide (1)..(348): Ceres Seq. ID no. 4981296
  misc_feature: Pfam Name: Peptidase_M24 Pfam Description: metallopeptidase family M24
  misc_feature (3)..(348): Homolog of NCBI NO: 15230872 NR Description: methionine aminopeptidase, putative; protein id:
  misc_feature (3)..(348): Homolog of NCBI NO: 11320958 NR Description: methionine aminopeptidase-like protein
  misc_feature (3)..(348): Homolog of NCBI NO: 7939560 NR Description: methionine aminopeptidase-like protein
  misc_feature (25)..(345): Homolog of NCBI NO: 11320956 NR Description: methionine aminopeptidase-like protein
  misc_feature (25)..(345): Homolog of NCBI NO: 15222218 NR Description: methionine aminopeptidase I (MAP1), putative; id: At1g13270.1, supported by cDNA: gi_11320955 [Arabidopsis
  misc_feature (33)..(345): Homolog of NCBI NO: 38345794 NR Description: OSJNBa0085I10.11 [Oryza sativa (japonica
  misc_feature (55)..(345): Homolog of NCBI NO: 34394646 NR Description: putative methionine aminopeptidase I (MAP1)
  misc_feature (47)..(345): Homolog of NCBI NO: 25289731 NR Description: methionyl aminopeptidase-like protein [imported] -
  misc_feature (71)..(345): Homolog of NCBI NO: 18419957 NR Description: methionyl aminopeptidase-like protein; protein At4g37040.1 [Arabidopsis thaliana]
  misc_feature (34)..(345): Homolog of NCBI NO: 40385867 NR Description: methionine aminopeptidase 1D; similar to
GKMLQKISQSISLCNGDQFKPLIYLAGAPTNFISSPLSVSGKKKSSSLRIKRIQQLQSTLEDRINPPLVCGTVSPRLSVPDHILKPLYVESSKVPEISSELQIPDSIGIVKMKKACELAARVLDYAGTLVRPFVTTDEIDKAVHQMVIEFGAYPSPLGYGGFPKSVCTSVNECMFHGIPDSRPLQNGDIINIDVAVYLDGYHGDTSKTFLCGDVNGSLKQLVKVTEECLEKGISVCKDGASFKQIGKIISEHAAKYGYNMERFIGHGVGTVLHSEPLIYLHSNYDYELEYMIEGQTFTLEPILTIGTTEFVTWPDKWTIVTADGGPAAQFEHTILITTTGAEILTISS

SEQ ID NO: 73796 - protein, 346 aa, Arabidopsis thaliana
  peptide (1)..(346): Ceres Seq. ID no. 4981297
  misc_feature: Pfam Name: Peptidase_M24 Pfam Description: metallopeptidase family M24
  misc_feature (1)..(346): Homolog of NCBI NO: 15230872 NR Description: methionine aminopeptidase, putative; protein id:
  misc_feature (1)..(346): Homolog of NCBI NO: 11320958 NR Description: methionine aminopeptidase-like protein
  misc_feature (1)..(346): Homolog of NCBI NO: 7939560 NR Description: methionine aminopeptidase-like protein
  misc_feature (23)..(343): Homolog of NCBI NO: 11320956 NR Description: methionine aminopeptidase-like protein
  misc_feature (23)..(343): Homolog of NCBI NO: 15222218 NR Description: methionine aminopeptidase I (MAP1), putative; id: At1g13270.1, supported by cDNA: gi_11320955 [Arabidopsis
  misc_feature (31)..(343): Homolog of NCBI NO: 38345794 NR Description: OSJNBa0085I10.11 [Oryza sativa (japonica
  misc_feature (53)..(343): Homolog of NCBI NO: 34394646 NR Description: putative methionine aminopeptidase I (MAP1)
  misc_feature (45)..(343): Homolog of NCBI NO: 25289731 NR Description: methionyl aminopeptidase-like protein [imported] -
  misc_feature (69)..(343): Homolog of NCBI NO: 18419957 NR Description: methionyl aminopeptidase-like protein; protein At4g37040.1 [Arabidopsis thaliana]
  misc_feature (32)..(343): Homolog of NCBI NO: 40385867 NR Description: methionine aminopeptidase 1D; similar to
MLQKISQSISLCNGDQFKPLIYLAGAPTNFISSPLSVSGKKKSSSLRIKRIQQLQSTLEDRINPPLVCGTVSPRLSVPDHILKPLYVESSKVPEISSELQIPDSIGIVKMKKACELAARVLDYAGTLVRPFVTTDEIDKAVHQMVIEFGAYPSPLGYGGFPKSVCTSVNECMFHGIPDSRPLQNGDIINIDVAVYLDGYHGDTSKTFLCGDVNGSLKQLVKVTEECLEKGISVCKDGASFKQIGKIISEHAAKYGYNMERFIGHGVGTVLHSEPLIYLHSNYDYELEYMIEGQTFTLEPILTIGTTEFVTWPDKWTIVTADGGPAAQFEHTILITTTGAEILTISS

SEQ ID NO: 73797 - protein, 237 aa, Arabidopsis thaliana
  peptide (1)..(237): Ceres Seq. ID no. 4981298
  misc_feature: Pfam Name: Peptidase_M24 Pfam Description: metallopeptidase family M24
  misc_feature (1)..(237): Homolog of NCBI NO: 15230872 NR Description: methionine aminopeptidase, putative; protein id:
  misc_feature (1)..(237): Homolog of NCBI NO: 11320958 NR Description: methionine aminopeptidase-like protein
  misc_feature (1)..(237): Homolog of NCBI NO: 7939560 NR Description: methionine aminopeptidase-like protein
  misc_feature (1)..(234): Homolog of NCBI NO: 11320956 NR Description: methionine aminopeptidase-like protein
  misc_feature (1)..(234): Homolog of NCBI NO: 15222218 NR Description: methionine aminopeptidase I (MAP1), putative; id: At1g13270.1, supported by cDNA: gi_11320955 [Arabidopsis
  misc_feature (1)..(234): Homolog of NCBI NO: 38345794 NR Description: OSJNBa0085I10.11 [Oryza sativa (japonica
  misc_feature (1)..(234): Homolog of NCBI NO: 34394646 NR Description: putative methionine aminopeptidase I (MAP1)
  misc_feature (1)..(234): Homolog of NCBI NO: 25289731 NR Description: methionyl aminopeptidase-like protein [imported] -
  misc_feature (1)..(234): Homolog of NCBI NO: 18419957 NR Description: methionyl aminopeptidase-like protein; protein At4g37040.1 [Arabidopsis thaliana]
  misc_feature (1)..(234): Homolog of NCBI NO: 40385867 NR Description: methionine aminopeptidase 1D; similar to
MKKACELAARVLDYAGTLVRPFVTTDEIDKAVHQMVIEFGAYPSPLGYGGFPKSVCTSVNECMFHGIPDSRPLQNGDIINIDVAVYLDGYHGDTSKTFLCGDVNGSLKQLVKVTEECLEKGISVCKDGASFKQIGKIISEHAAKYGYNMERFIGHGVGTVLHSEPLIYLHSNYDYELEYMIEGQTFTLEPILTIGTTEFVTWPDKWTIVTADGGPAAQFEHTILITTTGAEILTISS

SEQ ID NO: 73798 - DNA, 1358 bp, Arabidopsis thaliana
  misc_feature (1)..(1358): Ceres Seq. ID no. 4981446
  misc_feature: MA Experiment ID: 108461 Result: Up-regulated in Transcription
  misc_feature: MA Experiment 108461 PARAMETER Experiment Name: At_Germinating_Seeds_cDNA_P Parameter: Age (day) Value: 1 vs. 0
  misc_feature: MA Experiment 108461 PARAMETER Experiment Name: At_Germinating_Seeds_cDNA_P Parameter: Tissue Value: Germinating Seeds
  misc_feature: MA Experiment ID: 108462 Result: Up-regulated in Transcription
  misc_feature: MA Experiment 108462 PARAMETER Experiment Name: At_Germinating_Seeds_cDNA_P Parameter: Age (day) Value: 2 vs. 0
  misc_feature: MA Experiment 108462 PARAMETER Experiment Name: At_Germinating_Seeds_cDNA_P Parameter: Tissue Value: Germinating Seeds
  misc_feature: MA Experiment ID: 108463 Result: Up-regulated in Transcription
  misc_feature: MA Experiment 108463 PARAMETER Experiment Name: At_Germinating_Seeds_cDNA_P Parameter: Age (day) Value: 3 vs. 0
  misc_feature: MA Experiment 108463 PARAMETER Experiment Name: At_Germinating_Seeds_cDNA_P Parameter: Tissue Value: Germinating Seeds
  misc_feature: MA Experiment ID: 108464 Result: Up-regulated in Transcription
  misc_feature: MA Experiment 108464 PARAMETER Experiment Name: At_Germinating_Seeds_cDNA_P Parameter: Age (day) Value: 4 vs. 0
  misc_feature: MA Experiment 108464 PARAMETER Experiment Name: At_Germinating_Seeds_cDNA_P Parameter: Tissue Value: Germinating Seeds
  misc_feature: MA Experiment ID: 108572 Result: Up-regulated in Transcription
  misc_feature: MA Experiment 108572 PARAMETER Experiment Name: At_Drought_cDNA_P Parameter: Timepoint (hr) Value: 1
  misc_feature: MA Experiment 108572 PARAMETER Experiment Name: At_Drought_cDNA_P Parameter: Tissue Value: Aerial
  misc_feature: MA Experiment 108572 PARAMETER Experiment Name: At_Drought_cDNA_P Parameter: Treatment Value: Drought vs. No Drought
  misc_feature: MA Experiment ID: 108573 Result: Up-regulated in Transcription
  misc_feature: MA Experiment 108573 PARAMETER Experiment Name: At_Drought_cDNA_P Parameter: Timepoint (hr) Value: 6
  misc_feature: MA Experiment 108573 PARAMETER Experiment Name: At_Drought_cDNA_P Parameter: Tissue Value: Aerial
  misc_feature: MA Experiment 108573 PARAMETER Experiment Name: At_Drought_cDNA_P Parameter: Treatment Value: Drought vs. No Drought
  misc_feature: MA Experiment ID: 108576 Result: Down-regulated in Transcription
  misc_feature: MA Experiment 108576 PARAMETER Experiment Name: At_42deg_Heat_cDNA_P Parameter: Temperature (deg C) Value: 42 vs. 22
  misc_feature: MA Experiment 108576 PARAMETER Experiment Name: At_42deg_Heat_cDNA_P Parameter: Timepoint (hr) Value: 1
  misc_feature: MA Experiment 108576 PARAMETER Experiment Name: At_42deg_Heat_cDNA_P Parameter: Tissue Value: Aerial
  misc_feature: MA Experiment ID: 108577 Result: Down-regulated in Transcription
  misc_feature: MA Experiment 108577 PARAMETER Experiment Name: At_42deg_Heat_cDNA_P Parameter: Temperature (deg C) Value: 42 vs. 22
  misc_feature: MA Experiment 108577 PARAMETER Experiment Name: At_42deg_Heat_cDNA_P Parameter: Timepoint (hr) Value: 6
  misc_feature: MA Experiment 108577 PARAMETER Experiment Name: At_42deg_Heat_cDNA_P Parameter: Tissue Value: Aerial
  misc_feature: MA Experiment ID: 108595 Result: Down-regulated in Transcription
  misc_feature: MA Experiment 108595 PARAMETER Experiment Name: At_Ler-pi_Ovule_cDNA_P Parameter: Plant Line Value: null
  misc_feature: MA Experiment ID: 108668 Result: Down-regulated in Transcription
  misc_feature: MA Experiment 108668 PARAMETER Experiment Name: At_2mM_SA_cDNA_P Parameter: Plant Line Value: WS
  misc_feature: MA Experiment 108668 PARAMETER Experiment Name: At_2mM_SA_cDNA_P Parameter: Timepoint (hr) Value: 6
  misc_feature: MA Experiment 108668 PARAMETER Experiment Name: At_2mM_SA_cDNA_P Parameter: Treatment Value: 2mM SA vs. No Treatment
  misc_feature: MA Experiment ID: 20000089 Result: Down-regulated in Transcription
  misc_feature: MA Experiment ID: 20000090 Result: Down-regulated in Transcription
  misc_feature: MA Experiment ID: 20000113 Result: Down-regulated in Transcription
  misc_feature: MA Experiment 20000113 PARAMETER Experiment Name: At_42deg_Heat_cDNA_P Parameter: Temperature (deg C) Value: 42 vs. 22
  misc_feature: MA Experiment 20000113 PARAMETER Experiment Name: At_42deg_Heat_cDNA_P Parameter: Timepoint (hr) Value: 8
  misc_feature: MA Experiment 20000113 PARAMETER Experiment Name: At_42deg_Heat_cDNA_P Parameter: Tissue Value: Aerial
  misc_feature: MA Experiment ID: 20000180 Result: Up-regulated in Transcription
  misc_feature: MA Experiment 20000180 PARAMETER Experiment Name: At_Germinating_Seeds_P Parameter: Age (hr) Value: 24 vs. 0
  misc_feature: MA Experiment 20000180 PARAMETER Experiment Name: At_Germinating_Seeds_P Parameter: Tissue Value: Germinating Seeds
  misc_feature: MA Experiment ID: 20000182 Result: Down-regulated in Transcription
  misc_feature: MA Experiment 20000182 PARAMETER Experiment Name: At_2mM_SA_P Parameter: Age (day) Value: 14
  misc_feature: MA Experiment 20000182 PARAMETER Experiment Name: At_2mM_SA_P Parameter: Organism Value: A. thaliana
  misc_feature: MA Experiment 20000182 PARAMETER Experiment Name: At_2mM_SA_P Parameter: Plant Line Value: WS
  misc_feature: MA Experiment 20000182 PARAMETER Experiment Name: At_2mM_SA_P Parameter: Timepoint (hr) Value: 6
  misc_feature: MA Experiment 20000182 PARAMETER Experiment Name: At_2mM_SA_P Parameter: Tissue Value: Aerial
  misc_feature: MA Experiment 20000182 PARAMETER Experiment Name: At_2mM_SA_P Parameter: Treatment Value: 2mM SA vs. No Treatment
  misc_feature: MA Experiment ID: 20000185 Result: Down-regulated in Transcription
  misc_feature: MA Experiment 20000185 PARAMETER Experiment Name: At_Roots__P Parameter: Age (day) Value: 7 vs. 21
  misc_feature: MA Experiment 20000185 PARAMETER Experiment Name: At_Roots__P Parameter: Organism Value: A. thaliana
  misc_feature: MA Experiment 20000185 PARAMETER Experiment Name: At_Roots__P Parameter: Tissue Value: Roots vs. Whole Plant
  misc_feature: MA Experiment ID: 20000437 Result: Down-regulated in Transcription
  misc_feature: MA Experiment 20000437 PARAMETER Experiment Name: At_Drought_P Parameter: Age (day) Value: 8
  misc_feature: MA Experiment 20000437 PARAMETER Experiment Name: At_Drought_P Parameter: Organism Value: A. thaliana
  misc_feature: MA Experiment 20000437 PARAMETER Experiment Name: At_Drought_P Parameter: Plant Line Value: WS
  misc_feature: MA Experiment 20000437 PARAMETER Experiment Name: At_Drought_P Parameter: Timepoint (hr) Value: 24
  misc_feature: MA Experiment 20000437 PARAMETER Experiment Name: At_Drought_P Parameter: Tissue Value: Whole Plant
  misc_feature: MA Experiment 20000437 PARAMETER Experiment Name: At_Drought_P Parameter: Treatment Value: Drought vs. No Drought
  misc_feature: MA Experiment ID: 20000438 Result: Up-regulated in Transcription
  misc_feature: MA Experiment 20000438 PARAMETER Experiment Name: At_Shoots__P Parameter: Age (day) Value: 14
  misc_feature: MA Experiment 20000438 PARAMETER Experiment Name: At_Shoots__P Parameter: Tissue Value: Shoots vs. Whole Plant
  misc_feature: MA Experiment ID: 20000439 Result: Down-regulated in Transcription
  misc_feature: MA Experiment 20000439 PARAMETER Experiment Name: At_Roots__P Parameter: Age (day) Value: 14 vs. 21
  misc_feature: MA Experiment 20000439 PARAMETER Experiment Name: At_Roots__P Parameter: Organism Value: A. thaliana
  misc_feature: MA Experiment 20000439 PARAMETER Experiment Name: At_Roots__P Parameter: Tissue Value: Roots vs. Whole Plant
  misc_feature: Pfam Name: DUF822 Pfam Description: Plant protein of unknown function (DUF822)
gtattcctcgtgagcactaacttctcactcattcttcttcttcagctgaatccaaatacccatttccatttttaaccgtggttggattgttttgagagttgaaggaagaagatgacgtctgacggagcaacgtcgacgtcagctgcagctgcagcagcagcgatggcgacgaggaggaaaccgtcgtggagagagagggagaacaatcggagaagagagcggcggagaagagctgttgcggcgaagatttatactggtcttagagctcaaggtaactacaatcttccaaaacattgtgacaacaatgaggttcttaaggctctttgttctgaagctggttgggttgttgaagaagacggaactacttatcgcaagggacacaagcctctacctggtgacatggctggatcatcttctcgagcaactccttactcttcccataaccaaagtcctctttcttccacttttgatagccccatcttatcttaccaagtcagtccttcctcttcttcattcccgagtccttctcgagttggtgatccacacaatatctccacaatcttccctttcctcaggaatggtggtattccttcatcgcttcctccacttagaatctcaaacagtgctcctgtcactccaccagtgtcatccccaacttctagaaaccccaaaccattgcctacttgggaatcttttaccaaacaatccatgtccatggctgctaaacagtcaatgacttctttgaactacccgttttatgcggtgtctgcacctgccagtcctactcatcatcgccagttccatgctccggctactatacctgaatgtgatgagtctgactcttccactgttgattctggtcattggataagctttcaaaagtttgcacaacaacagccattctctgcctctatggtgccaacctcgcctaccttcaatctcgtgaaacctgcaccacagcaattgtctccaaacacagcagcaatccaagagattggtcaaagctccgagtttaagtttgagaacagccaagttaagccatgggaaggggagaggatccatgatgtggctatggaggatctagagctcacgcttggaaatggtaaagctcatagttgagatgaagtatacatgaacctgttatgtcatgtcggaaggaaggattggagaatgagaattagtgtgttgttcattcagttcatggttttggttcttgttctagaatcgatattcattgtaccagtgagtttgtttcacaacgcattatttgtagatagaatgtttaagatgtatgtttctattatcattccttttaggtcttgaaaacattacaaatatattacatgattaagtggctt

SEQ ID NO: 73799 - protein, 335 aa, Arabidopsis thaliana; identical to SEQ ID NO: 21341
  peptide (1)..(335): Ceres Seq. ID no. 4981447
  misc_feature: Pfam Name: DUF822 Pfam Description: Plant protein of unknown function (DUF822)
  misc_feature (1)..(335): Homolog of NCBI NO: 18394728 NR Description: expressed protein; protein id: At1g19350.1, by cDNA: 24157., supported by cDNA: gi_18086445, supported by
  misc_feature (1)..(335): Homolog of NCBI NO: 6651069 NR Description: 107 protein [Arabidopsis thaliana]
  misc_feature (1)..(335): Homolog of NCBI NO: 21592457 NR Description: unknown [Arabidopsis thaliana]
  misc_feature (1)..(333): Homolog of NCBI NO: 18410764 NR Description: expressed protein; protein id: At1g75080.1, by cDNA: 33367., supported by cDNA: gi_18086460, supported by gi_20147314 [Arabidopsis thaliana]
  misc_feature (1)..(333): Homolog of NCBI NO: 18086461 NR Description: At1g75080/F9E10_7 [Arabidopsis thaliana]
  misc_feature (1)..(333): Homolog of NCBI NO: 25352558 NR Description: unknown protein F9E10.7 [imported] - Arabidopsis
  misc_feature (22)..(333): Homolog of NCBI NO: 15215731 NR Description: AT4g36780/C7A10_580 [Arabidopsis thaliana]
  misc_feature (21)..(280): Homolog of NCBI NO: 14626761 NR Description: mature anther-specific protein LAT61
  misc_feature (9)..(273): Homolog of NCBI NO: 33146833 NR Description: putative mature anther-specific protein LAT61
  misc_feature (200)..(335): Homolog of NCBI NO: 13937167 NR Description: At1g19350/F18O14_4 [Arabidopsis thaliana]

SEQ ID NO: 73800 - protein, 318 aa, Arabidopsis thaliana; identical to SEQ ID NO: 21342
  peptide (1)..(318): Ceres Seq. ID no. 4981448
  misc_feature: Pfam Name: DUF822 Pfam Description: Plant protein of unknown function (DUF822)
  misc_feature (1)..(318): Homolog of NCBI NO: 18394728 NR Description: expressed protein; protein id: At1g19350.1, by cDNA: 24157., supported by cDNA: gi_18086445, supported by
  misc_feature (1)..(318): Homolog of NCBI NO: 6651069 NR Description: 107 protein [Arabidopsis thaliana]
  misc_feature (1)..(318): Homolog of NCBI NO: 21592457 NR Description: unknown [Arabidopsis thaliana]
  misc_feature (1)..(316): Homolog of NCBI NO: 18410764 NR Description: expressed protein; protein id: At1g75080.1, by cDNA: 33367., supported by cDNA: gi_18086460, supported by gi_20147314 [Arabidopsis thaliana]
  misc_feature (1)..(316): Homolog of NCBI NO: 18086461 NR Description: At1g75080/F9E10_7 [Arabidopsis thaliana]
  misc_feature (1)..(316): Homolog of NCBI NO: 25352558 NR Description: unknown protein F9E10.7 [imported] - Arabidopsis
  misc_feature (5)..(316): Homolog of NCBI NO: 15215731 NR Description: AT4g36780/C7A10_580 [Arabidopsis thaliana]
  misc_feature (4)..(263): Homolog of NCBI NO: 14626761 NR Description: mature anther-specific protein LAT61
  misc_feature (1)..(256): Homolog of NCBI NO: 33146833 NR Description: putative mature anther-specific protein LAT61
  misc_feature (183)..(318): Homolog of NCBI NO: 13937167 NR Description: At1g19350/F18O14_4 [Arabidopsis thaliana]

SEQ ID NO: 73801 - protein, 239 aa, Arabidopsis thaliana; identical to SEQ ID NO: 21343
  peptide (1)..(239): Ceres Seq. ID no. 4981449
  misc_feature: Pfam Name: DUF822 Pfam Description: Plant protein of unknown function (DUF822)
  misc_feature (1)..(239): Homolog of NCBI NO: 18394728 NR Description: expressed protein; protein id: At1g19350.1, by cDNA: 24157., supported by cDNA: gi_18086445, supported by
  misc_feature (1)..(239): Homolog of NCBI NO: 6651069 NR Description: 107 protein [Arabidopsis thaliana]
  misc_feature (1)..(239): Homolog of NCBI NO: 21592457 NR Description: unknown [Arabidopsis thaliana]
  misc_feature (1)..(237): Homolog of NCBI NO: 18410764 NR Description: expressed protein; protein id: At1g75080.1, by cDNA: 33367., supported by cDNA: gi_18086460, supported by gi_20147314 [Arabidopsis thaliana]
  misc_feature (1)..(237): Homolog of NCBI NO: 18086461 NR Description: At1g75080/F9E10_7 [Arabidopsis thaliana]
  misc_feature (1)..(237): Homolog of NCBI NO: 25352558 NR Description: unknown protein F9E10.7 [imported] - Arabidopsis
  misc_feature (1)..(237): Homolog of NCBI NO: 15215731 NR Description: AT4g36780/C7A10_580 [Arabidopsis thaliana]
  misc_feature (1)..(184): Homolog of NCBI NO: 14626761 NR Description: mature anther-specific protein LAT61
  misc_feature (1)..(177): Homolog of NCBI NO: 33146833 NR Description: putative mature anther-specific protein LAT61
  misc_feature (104)..(239): Homolog of NCBI NO: 13937167 NR Description: At1g19350/F18O14_4 [Arabidopsis thaliana]

SEQ ID NO: 73802 - DNA, 1869 bp, Arabidopsis thaliana
  misc_feature (1)..(1869): Ceres Seq. ID no. 4981501
  misc_feature: MA Experiment ID: 108435 Result: Down-regulated in Transcription
  misc_feature: MA Experiment 108435 PARAMETER Experiment Name: At_stm_Mutants_cDNA_P Parameter: Plant Line Value: wt Landsburg vs stm
  misc_feature: MA Experiment 108435 PARAMETER Experiment Name: At_stm_Mutants_cDNA_P Parameter: Tissue Value: Shoot Apical Meristem Region
  misc_feature: MA Experiment ID: 108461 Result: Up-regulated in Transcription
  misc_feature: MA Experiment 108461 PARAMETER Experiment Name: At_Germinating_Seeds_cDNA_P Parameter: Age (day) Value: 1 vs. 0
  misc_feature: MA Experiment 108461 PARAMETER Experiment Name: At_Germinating_Seeds_cDNA_P Parameter: Tissue Value: Germinating Seeds
  misc_feature: MA Experiment ID: 108462 Result: Up-regulated in Transcription
  misc_feature: MA Experiment 108462 PARAMETER Experiment Name: At_Germinating_Seeds_cDNA_P Parameter: Age (day) Value: 2 vs. 0
  misc_feature: MA Experiment 108462 PARAMETER Experiment Name: At_Germinating_Seeds_cDNA_P Parameter: Tissue Value: Germinating Seeds
  misc_feature: MA Experiment ID: 108463 Result: Up-regulated in Transcription
  misc_feature: MA Experiment 108463 PARAMETER Experiment Name: At_Germinating_Seeds_cDNA_P Parameter: Age (day) Value: 3 vs. 0
  misc_feature: MA Experiment 108463 PARAMETER Experiment Name: At_Germinating_Seeds_cDNA_P Parameter: Tissue Value: Germinating Seeds
  misc_feature: MA Experiment ID: 108569 Result: Up-regulated in Transcription
  misc_feature: MA Experiment 108569 PARAMETER Experiment Name: At_0.001%_MeJA__cDNA_P Parameter: Timepoint (hr) Value: 6
  misc_feature: MA Experiment 108569 PARAMETER Experiment Name: At_0.001%_MeJA__cDNA_P Parameter: Tissue Value: Aerial
  misc_feature: MA Experiment 108569 PARAMETER Experiment Name: At_0.001%_MeJA__cDNA_P Parameter: Treatment Value: 0.001% MeJA vs. No Treatment
  misc_feature: MA Experiment ID: 108573 Result: Up-regulated in Transcription
  misc_feature: MA Experiment 108573 PARAMETER Experiment Name: At_Drought_cDNA_P Parameter: Timepoint (hr) Value: 6
  misc_feature: MA Experiment 108573 PARAMETER Experiment Name: At_Drought_cDNA_P Parameter: Tissue Value: Aerial
  misc_feature: MA Experiment 108573 PARAMETER Experiment Name: At_Drought_cDNA_P Parameter: Treatment Value: Drought vs. No Drought
  misc_feature: MA Experiment ID: 108595 Result: Down-regulated in Transcription
  misc_feature: MA Experiment 108595 PARAMETER Experiment Name: At_Ler-pi_Ovule_cDNA_P Parameter: Plant Line Value: null
  misc_feature: MA Experiment ID: 20000087 Result: Down-regulated in Transcription
  misc_feature: MA Experiment 20000087 PARAMETER Experiment Name: At_100uM_ABA_Mutants_cDNA_P Parameter: Plant Line Value: WS
  misc_feature: MA Experiment 20000087 PARAMETER Experiment Name: At_100uM_ABA_Mutants_cDNA_P Parameter: Timepoint (hr) Value: 6
  misc_feature: MA Experiment 20000087 PARAMETER Experiment Name: At_100uM_ABA_Mutants_cDNA_P Parameter: Tissue Value: Aerial
  misc_feature: MA Experiment 20000087 PARAMETER Experiment Name: At_100uM_ABA_Mutants_cDNA_P Parameter: Treatment Value: 100uM ABA vs. No Treatment
  misc_feature: MA Experiment ID: 20000179 Result: Up-regulated in Transcription
  misc_feature: MA Experiment 20000179 PARAMETER Experiment Name: At_Germinating_Seeds_P Parameter: Age (hr) Value: 6 vs. 0
  misc_feature: MA Experiment 20000179 PARAMETER Experiment Name: At_Germinating_Seeds_P Parameter: Tissue Value: Germinating Seeds
  misc_feature: MA Experiment ID: 20001451 Result: Down-regulated in Transcription
  misc_feature: MA Experiment 20001451 PARAMETER Experiment Name: At_Far-red-induction_P Parameter: Age (day) Value: 7
  misc_feature: MA Experiment 20001451 PARAMETER Experiment Name: At_Far-red-induction_P Parameter: Light Value: Far-red vs. White
  misc_feature: MA Experiment 20001451 PARAMETER Experiment Name: At_Far-red-induction_P Parameter: Organism Value: A. thaliana
  misc_feature: MA Experiment 20001451 PARAMETER Experiment Name: At_Far-red-induction_P Parameter: Plant Line Value: Columbia
  misc_feature: MA Experiment 20001451 PARAMETER Experiment Name: At_Far-red-induction_P Parameter: Timepoint (hr) Value: 24
  misc_feature: MA Experiment 20001451 PARAMETER Experiment Name: At_Far-red-induction_P Parameter: Tissue Value: Whole Plant
ataacaaatcacatttctctctcttctctgcttgaatccattacagagggattgtggagtggtttggtttgatttgatttcgatctgtgacaatggtggagactagtatcgacatggaggaaggaactctcgagatcggaatggagtatagaactgtctccggagttgctggacctttggtcatccttgacaaagtgaagggtccaaagtaccaggagattgttaatattcgcttaggagatggatcaacgagacgtggtcaggtcttggaggttgatggggagaaagctgttgtccaggtttttgaaggaacatctgggattgacaacaagtttaccaccgtgcaattcacaggagaggtgttactataaaagccttctcctcttttaagcttttggcagattagttaaaattttggttggaagttttctaaaaactaagaggatgcttggttacagtttttttcttgttctttttttgtcattatctgttattggtgtgtgttttcaggtactgaaaacgcctgtgtcattggacatgcttggccgcatatttaacggctcgggaaagccaattgataatggccctcctattttgccagaggcataccttgatatttctggaagttcaatcaaccccagtgaaagaacctaccctgaagagatgatacaaacggggatttctaccattgatgtcatgaactccattgctcgtggacagaagattcctcttttctctgctgctggtctacctcataatgagattgctgctcaaatttgtcgtcaggctggacttgtgaagcggttggaaaagactgagaacttaattcaggaggatcatggagaggacaattttgcaattgtttttgcagctatgggtgtaaacatggagacagctcagtttttcaagcgtgattttgaagaaaatggatcgatggaaagggttacccttttcctgaacttggccaatgatccaaccattgagagaattatcactcctcgaattgccctaacaaccgctgaatatttggcttatgaatgtggaaagcatgtgcttgttatattgacagacatgagttcttatgcagatgctcttcgtgaggtttctgctgctcgagaagaagttcctggaagacgtggatatccggggtatattatacagatcttgcaactatttatgaacgcgcgggacgtattgaaggaagaaagggttccattacccaaatccctatcctgactatgcccaatgacgatatcactcaccctactccggatcttactggttacattactgagggtcagatatatattgataggcaacttcacaacagacagatatacccacccattaacgtgcttccatcactttctcggctgatgaagagtgctattggtgaaggaatgactcgcaaagaccattctgatgtgtccaaccagctatacgcaaattatgcaatcggaaaagatgttcaagccatgaaagctgttgttggagaagaagctctgtcttccgaggatctgctgtatttagagtttctggataaatttgaaaggaagtttgtgatgcaaggcgcatacgatacaaggaacatcttccagtcgcttgacttggcatggacactgctccgtatcttcccacgtgagcttcttcaccgtattcctgccaaaacacttgatcaattctacagccgcgactccacaagctaaaccttttaaaacaagctctatgttgctccattcttatcttatttggaacttaaatcataccgagagaagacaaacaggattggttgcgtgaaaacaaaactcagagaattgtgaagttgggaattttcttttgtttttccatttgtataataaaggtttgtgt

SEQ ID NO: 73803 - protein, 263 aa, Arabidopsis thaliana
  peptide (1)..(263): Ceres Seq. ID no. 4981502
  misc_feature (136)..(218): Pfam Name: ATP synthase alpha/beta family, Pfam Description: ATP synthase alpha/beta family,
  misc_feature (22)..(218): Homolog of NCBI NO: 25290450 NR Description: hypothetical protein F14O10.13 - Arabidopsis >gi|9558599|gb|AAF88162.1|AC026234_13 Nearly identical to
  misc_feature (22)..(237): Homolog of NCBI NO: 17065080 NR Description: Unknown protein [Arabidopsis thaliana]
  misc_feature (22)..(237): Homolog of NCBI NO: 81637 NR Description: H+-exporting ATPase (EC 3.6.3.6) 57K chain -
  misc_feature (22)..(237): Homolog of NCBI NO: 15222929 NR Description: vacuolar ATP synthase subunit B; protein id: supported by cDNA: gi_166626, supported by cDNA: gi_20453109 thaliana] >gi|27735259|sp|P11574|VATB_ARATH Vacuolar
  misc_feature (22)..(175): Homolog of NCBI NO: 25290419 NR Description: protein T4O12.24 [imported] - Arabidopsis >gi|6721109|gb|AAF26763.1|AC007396_12 T4O12.24 [Arabidopsis
  misc_feature (174)..(237): Homolog of NCBI NO: 25290419 NR Description: protein T4O12.24 [imported] - Arabidopsis >gi|6721109|gb|AAF26763.1|AC007396_12 T4O12.24 [Arabidopsis
  misc_feature (22)..(237): Homolog of NCBI NO: 15233891 NR Description: probable H+-transporting ATPase; protein id: supported by cDNA: gi_14517367, supported by cDNA: gi_15010615,
  misc_feature (22)..(237): Homolog of NCBI NO: 34910488 NR Description: putative H+-transporting ATP synthase [Oryza
  misc_feature (22)..(237): Homolog of NCBI NO: 2493129 NR Description: Vacuolar ATP synthase subunit B isoform 1 B subunit 1) (Vacuolar proton pump B subunit 1)
  misc_feature (22)..(237): Homolog of NCBI NO: 2493132 NR Description: Vacuolar ATP synthase subunit B isoform 2 B subunit 2) (Vacuolar proton pump B subunit 2)
MLGYSFFLVLFLSLSVIGVCFQVLKTPVSLDMLGRIFNGSGKPIDNGPPILPEAYLDISGSSINPSERTYPEEMIQTGISTIDVMNSIARGQKIPLFSAAGLPHNEIAAQICRQAGLVKRLEKTENLIQEDHGEDNFAIVFAAMGVNMETAQFFKRDFEENGSMERVTLFLNLANDPTIERIITPRIALTTAEYLAYECGKHVLVILTDMSSYADALREVSAAREEVPGRRGYPGYIIQILQLFMNARDVLKEERVPLPKSLS

SEQ ID NO: 73804 - protein, 232 aa, Arabidopsis thaliana
  peptide (1)..(232): Ceres Seq. ID no. 4981503
  misc_feature (105)..(187): Pfam Name: ATP synthase alpha/beta family, Pfam Description: ATP synthase alpha/beta family,
  misc_feature (1)..(187): Homolog of NCBI NO: 25290450 NR Description: hypothetical protein F14O10.13 - Arabidopsis >gi|9558599|gb|AAF88162.1|AC026234_13 Nearly identical to
  misc_feature (1)..(206): Homolog of NCBI NO: 17065080 NR Description: Unknown protein [Arabidopsis thaliana]
  misc_feature (1)..(206): Homolog of NCBI NO: 81637 NR Description: H+-exporting ATPase (EC 3.6.3.6) 57K chain -
  misc_feature (1)..(206): Homolog of NCBI NO: 15222929 NR Description: vacuolar ATP synthase subunit B; protein id: supported by cDNA: gi_166626, supported by cDNA: gi_20453109 thaliana] >gi|27735259|sp|P11574|VATB_ARATH Vacuolar
  misc_feature (1)..(144): Homolog of NCBI NO: 25290419 NR Description: protein T4O12.24 [imported] - Arabidopsis >gi|6721109|gb|AAF26763.1|AC007396_12 T4O12.24 [Arabidopsis
  misc_feature (143)..(206): Homolog of NCBI NO: 25290419 NR Description: protein T4O12.24 [imported] - Arabidopsis >gi|6721109|gb|AAF26763.1|AC007396_12 T4O12.24 [Arabidopsis
  misc_feature (1)..(206): Homolog of NCBI NO: 15233891 NR Description: probable H+-transporting ATPase; protein id: supported by cDNA: gi_14517367, supported by cDNA: gi_15010615,
  misc_feature (1)..(206): Homolog of NCBI NO: 34910488 NR Description: putative H+-transporting ATP synthase [Oryza
  misc_feature (1)..(206): Homolog of NCBI NO: 2493129 NR Description: Vacuolar ATP synthase subunit B isoform 1 B subunit 1) (Vacuolar proton pump B subunit 1)
  misc_feature (1)..(206): Homolog of NCBI NO: 2493132 NR Description: Vacuolar ATP synthase subunit B isoform 2 B subunit 2) (Vacuolar proton pump B subunit 2)
MLGRIFNGSGKPIDNGPPILPEAYLDISGSSINPSERTYPEEMIQTGISTIDVMNSIARGQKIPLFSAAGLPHNEIAAQICRQAGLVKRLEKTENLIQEDHGEDNFAIVFAAMGVNMETAQFFKRDFEENGSMERVTLFLNLANDPTIERIITPRIALTTAEYLAYECGKHVLVILTDMSSYADALREVSAAREEVPGRRGYPGYIIQILQLFMNARDVLKEERVPLPKSLS

SEQ ID NO: 73805 - protein, 190 aa, Arabidopsis thaliana
  peptide (1)..(190): Ceres Seq. ID no. 4981504
  misc_feature (63)..(145): Pfam Name: ATP synthase alpha/beta family, Pfam Description: ATP synthase alpha/beta family,
  misc_feature (1)..(145): Homolog of NCBI NO: 25290450 NR Description: hypothetical protein F14O10.13 - Arabidopsis >gi|9558599|gb|AAF88162.1|AC026234_13 Nearly identical to
  misc_feature (1)..(164): Homolog of NCBI NO: 17065080 NR Description: Unknown protein [Arabidopsis thaliana]
  misc_feature (1)..(164): Homolog of NCBI NO: 81637 NR Description: H+-exporting ATPase (EC 3.6.3.6) 57K chain -
  misc_feature (1)..(164): Homolog of NCBI NO: 15222929 NR Description: vacuolar ATP synthase subunit B; protein id: supported by cDNA: gi_166626, supported by cDNA: gi_20453109 thaliana] >gi|27735259|sp|P11574|VATB_ARATH Vacuolar
  misc_feature (1)..(102): Homolog of NCBI NO: 25290419 NR Description: protein T4O12.24 [imported] - Arabidopsis >gi|6721109|gb|AAF26763.1|AC007396_12 T4O12.24 [Arabidopsis
  misc_feature (101)..(164): Homolog of NCBI NO: 25290419 NR Description: protein T4O12.24 [imported] - Arabidopsis >gi|6721109|gb|AAF26763.1|AC007396_12 T4O12.24 [Arabidopsis
  misc_feature (1)..(164): Homolog of NCBI NO: 15233891 NR Description: probable H+-transporting ATPase; protein id: supported by cDNA: gi_14517367, supported by cDNA: gi_15010615,
  misc_feature (1)..(164): Homolog of NCBI NO: 34910488 NR Description: putative H+-transporting ATP synthase [Oryza
  misc_feature (1)..(164): Homolog of NCBI NO: 2493129 NR Description: Vacuolar ATP synthase subunit B isoform 1 B subunit 1) (Vacuolar proton pump B subunit 1)
  misc_feature (1)..(164): Homolog of NCBI NO: 2493132 NR Description: Vacuolar ATP synthase subunit B isoform 2 B subunit 2) (Vacuolar proton pump B subunit 2)
MIQTGISTIDVMNSIARGQKIPLFSAAGLPHNEIAAQICRQAGLVKRLEKTENLIQEDHGEDNFAIVFAAMGVNMETAQFFKRDFEENGSMERVTLFLNLANDPTIERIITPRIALTTAEYLAYECGKHVLVILTDMSSYADALREVSAAREEVPGRRGYPGYIIQILQLFMNARDVLKEERVPLPKSLS

SEQ ID NO: 73806 - DNA, 1182 bp, Arabidopsis thaliana
  misc_feature (1)..(1182): Ceres Seq. ID no. 4981780
  misc_feature: MA Experiment ID: 20000169 Result: Up-regulated in Transcription
  misc_feature: MA Experiment 20000169 PARAMETER Experiment Name: At_100uM_ABA_P Parameter: Age (day) Value: 14
  misc_feature: MA Experiment 20000169 PARAMETER Experiment Name: At_100uM_ABA_P Parameter: Organism Value: A. thaliana
  misc_feature: MA Experiment 20000169 PARAMETER Experiment Name: At_100uM_ABA_P Parameter: Plant Line Value: WS
  misc_feature: MA Experiment 20000169 PARAMETER Experiment Name: At_100uM_ABA_P Parameter: Timepoint (hr) Value: 6
  misc_feature: MA Experiment 20000169 PARAMETER Experiment Name: At_100uM_ABA_P Parameter: Tissue Value: Aerial
  misc_feature: MA Experiment 20000169 PARAMETER Experiment Name: At_100uM_ABA_P Parameter: Treatment Value: 100uM ABA vs. No Treatment
  misc_feature: MA Experiment ID: 20000180 Result: Up-regulated in Transcription
  misc_feature: MA Experiment 20000180 PARAMETER Experiment Name: At_Germinating_Seeds_P Parameter: Age (hr) Value: 24 vs. 0
  misc_feature: MA Experiment 20000180 PARAMETER Experiment Name: At_Germinating_Seeds_P Parameter: Tissue Value: Germinating Seeds
  misc_feature: MA Experiment ID: 20000185 Result: Up-regulated in Transcription
  misc_feature: MA Experiment 20000185 PARAMETER Experiment Name: At_Roots__P Parameter: Age (day) Value: 7 vs. 21
  misc_feature: MA Experiment 20000185 PARAMETER Experiment Name: At_Roots__P Parameter: Organism Value: A. thaliana
  misc_feature: MA Experiment 20000185 PARAMETER Experiment Name: At_Roots__P Parameter: Tissue Value: Roots vs. Whole Plant
  misc_feature: MA Experiment ID: 20000234 Result: Down-regulated in Transcription
  misc_feature: MA Experiment 20000234 PARAMETER Experiment Name: At_Siliques_P Parameter: Age (day) Value: 21
  misc_feature: MA Experiment 20000234 PARAMETER Experiment Name: At_Siliques_P Parameter: Organism Value: A. thaliana
  misc_feature: MA Experiment 20000234 PARAMETER Experiment Name: At_Siliques_P Parameter: Plant Line Value: WS
  misc_feature: MA Experiment 20000234 PARAMETER Experiment Name: At_Siliques_P Parameter: Tissue Value: Less Than 5mm Siliques vs. Whole Plant
  misc_feature: MA Experiment ID: 20000264 Result: Down-regulated in Transcription
  misc_feature: MA Experiment 20000264 PARAMETER Experiment Name: At_Open_Flower_P Parameter: Age (day) Value: 21
  misc_feature: MA Experiment 20000264 PARAMETER Experiment Name: At_Open_Flower_P Parameter: Plant Line Value: WS
  misc_feature: MA Experiment 20000264 PARAMETER Experiment Name: At_Open_Flower_P Parameter: Tissue Value: Open Flower vs. Whole Plant
  misc_feature: MA Experiment ID: 20000265 Result: Down-regulated in Transcription
  misc_feature: MA Experiment 20000265 PARAMETER Experiment Name: At_Open_Flower_P Parameter: Age (day) Value: 21
  misc_feature: MA Experiment 20000265 PARAMETER Experiment Name: At_Open_Flower_P Parameter: Plant Line Value: WS
  misc_feature: MA Experiment 20000265 PARAMETER Experiment Name: At_Open_Flower_P Parameter: Tissue Value: Closed Flower vs. Whole Plant
  misc_feature: MA Experiment ID: 20000267 Result: Up-regulated in Transcription
  misc_feature: MA Experiment 20000267 PARAMETER Experiment Name: At_Drought_P Parameter: Age (day) Value: 7
  misc_feature: MA Experiment 20000267 PARAMETER Experiment Name: At_Drought_P Parameter: Organism Value: A. thaliana
  misc_feature: MA Experiment 20000267 PARAMETER Experiment Name: At_Drought_P Parameter: Plant Line Value: WS
  misc_feature: MA Experiment 20000267 PARAMETER Experiment Name: At_Drought_P Parameter: Timepoint (hr) Value: 6
  misc_feature: MA Experiment 20000267 PARAMETER Experiment Name: At_Drought_P Parameter: Tissue Value: Whole Plant
  misc_feature: MA Experiment 20000267 PARAMETER Experiment Name: At_Drought_P Parameter: Treatment Value: Drought vs. No Drought
  misc_feature: MA Experiment ID: 20000268 Result: Up-regulated in Transcription
  misc_feature: MA Experiment 20000268 PARAMETER Experiment Name: At_100mM_NaCl__P Parameter: Age (day) Value: 14
  misc_feature: MA Experiment 20000268 PARAMETER Experiment Name: At_100mM_NaCl__P Parameter: Organism Value: A. thaliana
  misc_feature: MA Experiment 20000268 PARAMETER Experiment Name: At_100mM_NaCl__P Parameter: Plant Line Value: WS
  misc_feature: MA Experiment 20000268 PARAMETER Experiment Name: At_100mM_NaCl__P Parameter: Timepoint (hr) Value: 6
  misc_feature: MA Experiment 20000268 PARAMETER Experiment Name: At_100mM_NaCl__P Parameter: Tissue Value: Whole Plant
  misc_feature: MA Experiment 20000268 PARAMETER Experiment Name: At_100mM_NaCl__P Parameter: Treatment Value: 100mM NaCl vs. No Treatment
  misc_feature: MA Experiment ID: 20000286 Result: Down-regulated in Transcription
  misc_feature: MA Experiment 20000286 PARAMETER Experiment Name: At_Open_Flower_P Parameter: Age (day) Value: 21
  misc_feature: MA Experiment 20000286 PARAMETER Experiment Name: At_Open_Flower_P Parameter: Plant Line Value: WS
  misc_feature: MA Experiment 20000286 PARAMETER Experiment Name: At_Open_Flower_P Parameter: Tissue Value: Half Open vs. Whole Plant
  misc_feature: MA Experiment ID: 20000308 Result: Up-regulated in Transcription
  misc_feature: MA Experiment 20000308 PARAMETER Experiment Name: At_100mM_NaCl__P Parameter: Age (day) Value: 17
  misc_feature: MA Experiment 20000308 PARAMETER Experiment Name: At_100mM_NaCl__P Parameter: Organism Value: A. thaliana
  misc_feature: MA Experiment 20000308 PARAMETER Experiment Name: At_100mM_NaCl__P Parameter: Plant Line Value: WS
  misc_feature: MA Experiment 20000308 PARAMETER Experiment Name: At_100mM_NaCl__P Parameter: Timepoint (hr) Value: 72
  misc_feature: MA Experiment 20000308 PARAMETER Experiment Name: At_100mM_NaCl__P Parameter: Tissue Value: Whole Plant
  misc_feature: MA Experiment 20000308 PARAMETER Experiment Name: At_100mM_NaCl__P Parameter: Treatment Value: 100mM NaCl vs. No Treatment
  misc_feature: MA Experiment ID: 20000437 Result: Up-regulated in Transcription
  misc_feature: MA Experiment 20000437 PARAMETER Experiment Name: At_Drought_P Parameter: Age (day) Value: 8
  misc_feature: MA Experiment 20000437 PARAMETER Experiment Name: At_Drought_P Parameter: Organism Value: A. thaliana
  misc_feature: MA Experiment 20000437 PARAMETER Experiment Name: At_Drought_P Parameter: Plant Line Value: WS
  misc_feature: MA Experiment 20000437 PARAMETER Experiment Name: At_Drought_P Parameter: Timepoint (hr) Value: 24
  misc_feature: MA Experiment 20000437 PARAMETER Experiment Name: At_Drought_P Parameter: Tissue Value: Whole Plant
  misc_feature: MA Experiment 20000437 PARAMETER Experiment Name: At_Drought_P Parameter: Treatment Value: Drought vs. No Drought
  misc_feature: MA Experiment ID: 20000441 Result: Down-regulated in Transcription
  misc_feature: MA Experiment 20000441 PARAMETER Experiment Name: At_1uM_BR-BRZ__P Parameter: Tissue Value: Shoot Apices
  misc_feature: MA Experiment 20000441 PARAMETER Experiment Name: At_1uM_BR-BRZ__P Parameter: Treatment Value: 1uM BR vs. No Treatment
  misc_feature: MA Experiment ID: 20000451 Result: Up-regulated in Transcription
  misc_feature: MA Experiment 20000451 PARAMETER Experiment Name: At_CS6879_Shoots-Roots_P Parameter: Age (day) Value: 14
  misc_feature: MA Experiment 20000451 PARAMETER Experiment Name: At_CS6879_Shoots-Roots_P Parameter: Organism Value: A. thaliana
  misc_feature: MA Experiment 20000451 PARAMETER Experiment Name: At_CS6879_Shoots-Roots_P Parameter: Plant Line Value: CS6879 vs. WS
  misc_feature: MA Experiment 20000451 PARAMETER Experiment Name: At_CS6879_Shoots-Roots_P Parameter: Tissue Value: Roots
  misc_feature: MA Experiment ID: 20000452 Result: Up-regulated in Transcription
  misc_feature: MA Experiment 20000452 PARAMETER Experiment Name: At_CS6879_Shoots-Roots_P Parameter: Age (day) Value: 14
  misc_feature: MA Experiment 20000452 PARAMETER Experiment Name: At_CS6879_Shoots-Roots_P Parameter: Organism Value: A. thaliana
  misc_feature: MA Experiment 20000452 PARAMETER Experiment Name: At_CS6879_Shoots-Roots_P Parameter: Plant Line Value: CS6879 vs. WS
  misc_feature: MA Experiment 20000452 PARAMETER Experiment Name: At_CS6879_Shoots-Roots_P Parameter: Tissue Value: Shoots
  misc_feature: MA Experiment ID: 20000453 Result: Up-regulated in Transcription
  misc_feature: MA Experiment 20000453 PARAMETER Experiment Name: At_100uM_ABA_P Parameter: Age (day) Value: 15
  misc_feature: MA Experiment 20000453 PARAMETER Experiment Name: At_100uM_ABA_P Parameter: Organism Value: A. thaliana
  misc_feature: MA Experiment 20000453 PARAMETER Experiment Name: At_100uM_ABA_P Parameter: Plant Line Value: WS
  misc_feature: MA Experiment 20000453 PARAMETER Experiment Name: At_100uM_ABA_P Parameter: Timepoint (hr) Value: 24
  misc_feature: MA Experiment 20000453 PARAMETER Experiment Name: At_100uM_ABA_P Parameter: Tissue Value: Aerial
  misc_feature: MA Experiment 20000453 PARAMETER Experiment Name: At_100uM_ABA_P Parameter: Treatment Value: 100uM ABA vs. No Treatment
  misc_feature: MA Experiment ID: 20000455 Result: Up-regulated in Transcription
  misc_feature: MA Experiment 20000455 PARAMETER Experiment Name: At_100uM_ABA_P Parameter: Age (day) Value: 16
  misc_feature: MA Experiment 20000455 PARAMETER Experiment Name: At_100uM_ABA_P Parameter: Organism Value: A. thaliana
  misc_feature: MA Experiment 20000455 PARAMETER Experiment Name: At_100uM_ABA_P Parameter: Plant Line Value: WS
  misc_feature: MA Experiment 20000455 PARAMETER Experiment Name: At_100uM_ABA_P Parameter: Timepoint (hr) Value: 48
  misc_feature: MA Experiment 20000455 PARAMETER Experiment Name: At_100uM_ABA_P Parameter: Tissue Value: Aerial
  misc_feature: MA Experiment 20000455 PARAMETER Experiment Name: At_100uM_ABA_P Parameter: Treatment Value: 100uM ABA vs. No Treatment
  misc_feature: MA Experiment ID: 20000794 Result: Down-regulated in Transcription
  misc_feature: MA Experiment 20000794 PARAMETER Experiment Name: At_Petals_P Parameter: Age (day) Value: 23-25 days
  misc_feature: MA Experiment 20000794 PARAMETER Experiment Name: At_Petals_P Parameter: Plant Line Value: WS
  misc_feature: MA Experiment 20000794 PARAMETER Experiment Name: At_Petals_P Parameter: Tissue Value: Petals vs. Whole plant
  misc_feature: MA Experiment ID: 20001554 Result: Up-regulated in Transcription
  misc_feature: MA Experiment 20001554 PARAMETER Experiment Name: At_Drought_Soil_Dry_P Parameter: Age (day) Value: 21
  misc_feature: MA Experiment 20001554 PARAMETER Experiment Name: At_Drought_Soil_Dry_P Parameter: Organism Value: A. thaliana
  misc_feature: MA Experiment 20001554 PARAMETER Experiment Name: At_Drought_Soil_Dry_P Parameter: Plant Line Value: WS
  misc_feature: MA Experiment 20001554 PARAMETER Experiment Name: At_Drought_Soil_Dry_P Parameter: Post Timepoint (hr) Value: None
  misc_feature: MA Experiment 20001554 PARAMETER Experiment Name: At_Drought_Soil_Dry_P Parameter: Post-Treatment Value: None
  misc_feature: MA Experiment 20001554 PARAMETER Experiment Name: At_Drought_Soil_Dry_P Parameter: Timepoint (day) Value: 7
  misc_feature: MA Experiment 20001554 PARAMETER Experiment Name: At_Drought_Soil_Dry_P Parameter: Treatment Value: Drought vs. No Drought
  misc_feature: MA Experiment ID: 20001555 Result: Up-regulated in Transcription
  misc_feature: MA Experiment 20001555 PARAMETER Experiment Name: At_Drought_Soil_Dry_P Parameter: Age (day) Value: 24
  misc_feature: MA Experiment 20001555 PARAMETER Experiment Name: At_Drought_Soil_Dry_P Parameter: Organism Value: A. thaliana
  misc_feature: MA Experiment 20001555 PARAMETER Experiment Name: At_Drought_Soil_Dry_P Parameter: Plant Line Value: WS
  misc_feature: MA Experiment 20001555 PARAMETER Experiment Name: At_Drought_Soil_Dry_P Parameter: Post Timepoint (hr) Value: None
  misc_feature: MA Experiment 20001555 PARAMETER Experiment Name: At_Drought_Soil_Dry_P Parameter: Post-Treatment Value: None
  misc_feature: MA Experiment 20001555 PARAMETER Experiment Name: At_Drought_Soil_Dry_P Parameter: Timepoint (day) Value: 10
  misc_feature: MA Experiment 20001555 PARAMETER Experiment Name: At_Drought_Soil_Dry_P Parameter: Treatment Value: Drought vs. No Drought
  misc_feature: MA Experiment ID: 20001556 Result: Up-regulated in Transcription
  misc_feature: MA Experiment 20001556 PARAMETER Experiment Name: At_Drought_Soil_Dry_P Parameter: Age (day) Value: 26
  misc_feature: MA Experiment 20001556 PARAMETER Experiment Name: At_Drought_Soil_Dry_P Parameter: Organism Value: A. thaliana
  misc_feature: MA Experiment 20001556 PARAMETER Experiment Name: At_Drought_Soil_Dry_P Parameter: Plant Line Value: WS
  misc_feature: MA Experiment 20001556 PARAMETER Experiment Name: At_Drought_Soil_Dry_P Parameter: Post Timepoint (hr) Value: None
  misc_feature: MA Experiment 20001556 PARAMETER Experiment Name: At_Drought_Soil_Dry_P Parameter: Post-Treatment Value: None
  misc_feature: MA Experiment 20001556 PARAMETER Experiment Name: At_Drought_Soil_Dry_P Parameter: Timepoint (day) Value: 12
  misc_feature: MA Experiment 20001556 PARAMETER Experiment Name: At_Drought_Soil_Dry_P Parameter: Treatment Value: Drought vs. No Drought
  misc_feature: MA Experiment ID: 20001559 Result: Up-regulated in Transcription
  misc_feature: MA Experiment 20001559 PARAMETER Experiment Name: At_Drought_Soil_Dry_P Parameter: Age (day) Value: 28
  misc_feature: MA Experiment 20001559 PARAMETER Experiment Name: At_Drought_Soil_Dry_P Parameter: Organism Value: A. thaliana
  misc_feature: MA Experiment 20001559 PARAMETER Experiment Name: At_Drought_Soil_Dry_P Parameter: Plant Line Value: WS
  misc_feature: MA Experiment 20001559 PARAMETER Experiment Name: At_Drought_Soil_Dry_P Parameter: Post Timepoint (hr) Value: 29
  misc_feature: MA Experiment 20001559 PARAMETER Experiment Name: At_Drought_Soil_Dry_P Parameter: Post-Treatment Value: Re-Water vs. No Drought
  misc_feature: MA Experiment 20001559 PARAMETER Experiment Name: At_Drought_Soil_Dry_P Parameter: Timepoint (day) Value: 14
  misc_feature: MA Experiment 20001559 PARAMETER Experiment Name: At_Drought_Soil_Dry_P Parameter: Treatment Value: Drought vs. No Drought
  misc_feature: MA Experiment ID: 20001904 Result: Up-regulated in Transcription
  misc_feature: MA Experiment 20001904 PARAMETER Experiment Name: At_Drought_Reproduction_P Parameter: Age (day) Value: 37
  misc_feature: MA Experiment 20001904 PARAMETER Experiment Name: At_Drought_Reproduction_P Parameter: Organism Value: A. thaliana
  misc_feature: MA Experiment 20001904 PARAMETER Experiment Name: At_Drought_Reproduction_P Parameter: Plant Line Value: WS
  misc_feature: MA Experiment 20001904 PARAMETER Experiment Name: At_Drought_Reproduction_P Parameter: Timepoint (day) Value: 7
  misc_feature: MA Experiment 20001904 PARAMETER Experiment Name: At_Drought_Reproduction_P Parameter: Tissue Value: Rosettes
  misc_feature: MA Experiment 20001904 PARAMETER Experiment Name: At_Drought_Reproduction_P Parameter: Treatment Value: Drought vs. No Drought
  misc_feature: MA Experiment ID: 20001905 Result: Up-regulated in Transcription
  misc_feature: MA Experiment 20001905 PARAMETER Experiment Name: At_Drought_Reproduction_P Parameter: Age (day) Value: 40
  misc_feature: MA Experiment 20001905 PARAMETER Experiment Name: At_Drought_Reproduction_P Parameter: Organism Value: A. thaliana
  misc_feature: MA Experiment 20001905 PARAMETER Experiment Name: At_Drought_Reproduction_P Parameter: Plant Line Value: WS
  misc_feature: MA Experiment 20001905 PARAMETER Experiment Name: At_Drought_Reproduction_P Parameter: Timepoint (day) Value: 10
  misc_feature: MA Experiment 20001905 PARAMETER Experiment Name: At_Drought_Reproduction_P Parameter: Tissue Value: Rosettes
  misc_feature: MA Experiment 20001905 PARAMETER Experiment Name: At_Drought_Reproduction_P Parameter: Treatment Value: Drought vs. No Drought
  misc_feature: MA Experiment ID: 20001906 Result: Up-regulated in Transcription
  misc_feature: MA Experiment 20001906 PARAMETER Experiment Name: At_Drought_Reproduction_P Parameter: Age (day) Value: 35
  misc_feature: MA Experiment 20001906 PARAMETER Experiment Name: At_Drought_Reproduction_P Parameter: Organism Value: A. thaliana
  misc_feature: MA Experiment 20001906 PARAMETER Experiment Name: At_Drought_Reproduction_P Parameter: Plant Line Value: WS
  misc_feature: MA Experiment 20001906 PARAMETER Experiment Name: At_Drought_Reproduction_P Parameter: Timepoint (day) Value: 5
  misc_feature: MA Experiment 20001906 PARAMETER Experiment Name: At_Drought_Reproduction_P Parameter: Tissue Value: Siliques
  misc_feature: MA Experiment 20001906 PARAMETER Experiment Name: At_Drought_Reproduction_P Parameter: Treatment Value: Drought vs. No Drought
  misc_feature: MA Experiment ID: 20001910 Result: Up-regulated in Transcription
  misc_feature: MA Experiment 20001910 PARAMETER Experiment Name: At_Drought_Reproduction_P Parameter: Age (day) Value: 37
  misc_feature: MA Experiment 20001910 PARAMETER Experiment Name: At_Drought_Reproduction_P Parameter: Organism Value: A. thaliana
  misc_feature: MA Experiment 20001910 PARAMETER Experiment Name: At_Drought_Reproduction_P Parameter: Plant Line Value: WS
  misc_feature: MA Experiment 20001910 PARAMETER Experiment Name: At_Drought_Reproduction_P Parameter: Timepoint (day) Value: 7
  misc_feature: MA Experiment 20001910 PARAMETER Experiment Name: At_Drought_Reproduction_P Parameter: Tissue Value: Flowers
  misc_feature: MA Experiment 20001910 PARAMETER Experiment Name: At_Drought_Reproduction_P Parameter: Treatment Value: Drought vs. No Drought
  misc_feature: MA Experiment ID: 20001911 Result: Up-regulated in Transcription
  misc_feature: MA Experiment 20001911 PARAMETER Experiment Name: At_Drought_Reproduction_P Parameter: Age (day) Value: 40
  misc_feature: MA Experiment 20001911 PARAMETER Experiment Name: At_Drought_Reproduction_P Parameter: Organism Value: A. thaliana
  misc_feature: MA Experiment 20001911 PARAMETER Experiment Name: At_Drought_Reproduction_P Parameter: Plant Line Value: WS
  misc_feature: MA Experiment 20001911 PARAMETER Experiment Name: At_Drought_Reproduction_P Parameter: Timepoint (day) Value: 10
  misc_feature: MA Experiment 20001911 PARAMETER Experiment Name: At_Drought_Reproduction_P Parameter: Tissue Value: Flowers
  misc_feature: MA Experiment 20001911 PARAMETER Experiment Name: At_Drought_Reproduction_P Parameter: Treatment Value: Drought vs. No Drought
aacatacacaaaacactaaaagtagaagaaaaatggcgactcttaaggtttctgattctgttcctgctccttctgatgatgctgagcaattgagaaccgctttgatggggtacgaacgaggacttgatcatatcaatcttggctcacagaagtgctgaacagaggaaagtcatcaggcaagcataccacgaaacctacggcgaagaccttctcaagactcttgacaaggagctctctaacgatttcgagagagctatcttgttgtggactcttgaacccggtgagcgtgatgctttattggctaatgaagctacaaaaagatggacttcaagcaaccaagttcttatggaagttgcttgcacaaggacatcaacgcagctgcttcacgctaggcaagcttaccatgctcgctacaagaagtctcttgaagaggacgttgctcaccacactaccggtgacttcagaaagcttttggtttctcttgttacctcatacaggtacgaaggagatgaagtgaacatgacattggctaagcaagaagctaagctggtccatgagaaaatcaaggacaagcactacaatgatgaggatgttattagaatcttgtccacaagaagcaaagctcagatcaatgctacttttaaccgttaccaagatgatcatggcgaggaaattctcaagagtcttgaggaaggagatgatgatgacaagttccttgcacttttgaggtcaaccattcagtgcttgacaagaccagagctttactttgtcgatgttcttcgttcagcaatcaacaaaactggaactgatgaaggagcactcactagaattgtgaccacaagagctgagattgacttgaaggtcattggagaggagtaccagcgcaggaacagcattcctttggagaaagctattaccaaagacactcgtggagattacgagaagatgctcgtcgcacttctcggtgaagatgatgcttaatcaatcaatcctccacagagaaacataagctgctctacagcttctgttatctcttatctccctctctctctctttgatgagtttcaaatcgtttgattttgtttctacaaaaaccttgtttgtttctgttgtgtgttttgagttcctaaataatgcaaaagagagagacagagagaaccagtgtggtctcttaagttatat

SEQ ID NO: 73807 - protein, 211 aa, Arabidopsis thaliana; identical to SEQ ID NO: 24550
  peptide (1)..(211): Ceres Seq. ID no. 4981781
  misc_feature (62)..(130): Pfam Name: Annexin Pfam Description: Annexin
  misc_feature (1)..(211): Homolog of NCBI NO: 15220216 NR Description: Ca2+-dependent membrane-binding protein annexin; id: At1g35720.1, supported by cDNA: 25846., supported by cDNA:
  misc_feature (1)..(211): Homolog of NCBI NO: 1621539 NR Description: annexin-like protein
  misc_feature (1)..(211): Homolog of NCBI NO: 1429207 NR Description: annexin [Arabidopsis thaliana]
  misc_feature (1)..(207): Homolog of NCBI NO: 7484723 NR Description: fiber annexin - upland cotton
  misc_feature (1)..(207): Homolog of NCBI NO: 15214410 NR Description: annexin [Gossypium hirsutum]
  misc_feature (1)..(207): Homolog of NCBI NO: 33357398 NR Description: Chain A, Annexin Gh1 From Cotton
  misc_feature (1)..(211): Homolog of NCBI NO: 2459926 NR Description: annexin [Lavatera thuringiaca]
  misc_feature (1)..(211): Homolog of NCBI NO: 3928134 NR Description: annexin P38 [Capsicum annuum]
  misc_feature (1)..(211): Homolog of NCBI NO: 4580920 NR Description: vacuole-associated annexin VCaB42 [Nicotiana
  misc_feature (1)..(207): Homolog of NCBI NO: 7441510 NR Description: annexin - upland cotton (fragment)

SEQ ID NO: 73808 - protein, 153 aa, Arabidopsis thaliana; identical to SEQ ID NO: 24551
  peptide (1)..(153): Ceres Seq. ID no. 4981782
  misc_feature (4)..(72): Pfam Name: Annexin Pfam Description: Annexin
  misc_feature (1)..(153): Homolog of NCBI NO: 15220216 NR Description: Ca2+-dependent membrane-binding protein annexin; id: At1g35720.1, supported by cDNA: 25846., supported by cDNA:
  misc_feature (1)..(153): Homolog of NCBI NO: 1621539 NR Description: annexin-like protein
  misc_feature (1)..(153): Homolog of NCBI NO: 1429207 NR Description: annexin [Arabidopsis thaliana]
  misc_feature (1)..(149): Homolog of NCBI NO: 7484723 NR Description: fiber annexin - upland cotton
  misc_feature (1)..(149): Homolog of NCBI NO: 15214410 NR Description: annexin [Gossypium hirsutum]
  misc_feature (1)..(149): Homolog of NCBI NO: 33357398 NR Description: Chain A, Annexin Gh1 From Cotton
  misc_feature (1)..(153): Homolog of NCBI NO: 2459926 NR Description: annexin [Lavatera thuringiaca]
  misc_feature (1)..(153): Homolog of NCBI NO: 3928134 NR Description: annexin P38 [Capsicum annuum]
  misc_feature (1)..(153): Homolog of NCBI NO: 4580920 NR Description: vacuole-associated annexin VCaB42 [Nicotiana
  misc_feature (1)..(149): Homolog of NCBI NO: 7441510 NR Description: annexin - upland cotton (fragment)

SEQ ID NO: 73809 - DNA, 872 bp, Arabidopsis thaliana
  misc_feature (1)..(872): Ceres Seq. ID no. 4981826
  misc_feature: MA Experiment ID: 108434 Result: Down-regulated in Transcription
  misc_feature: MA Experiment 108434 PARAMETER Experiment Name: At_Root_Tips_cDNA_P Parameter: Tissue Value: Root Tips
  misc_feature: MA Experiment ID: 20000286 Result: Down-regulated in Transcription
  misc_feature: MA Experiment 20000286 PARAMETER Experiment Name: At_Open_Flower_P Parameter: Age (day) Value: 21
  misc_feature: MA Experiment 20000286 PARAMETER Experiment Name: At_Open_Flower_P Parameter: Plant Line Value: WS
  misc_feature: MA Experiment 20000286 PARAMETER Experiment Name: At_Open_Flower_P Parameter: Tissue Value: Half Open vs. Whole Plant
  misc_feature: MA Experiment ID: 20001558 Result: Down-regulated in Transcription
  misc_feature: MA Experiment 20001558 PARAMETER Experiment Name: At_Drought_Soil_Dry_P Parameter: Age (day) Value: 27
  misc_feature: MA Experiment 20001558 PARAMETER Experiment Name: At_Drought_Soil_Dry_P Parameter: Organism Value: A. thaliana
  misc_feature: MA Experiment 20001558 PARAMETER Experiment Name: At_Drought_Soil_Dry_P Parameter: Plant Line Value: WS
  misc_feature: MA Experiment 20001558 PARAMETER Experiment Name: At_Drought_Soil_Dry_P Parameter: Post Timepoint (hr) Value: 6
  misc_feature: MA Experiment 20001558 PARAMETER Experiment Name: At_Drought_Soil_Dry_P Parameter: Post-Treatment Value: Re-Water vs. No Drought
  misc_feature: MA Experiment 20001558 PARAMETER Experiment Name: At_Drought_Soil_Dry_P Parameter: Timepoint (day) Value: 13
  misc_feature: MA Experiment 20001558 PARAMETER Experiment Name: At_Drought_Soil_Dry_P Parameter: Treatment Value: Drought vs. No Drought
aaataatcggaaacagcgtcttctccataaacccagaaaatcgcagagagctttctcttgtctttgtacagatctctcccatcatcgttcgtgattcgatgccttctcgtagaagaactctcctcaaagtcatcatcctcggtgatagcggggttgggaagacttctttaatgaatcaatatgttaataagaagttcagcaaccagtataaggcaactattggggctgatttcttgactaaggaagttcaatttgaagaccggcttttcactttacagatctgggacacagctggtcaagaaaggtttcagagtcttggtgttgcgttttatcgtggtgctgattgctgtgttcttgtatatgatgtcaactccgcaaaatcattcgaggatctcaacaactggagggaagagtttctgatccaggcaagtccttcggatccagagaactttccctttgttgttatcggtaataagatcgatgtggatggtggaagcagccgggtggtatcagagaagaaggctcgagcttggtgtgcttcgaaaggaaacattccatactatgaaacctcagctaaagtaggcaccaatgtagaagacgcgttcctgtgcataactacgaacgcaatgaagagtggagaagaggaagaaatgtacctaccagacacgatcgatgtcggaaccagcaatccacagaggtcaacaggatgtgaatgctgaaagtgttcatttgacctatgctctctcatcagttatcccactctgaggttttttaccatattgtaaatctgttgttctgtggtacattaatattttaaaaatttagaaccctaataaataaataattaaaaagccgaattgggttggtcggtg

SEQ ID NO: 73810 - protein, 238 aa, Arabidopsis thaliana; identical to SEQ ID NO: 40275
  peptide (1)..(238): Ceres Seq. ID no. 4981827
  misc_feature (42)..(210): Pfam Name: Ras family Pfam Description: Ras family
  misc_feature (33)..(238): Homolog of NCBI NO: 15222098 NR Description: small GTP-binding protein, putative; protein id:
  misc_feature (33)..(238): Homolog of NCBI NO: 15230211 NR Description: GTP-binding protein, putative; protein id: supported by cDNA: 101693., supported by cDNA: gi_14334927, by cDNA: gi_15718407, supported by cDNA: gi_16323367 [Arabidopsis
  misc_feature (33)..(238): Homolog of NCBI NO: 21536526 NR Description: GTP binding protein, putative [Arabidopsis
  misc_feature (33)..(238): Homolog of NCBI NO: 1370186 NR Description: RAB7C [Lotus japonicus]
  misc_feature (33)..(238): Homolog of NCBI NO: 34484308 NR Description: putative GTP-binding protein [Cucumis sativus]
  misc_feature (33)..(238): Homolog of NCBI NO: 400923 NR Description: RAS-RELATED PROTEIN RAB7 >gi|485497|pir||S33531
  misc_feature (33)..(238): Homolog of NCBI NO: 7438408 NR Description: GTP-binding protein Rab7b - common tobacco
  misc_feature (33)..(236): Homolog of NCBI NO: 3914557 NR Description: RAS-RELATED PROTEIN RAB7 (POSSIBLE
  misc_feature (33)..(238): Homolog of NCBI NO: 1370188 NR Description: RAB7D [Lotus japonicus]
  misc_feature (33)..(238): Homolog of NCBI NO: 3914550 NR Description: RAS-RELATED PROTEIN RAB7

SEQ ID NO: 73811 - protein, 206 aa, Arabidopsis thaliana; identical to SEQ ID NO: 40276
  peptide (1)..(206): Ceres Seq. ID no. 4981828
  misc_feature (10)..(178): Pfam Name: Ras family Pfam Description: Ras family
  misc_feature (1)..(206): Homolog of NCBI NO: 15222098 NR Description: small GTP-binding protein, putative; protein id:
  misc_feature (1)..(206): Homolog of NCBI NO: 15230211 NR Description: GTP-binding protein, putative; protein id: supported by cDNA: 101693., supported by cDNA: gi_14334927, by cDNA: gi_15718407, supported by cDNA: gi_16323367 [Arabidopsis
  misc_feature (1)..(206): Homolog of NCBI NO: 21536526 NR Description: GTP binding protein, putative [Arabidopsis
  misc_feature (1)..(206): Homolog of NCBI NO: 1370186 NR Description: RAB7C [Lotus japonicus]
  misc_feature (1)..(206): Homolog of NCBI NO: 34484308 NR Description: putative GTP-binding protein [Cucumis sativus]
  misc_feature (1)..(206): Homolog of NCBI NO: 400923 NR Description: RAS-RELATED PROTEIN RAB7 >gi|485497|pir||S33531
  misc_feature (1)..(206): Homolog of NCBI NO: 7438408 NR Description: GTP-binding protein Rab7b - common tobacco
  misc_feature (1)..(204): Homolog of NCBI NO: 3914557 NR Description: RAS-RELATED PROTEIN RAB7 (POSSIBLE
  misc_feature (1)..(206): Homolog of NCBI NO: 1370188 NR Description: RAB7D [Lotus japonicus]
  misc_feature (1)..(206): Homolog of NCBI NO: 3914550 NR Description: RAS-RELATED PROTEIN RAB7

SEQ ID NO: 73812 - protein, 182 aa, Arabidopsis thaliana; identical to SEQ ID NO: 40277
  peptide (1)..(182): Ceres Seq. ID no. 4981829
  misc_feature (1)..(154): Pfam Name: Ras family Pfam Description: Ras family
  misc_feature (1)..(182): Homolog of NCBI NO: 15222098 NR Description: small GTP-binding protein, putative; protein id:
  misc_feature (1)..(182): Homolog of NCBI NO: 15230211 NR Description: GTP-binding protein, putative; protein id: supported by cDNA: 101693., supported by cDNA: gi_14334927, by cDNA: gi_15718407, supported by cDNA: gi_16323367 [Arabidopsis
  misc_feature (1)..(182): Homolog of NCBI NO: 21536526 NR Description: GTP binding protein, putative [Arabidopsis
  misc_feature (1)..(182): Homolog of NCBI NO: 1370186 NR Description: RAB7C [Lotus japonicus]
  misc_feature (1)..(182): Homolog of NCBI NO: 34484308 NR Description: putative GTP-binding protein [Cucumis sativus]
  misc_feature (1)..(182): Homolog of NCBI NO: 400923 NR Description: RAS-RELATED PROTEIN RAB7 >gi|485497|pir||S33531
  misc_feature (1)..(182): Homolog of NCBI NO: 7438408 NR Description: GTP-binding protein Rab7b - common tobacco
  misc_feature (1)..(180): Homolog of NCBI NO: 3914557 NR Description: RAS-RELATED PROTEIN RAB7 (POSSIBLE
  misc_feature (1)..(182): Homolog of NCBI NO: 1370188 NR Description: RAB7D [Lotus japonicus]
  misc_feature (1)..(182): Homolog of NCBI NO: 3914550 NR Description: RAS-RELATED PROTEIN RAB7

SEQ ID NO: 73813 - DNA, 819 bp, Arabidopsis thaliana
  misc_feature (1)..(819): Ceres Seq. ID no. 4982024
  misc_feature: MA Experiment ID: 20000234 Result: Down-regulated in Transcription
  misc_feature: MA Experiment 20000234 PARAMETER Experiment Name: At_Siliques_P Parameter: Age (day) Value: 21
  misc_feature: MA Experiment 20000234 PARAMETER Experiment Name: At_Siliques_P Parameter: Organism Value: A. thaliana
  misc_feature: MA Experiment 20000234 PARAMETER Experiment Name: At_Siliques_P Parameter: Plant Line Value: WS
  misc_feature: MA Experiment 20000234 PARAMETER Experiment Name: At_Siliques_P Parameter: Tissue Value: Less Than 5mm Siliques vs. Whole Plant
  misc_feature: MA Experiment ID: 20000264 Result: Down-regulated in Transcription
  misc_feature: MA Experiment 20000264 PARAMETER Experiment Name: At_Open_Flower_P Parameter: Age (day) Value: 21
  misc_feature: MA Experiment 20000264 PARAMETER Experiment Name: At_Open_Flower_P Parameter: Plant Line Value: WS
  misc_feature: MA Experiment 20000264 PARAMETER Experiment Name: At_Open_Flower_P Parameter: Tissue Value: Open Flower vs. Whole Plant
  misc_feature: MA Experiment ID: 20000265 Result: Down-regulated in Transcription
  misc_feature: MA Experiment 20000265 PARAMETER Experiment Name: At_Open_Flower_P Parameter: Age (day) Value: 21
  misc_feature: MA Experiment 20000265 PARAMETER Experiment Name: At_Open_Flower_P Parameter: Plant Line Value: WS
  misc_feature: MA Experiment 20000265 PARAMETER Experiment Name: At_Open_Flower_P Parameter: Tissue Value: Closed Flower vs. Whole Plant
  misc_feature: MA Experiment ID: 20000286 Result: Down-regulated in Transcription
  misc_feature: MA Experiment 20000286 PARAMETER Experiment Name: At_Open_Flower_P Parameter: Age (day) Value: 21
  misc_feature: MA Experiment 20000286 PARAMETER Experiment Name: At_Open_Flower_P Parameter: Plant Line Value: WS
  misc_feature: MA Experiment 20000286 PARAMETER Experiment Name: At_Open_Flower_P Parameter: Tissue Value: Half Open vs. Whole Plant
  misc_feature: MA Experiment ID: 20000794 Result: Down-regulated in Transcription
  misc_feature: MA Experiment 20000794 PARAMETER Experiment Name: At_Petals_P Parameter: Age (day) Value: 23-25 days
  misc_feature: MA Experiment 20000794 PARAMETER Experiment Name: At_Petals_P Parameter: Plant Line Value: WS
  misc_feature: MA Experiment 20000794 PARAMETER Experiment Name: At_Petals_P Parameter: Tissue Value: Petals vs. Whole plant
cattagagaaacgtgatcgtcttttcatactaaaactcaccggcgacggcgaacaccgtctaaacccaaccttactcgactctctccgctccaccatcaaccaaatccgatcagatccatcattttcacaatcagtactcatcacaacatcagatggtaaattcttctccaacggctacgatctcgctttagccgagtcaaatccttctctctctgttgtaatggacgcaaaacttagatccttagtcgccgatctaatctctcttcctatgccaacaatcgccgccgtcacaggtcacgcttccgccgcgggatgtattttagcgatgagtcatgattatgtattgatgcgtcgtgatagaggttttttgtatatgagtgaattggatattgagttgatagttccggcgtggtttatggctgttattaggggtaagattggttctccggcggccagaagggatgtgatgttgacggcggcgaaagtgacggcggatgtgggtgttaagatggggattgttgattcggcgtatggtagtgcggcggagacggttgaagccgccattaagttaggtgaggagattgttcagagaggtggtgatggacacgtgtatggtaagatgagagagagtcttttaagagaggttcttatccatacgattggtgaatatgagagtggttcaagtgtggtgcgtagcactggatctaaactttagaacatgtttgtacttcttgggctacttgtcagttcttttcaagcaattgttctttatacattgatgatgtatcttttcaccaagtgaatttatagtctttttt

SEQ ID NO: 73814 - protein, 237 aa, Arabidopsis thaliana
  peptide (1)..(237): Ceres Seq. ID no. 4982025
  misc_feature (10)..(178): Pfam Name: Enoyl-CoA hydratase/isomerase family Pfam Description: Enoyl-CoA hydratase/isomerase family
  misc_feature (1)..(237): Homolog of NCBI NO: 15218713 NR Description: hypothetical protein; protein id: At1g65520.1
  misc_feature (1)..(215): Homolog of NCBI NO: 15236498 NR Description: carnitine racemase like protein; protein id: supported by cDNA: 28978., supported by cDNA: gi_14190480, by cDNA: gi_15810106 [Arabidopsis thaliana]
  misc_feature (1)..(215): Homolog of NCBI NO: 21555734 NR Description: carnitine racemase like protein [Arabidopsis
  misc_feature (1)..(215): Homolog of NCBI NO: 15236499 NR Description: carnitine racemase like protein; protein id: supported by cDNA: gi_18252926 [Arabidopsis thaliana]
  misc_feature (1)..(215): Homolog of NCBI NO: 34903766 NR Description: unnamed protein product [Oryza sativa (japonica group)] >gi|7340875|dbj|BAA92965.1| unnamed protein product
  misc_feature (4)..(216): Homolog of NCBI NO: 32404374 NR Description: hypothetical protein ( hypothetical protein
  misc_feature (5)..(211): Homolog of NCBI NO: 15828352 NR Description: possible enoyl-CoA hydratase [Mycobacterium
  misc_feature (1)..(176): Homolog of NCBI NO: 23017142 NR Description: hypothetical protein [Thermobifida fusca]
  misc_feature (1)..(216): Homolog of NCBI NO: 40739395 NR Description: hypothetical protein AN6767.2 [Aspergillus
  misc_feature (1)..(188): Homolog of NCBI NO: 24583165 NR Description: CG4598-PA [Drosophila melanogaster]
LEKRDRLFILKLTGDGEHRLNPTLLDSLRSTINQIRSDPSFSQSVLITTSDGKFFSNGYDLALAESNPSLSVVMDAKLRSLVADLISLPMPTIAAVTGHASAAGCILAMSHDYVLMRRDRGFLYMSELDIELIVPAWFMAVIRGKIGSPAARRDVMLTAAKVTADVGVKMGIVDSAYGSAAETVEAAIKLGEEIVQRGGDGHVYGKMRESLLREVLIHTIGEYESGSSVVRSTGSKL

SEQ ID NO: 73815 - protein, 164 aa, Arabidopsis thaliana
  peptide (1)..(164): Ceres Seq. ID no. 4982026
  misc_feature (1)..(105): Pfam Name: Enoyl-CoA hydratase/isomerase family Pfam Description: Enoyl-CoA hydratase/isomerase family
  misc_feature (1)..(164): Homolog of NCBI NO: 15218713 NR Description: hypothetical protein; protein id: At1g65520.1
  misc_feature (1)..(142): Homolog of NCBI NO: 15236498 NR Description: carnitine racemase like protein; protein id: supported by cDNA: 28978., supported by cDNA: gi_14190480, by cDNA: gi_15810106 [Arabidopsis thaliana]
  misc_feature (1)..(142): Homolog of NCBI NO: 21555734 NR Description: carnitine racemase like protein [Arabidopsis
  misc_feature (1)..(142): Homolog of NCBI NO: 15236499 NR Description: carnitine racemase like protein; protein id: supported by cDNA: gi_18252926 [Arabidopsis thaliana]
  misc_feature (1)..(142): Homolog of NCBI NO: 34903766 NR Description: unnamed protein product [Oryza sativa (japonica group)] >gi|7340875|dbj|BAA92965.1| unnamed protein product
  misc_feature (1)..(143): Homolog of NCBI NO: 32404374 NR Description: hypothetical protein ( hypothetical protein
  misc_feature (1)..(138): Homolog of NCBI NO: 15828352 NR Description: possible enoyl-CoA hydratase [Mycobacterium
  misc_feature (1)..(103): Homolog of NCBI NO: 23017142 NR Description: hypothetical protein [Thermobifida fusca]
  misc_feature (1)..(143): Homolog of NCBI NO: 40739395 NR Description: hypothetical protein AN6767.2 [Aspergillus
  misc_feature (1)..(115): Homolog of NCBI NO: 24583165 NR Description: CG4598-PA [Drosophila melanogaster]
MDAKLRSLVADLISLPMPTIAAVTGHASAAGCILAMSHDYVLMRRDRGFLYMSELDIELIVPAWFMAVIRGKIGSPAARRDVMLTAAKVTADVGVKMGIVDSAYGSAAETVEAAIKLGEEIVQRGGDGHVYGKMRESLLREVLIHTIGEYESGSSVVRSTGSKL

SEQ ID NO: 73816 - protein, 148 aa, Arabidopsis thaliana
  peptide (1)..(148): Ceres Seq. ID no. 4982027
  misc_feature (1)..(89): Pfam Name: Enoyl-CoA hydratase/isomerase family Pfam Description: Enoyl-CoA hydratase/isomerase family
  misc_feature (1)..(148): Homolog of NCBI NO: 15218713 NR Description: hypothetical protein; protein id: At1g65520.1
  misc_feature (1)..(126): Homolog of NCBI NO: 15236498 NR Description: carnitine racemase like protein; protein id: supported by cDNA: 28978., supported by cDNA: gi_14190480, by cDNA: gi_15810106 [Arabidopsis thaliana]
  misc_feature (1)..(126): Homolog of NCBI NO: 21555734 NR Description: carnitine racemase like protein [Arabidopsis
  misc_feature (1)..(126): Homolog of NCBI NO: 15236499 NR Description: carnitine racemase like protein; protein id: supported by cDNA: gi_18252926 [Arabidopsis thaliana]
  misc_feature (1)..(126): Homolog of NCBI NO: 34903766 NR Description: unnamed protein product [Oryza sativa (japonica group)] >gi|7340875|dbj|BAA92965.1| unnamed protein product
  misc_feature (1)..(127): Homolog of NCBI NO: 32404374 NR Description: hypothetical protein ( hypothetical protein
  misc_feature (1)..(122): Homolog of NCBI NO: 15828352 NR Description: possible enoyl-CoA hydratase [Mycobacterium
  misc_feature (1)..(87): Homolog of NCBI NO: 23017142 NR Description: hypothetical protein [Thermobifida fusca]
  misc_feature (1)..(127): Homolog of NCBI NO: 40739395 NR Description: hypothetical protein AN6767.2 [Aspergillus
  misc_feature (1)..(99): Homolog of NCBI NO: 24583165 NR Description: CG4598-PA [Drosophila melanogaster]
MPTIAAVTGHASAAGCILAMSHDYVLMRRDRGFLYMSELDIELIVPAWFMAVIRGKIGSPAARRDVMLTAAKVTADVGVKMGIVDSAYGSAAETVEAAIKLGEEIVQRGGDGHVYGKMRESLLREVLIHTIGEYESGSSVVRSTGSKL

SEQ ID NO: 73817 - DNA, 1251 bp, Arabidopsis thaliana
  misc_feature (1)..(1251): Ceres Seq. ID no. 4982269
  misc_feature: MA Experiment ID: 108464 Result: Up-regulated in Transcription
  misc_feature: MA Experiment 108464 PARAMETER Experiment Name: At_Germinating_Seeds_cDNA_P Parameter: Age (day) Value: 4 vs. 0
  misc_feature: MA Experiment 108464 PARAMETER Experiment Name: At_Germinating_Seeds_cDNA_P Parameter: Tissue Value: Germinating Seeds
  misc_feature: MA Experiment ID: 108469 Result: Up-regulated in Transcription
  misc_feature: MA Experiment ID: 108595 Result: Up-regulated in Transcription
  misc_feature: MA Experiment 108595 PARAMETER Experiment Name: At_Ler-pi_Ovule_cDNA_P Parameter: Plant Line Value: null
  misc_feature: MA Experiment ID: 108668 Result: Up-regulated in Transcription
  misc_feature: MA Experiment 108668 PARAMETER Experiment Name: At_2mM_SA_cDNA_P Parameter: Plant Line Value: WS
  misc_feature: MA Experiment 108668 PARAMETER Experiment Name: At_2mM_SA_cDNA_P Parameter: Timepoint (hr) Value: 6
  misc_feature: MA Experiment 108668 PARAMETER Experiment Name: At_2mM_SA_cDNA_P Parameter: Treatment Value: 2mM SA vs. No Treatment
  misc_feature: MA Experiment ID: 20000030 Result: Down-regulated in Transcription
  misc_feature: MA Experiment 20000030 PARAMETER Experiment Name: At_CS6630_Roots_cDNA_P Parameter: Plant Line Value: CS6630 vs. WS
  misc_feature: MA Experiment 20000030 PARAMETER Experiment Name: At_CS6630_Roots_cDNA_P Parameter: Tissue Value: Roots
  misc_feature: MA Experiment ID: 20000180 Result: Up-regulated in Transcription
  misc_feature: MA Experiment 20000180 PARAMETER Experiment Name: At_Germinating_Seeds_P Parameter: Age (hr) Value: 24 vs. 0
  misc_feature: MA Experiment 20000180 PARAMETER Experiment Name: At_Germinating_Seeds_P Parameter: Tissue Value: Germinating Seeds
  misc_feature: MA Experiment ID: 20000182 Result: Up-regulated in Transcription
  misc_feature: MA Experiment 20000182 PARAMETER Experiment Name: At_2mM_SA_P Parameter: Age (day) Value: 14
  misc_feature: MA Experiment 20000182 PARAMETER Experiment Name: At_2mM_SA_P Parameter: Organism Value: A. thaliana
  misc_feature: MA Experiment 20000182 PARAMETER Experiment Name: At_2mM_SA_P Parameter: Plant Line Value: WS
  misc_feature: MA Experiment 20000182 PARAMETER Experiment Name: At_2mM_SA_P Parameter: Timepoint (hr) Value: 6
  misc_feature: MA Experiment 20000182 PARAMETER Experiment Name: At_2mM_SA_P Parameter: Tissue Value: Aerial
  misc_feature: MA Experiment 20000182 PARAMETER Experiment Name: At_2mM_SA_P Parameter: Treatment Value: 2mM SA vs. No Treatment
  misc_feature: MA Experiment ID: 20000184 Result: Down-regulated in Transcription
  misc_feature: MA Experiment 20000184 PARAMETER Experiment Name: At_Shoots__P Parameter: Age (day) Value: 7
  misc_feature: MA Experiment 20000184 PARAMETER Experiment Name: At_Shoots__P Parameter: Tissue Value: Shoots vs. Whole Plant
  misc_feature: MA Experiment ID: 20000234 Result: Down-regulated in Transcription
  misc_feature: MA Experiment 20000234 PARAMETER Experiment Name: At_Siliques_P Parameter: Age (day) Value: 21
  misc_feature: MA Experiment 20000234 PARAMETER Experiment Name: At_Siliques_P Parameter: Organism Value: A. thaliana
  misc_feature: MA Experiment 20000234 PARAMETER Experiment Name: At_Siliques_P Parameter: Plant Line Value: WS
  misc_feature: MA Experiment 20000234 PARAMETER Experiment Name: At_Siliques_P Parameter: Tissue Value: Less Than 5mm Siliques vs. Whole Plant
  misc_feature: MA Experiment ID: 20000235 Result: Down-regulated in Transcription
  misc_feature: MA Experiment 20000235 PARAMETER Experiment Name: At_Siliques_P Parameter: Age (day) Value: 21
  misc_feature: MA Experiment 20000235 PARAMETER Experiment Name: At_Siliques_P Parameter: Organism Value: A. thaliana
  misc_feature: MA Experiment 20000235 PARAMETER Experiment Name: At_Siliques_P Parameter: Plant Line Value: WS
  misc_feature: MA Experiment 20000235 PARAMETER Experiment Name: At_Siliques_P Parameter: Tissue Value: 5-10mm Siliques vs. Whole Plant
  misc_feature: MA Experiment ID: 20000438 Result: Down-regulated in Transcription
  misc_feature: MA Experiment 20000438 PARAMETER Experiment Name: At_Shoots__P Parameter: Age (day) Value: 14
  misc_feature: MA Experiment 20000438 PARAMETER Experiment Name: At_Shoots__P Parameter: Tissue Value: Shoots vs. Whole Plant
  misc_feature: MA Experiment ID: 20000439 Result: Up-regulated in Transcription
  misc_feature: MA Experiment 20000439 PARAMETER Experiment Name: At_Roots__P Parameter: Age (day) Value: 14 vs. 21
  misc_feature: MA Experiment 20000439 PARAMETER Experiment Name: At_Roots__P Parameter: Organism Value: A. thaliana
  misc_feature: MA Experiment 20000439 PARAMETER Experiment Name: At_Roots__P Parameter: Tissue Value: Roots vs. Whole Plant
  misc_feature: MA Experiment ID: 20000460 Result: Down-regulated in Transcription
  misc_feature: MA Experiment 20000460 PARAMETER Experiment Name: At_10percent_PEG_P Parameter: Age (day) Value: 12
  misc_feature: MA Experiment 20000460 PARAMETER Experiment Name: At_10percent_PEG_P Parameter: Organism Value: A. thaliana
  misc_feature: MA Experiment 20000460 PARAMETER Experiment Name: At_10percent_PEG_P Parameter: Plant Line Value: WS
  misc_feature: MA Experiment 20000460 PARAMETER Experiment Name: At_10percent_PEG_P Parameter: Timepoint (day) Value: 12
  misc_feature: MA Experiment 20000460 PARAMETER Experiment Name: At_10percent_PEG_P Parameter: Tissue Value: Whole Plant
  misc_feature: MA Experiment 20000460 PARAMETER Experiment Name: At_10percent_PEG_P Parameter: Treatment Value: 10percent PEG vs. No Treatment
  misc_feature: MA Experiment ID: 20000527 Result: Down-regulated in Transcription
  misc_feature: MA Experiment 20000527 PARAMETER Experiment Name: At_10percent_PEG_P Parameter: Age (day) Value: 20
  misc_feature: MA Experiment 20000527 PARAMETER Experiment Name: At_10percent_PEG_P Parameter: Organism Value: A. thaliana
  misc_feature: MA Experiment 20000527 PARAMETER Experiment Name: At_10percent_PEG_P Parameter: Plant Line Value: WS
  misc_feature: MA Experiment 20000527 PARAMETER Experiment Name: At_10percent_PEG_P Parameter: Timepoint (day) Value: 20
  misc_feature: MA Experiment 20000527 PARAMETER Experiment Name: At_10percent_PEG_P Parameter: Tissue Value: Whole Plant
  misc_feature: MA Experiment 20000527 PARAMETER Experiment Name: At_10percent_PEG_P Parameter: Treatment Value: 10percent PEG vs. No Treatment
  misc_feature: MA Experiment ID: 20000573 Result: Up-regulated in Transcription
  misc_feature: MA Experiment 20000573 PARAMETER Experiment Name: At_100uM_ABA_Mutants__P Parameter: Organism Value: A. thaliana
  misc_feature: MA Experiment 20000573 PARAMETER Experiment Name: At_100uM_ABA_Mutants__P Parameter: Plant Line Value: CS22 vs. Ler wt
  misc_feature: MA Experiment 20000573 PARAMETER Experiment Name: At_100uM_ABA_Mutants__P Parameter: Timepoint (hr) Value: N/A
  misc_feature: MA Experiment 20000573 PARAMETER Experiment Name: At_100uM_ABA_Mutants__P Parameter: Tissue Value: Whole Plant
  misc_feature: MA Experiment 20000573 PARAMETER Experiment Name: At_100uM_ABA_Mutants__P Parameter: Treatment Value: None
  misc_feature: MA Experiment ID: 20000575 Result: Down-regulated in Transcription
  misc_feature: MA Experiment 20000575 PARAMETER Experiment Name: At_100uM_ABA_Mutants__P Parameter: Organism Value: A. thaliana
  misc_feature: MA Experiment 20000575 PARAMETER Experiment Name: At_100uM_ABA_Mutants__P Parameter: Plant Line Value: CS22
  misc_feature: MA Experiment 20000575 PARAMETER Experiment Name: At_100uM_ABA_Mutants__P Parameter: Timepoint (hr) Value: 6
  misc_feature: MA Experiment 20000575 PARAMETER Experiment Name: At_100uM_ABA_Mutants__P Parameter: Tissue Value: Whole Plant
  misc_feature: MA Experiment 20000575 PARAMETER Experiment Name: At_100uM_ABA_Mutants__P Parameter: Treatment Value: 1uM ABA vs. No Treatment
  misc_feature: MA Experiment ID: 20000794 Result: Down-regulated in Transcription
  misc_feature: MA Experiment 20000794 PARAMETER Experiment Name: At_Petals_P Parameter: Age (day) Value: 23-25 days
  misc_feature: MA Experiment 20000794 PARAMETER Experiment Name: At_Petals_P Parameter: Plant Line Value: WS
  misc_feature: MA Experiment 20000794 PARAMETER Experiment Name: At_Petals_P Parameter: Tissue Value: Petals vs. Whole plant
  misc_feature: MA Experiment ID: 20001555 Result: Down-regulated in Transcription
  misc_feature: MA Experiment 20001555 PARAMETER Experiment Name: At_Drought_Soil_Dry_P Parameter: Age (day) Value: 24
  misc_feature: MA Experiment 20001555 PARAMETER Experiment Name: At_Drought_Soil_Dry_P Parameter: Organism Value: A. thaliana
  misc_feature: MA Experiment 20001555 PARAMETER Experiment Name: At_Drought_Soil_Dry_P Parameter: Plant Line Value: WS
  misc_feature: MA Experiment 20001555 PARAMETER Experiment Name: At_Drought_Soil_Dry_P Parameter: Post Timepoint (hr) Value: None
  misc_feature: MA Experiment 20001555 PARAMETER Experiment Name: At_Drought_Soil_Dry_P Parameter: Post-Treatment Value: None
  misc_feature: MA Experiment 20001555 PARAMETER Experiment Name: At_Drought_Soil_Dry_P Parameter: Timepoint (day) Value: 10
  misc_feature: MA Experiment 20001555 PARAMETER Experiment Name: At_Drought_Soil_Dry_P Parameter: Treatment Value: Drought vs. No Drought
  misc_feature: MA Experiment ID: 20001557 Result: Down-regulated in Transcription
  misc_feature: MA Experiment 20001557 PARAMETER Experiment Name: At_Drought_Soil_Dry_P Parameter: Age (day) Value: 27
  misc_feature: MA Experiment 20001557 PARAMETER Experiment Name: At_Drought_Soil_Dry_P Parameter: Organism Value: A. thaliana
  misc_feature: MA Experiment 20001557 PARAMETER Experiment Name: At_Drought_Soil_Dry_P Parameter: Plant Line Value: WS
  misc_feature: MA Experiment 20001557 PARAMETER Experiment Name: At_Drought_Soil_Dry_P Parameter: Post Timepoint (hr) Value: 3
  misc_feature: MA Experiment 20001557 PARAMETER Experiment Name: At_Drought_Soil_Dry_P Parameter: Post-Treatment Value: Re-Water vs. No Drought
  misc_feature: MA Experiment 20001557 PARAMETER Experiment Name: At_Drought_Soil_Dry_P Parameter: Timepoint (day) Value: 13
  misc_feature: MA Experiment 20001557 PARAMETER Experiment Name: At_Drought_Soil_Dry_P Parameter: Treatment Value: Drought vs. No Drought
  misc_feature: MA Experiment ID: 20001558 Result: Down-regulated in Transcription
  misc_feature: MA Experiment 20001558 PARAMETER Experiment Name: At_Drought_Soil_Dry_P Parameter: Age (day) Value: 27
  misc_feature: MA Experiment 20001558 PARAMETER Experiment Name: At_Drought_Soil_Dry_P Parameter: Organism Value: A. thaliana
  misc_feature: MA Experiment 20001558 PARAMETER Experiment Name: At_Drought_Soil_Dry_P Parameter: Plant Line Value: WS
  misc_feature: MA Experiment 20001558 PARAMETER Experiment Name: At_Drought_Soil_Dry_P Parameter: Post Timepoint (hr) Value: 6
  misc_feature: MA Experiment 20001558 PARAMETER Experiment Name: At_Drought_Soil_Dry_P Parameter: Post-Treatment Value: Re-Water vs. No Drought
  misc_feature: MA Experiment 20001558 PARAMETER Experiment Name: At_Drought_Soil_Dry_P Parameter: Timepoint (day) Value: 13
  misc_feature: MA Experiment 20001558 PARAMETER Experiment Name: At_Drought_Soil_Dry_P Parameter: Treatment Value: Drought vs. No Drought
  misc_feature: MA Experiment ID: 20001560 Result: Down-regulated in Transcription
  misc_feature: MA Experiment 20001560 PARAMETER Experiment Name: At_Drought_Soil_Dry_P Parameter: Age (day) Value: 28
  misc_feature: MA Experiment 20001560 PARAMETER Experiment Name: At_Drought_Soil_Dry_P Parameter: Organism Value: A. thaliana
  misc_feature: MA Experiment 20001560 PARAMETER Experiment Name: At_Drought_Soil_Dry_P Parameter: Plant Line Value: WS
  misc_feature: MA Experiment 20001560 PARAMETER Experiment Name: At_Drought_Soil_Dry_P Parameter: Post Timepoint (hr) Value: None
  misc_feature: MA Experiment 20001560 PARAMETER Experiment Name: At_Drought_Soil_Dry_P Parameter: Post-Treatment Value: None
  misc_feature: MA Experiment 20001560 PARAMETER Experiment Name: At_Drought_Soil_Dry_P Parameter: Timepoint (day) Value: 14
  misc_feature: MA Experiment 20001560 PARAMETER Experiment Name: At_Drought_Soil_Dry_P Parameter: Treatment Value: Drought vs. No Drought
  misc_feature: MA Experiment ID: 20001904 Result: Down-regulated in Transcription
  misc_feature: MA Experiment 20001904 PARAMETER Experiment Name: At_Drought_Reproduction_P Parameter: Age (day) Value: 37
  misc_feature: MA Experiment 20001904 PARAMETER Experiment Name: At_Drought_Reproduction_P Parameter: Organism Value: A. thaliana
  misc_feature: MA Experiment 20001904 PARAMETER Experiment Name: At_Drought_Reproduction_P Parameter: Plant Line Value: WS
  misc_feature: MA Experiment 20001904 PARAMETER Experiment Name: At_Drought_Reproduction_P Parameter: Timepoint (day) Value: 7
  misc_feature: MA Experiment 20001904 PARAMETER Experiment Name: At_Drought_Reproduction_P Parameter: Tissue Value: Rosettes
  misc_feature: MA Experiment 20001904 PARAMETER Experiment Name: At_Drought_Reproduction_P Parameter: Treatment Value: Drought vs. No Drought
  misc_feature: Pfam Name: Inositol_P Pfam Description: Inositol monophosphatase family
tttcgatgccttacgagaaagagctcgctgctgctaagaaagccgtctctctagctgctcgtctcagccaggaagtgcagaagtctctgttgcaatcagatgtccggtcaaaatctgataaaagtccggttacagctgctgattatggatcccaagctgtgatcagtcatgtactagagagagaacttcaccctgaaccactatacttggttgctgaagagaatgcagaagatctgcacaagaatggcgccgaggaatttctagaaagcattactaagcttgtgaacaatgctctagcttctgatgattcctacgccaactcttctctttcaatggatgatgtaaggaaggcgatagaccacgggaggtcacaaggcggttccagtggccgccattggattcttgatcctgttgatggaaccagagggtttgtaaaaggagaggaatacgctgtggcattagctttgcttgtggaaggcaaagtagtgctcggtgtcatggcttgcccgaaacttgagaatcacaagtcttcttcttcaggatgccttttctttgctacagtgggagaaggagcttatgtgcaatcgcttgaaggcgactctcatcctccacagaaggtattataattatcagagcatttgatgtcccttaggcttgttctctcgttttgtgttcttaaaacagagtggagaaagtgtgctaataggtgcaagtgagcaacattgagaatcctgaagaagcaacctttgtggaatcatcccacaaaccaatccccatccatagctccattgccaataaacttgggatcaaagctccacctctaagaatccatagtcaagtgaagtacgcagctctggctcgaggagatgcagagatatacttgcgtttcactcttaaagggtaccgagagttcatatggaaccatgctgctggtgcaatcatcacaacagaagctggaggtgtagtttgcgatgctgacgggaatcctctggacttctcgagaggaaatcatcttgaacacaaaacagggatcgtggtcagcaccaagaaccttatgccacggctcttgaaagccattagagaatccatagaagaggagatgcttctctctgagacacaactgaaactgtaatatatgtactgcctgaaatagctatctggtgtatatcacacatctgccgttgtgtactgtcagacactgaagaaattgtatgcttttgaatattggtctcgatttcaataaaagatttc

SEQ ID NO: 73818 - protein, 207 aa, Arabidopsis thaliana
  peptide (1)..(207): Ceres Seq. ID no. 4982270
  misc_feature: Pfam Name: Inositol_P Pfam Description: Inositol monophosphatase family
  misc_feature (2)..(206): Homolog of NCBI NO: 34395640 NR Description: Probable SAL4 phosphatase (3'(2'),5'-bisphosphate
  misc_feature (2)..(206): Homolog of NCBI NO: 15242383 NR Description: 3'(2'),5'-bisphosphate nucleotidase-like protein;
  misc_feature (2)..(206): Homolog of NCBI NO: 15237589 NR Description: 3(2),5-bisphosphate nucleotidase protein id: At5g64000.1, supported by cDNA: gi_20466006
  misc_feature (2)..(202): Homolog of NCBI NO: 15237567 NR Description: 3(2),5-bisphosphate nucleotidase; protein id:
  misc_feature (2)..(202): Homolog of NCBI NO: 18424775 NR Description: 3(2),5-bisphosphate nucleotidase; protein id: supported by cDNA: 98980. [Arabidopsis thaliana]
  misc_feature (2)..(202): Homolog of NCBI NO: 21618152 NR Description: 3(2),5-bisphosphate nucleotidase [Arabidopsis
  misc_feature (2)..(202): Homolog of NCBI NO: 8777312 NR Description: 3'(2'),5'-bisphosphate nucleotidase [Arabidopsis
  misc_feature (3)..(206): Homolog of NCBI NO: 3913517 NR Description: 3'(2'),5'-BISPHOSPHATE NUCLEOTIDASE (3'(2'),5-
  misc_feature (3)..(206): Homolog of NCBI NO: 14268820 NR Description: diphosphonucleotide phosphatase 1 [Zea mays]
  misc_feature (4)..(169): Homolog of NCBI NO: 15451579 NR Description: Putative PAP-specific phosphatase [Oryza sativa]
SMPYEKELAAAKKAVSLAARLSQEVQKSLLQSDVRSKSDKSPVTAADYGSQAVISHVLERELHPEPLYLVAEENAEDLHKNGAEEFLESITKLVNNALASDDSYANSSLSMDDVRKAIDHGRSQGGSSGRHWILDPVDGTRGFVKGEEYAVALALLVEGKVVLGVMACPKLENHKSSSSGCLFFATVGEGAYVQSLEGDSHPPQKVL

SEQ ID NO: 73819 - protein, 206 aa, Arabidopsis thaliana; identical to SEQ ID NO: 40991
  peptide (1)..(206): Ceres Seq. ID no. 4982271
  misc_feature: Pfam Name: Inositol_P Pfam Description: Inositol monophosphatase family
  misc_feature (1)..(205): Homolog of NCBI NO: 34395640 NR Description: Probable SAL4 phosphatase (3'(2'),5'-bisphosphate
  misc_feature (1)..(205): Homolog of NCBI NO: 15242383 NR Description: 3'(2'),5'-bisphosphate nucleotidase-like protein;
  misc_feature (1)..(205): Homolog of NCBI NO: 15237589 NR Description: 3(2),5-bisphosphate nucleotidase protein id: At5g64000.1, supported by cDNA: gi_20466006
  misc_feature (1)..(201): Homolog of NCBI NO: 15237567 NR Description: 3(2),5-bisphosphate nucleotidase; protein id:
  misc_feature (1)..(201): Homolog of NCBI NO: 18424775 NR Description: 3(2),5-bisphosphate nucleotidase; protein id: supported by cDNA: 98980. [Arabidopsis thaliana]
  misc_feature (1)..(201): Homolog of NCBI NO: 21618152 NR Description: 3(2),5-bisphosphate nucleotidase [Arabidopsis
  misc_feature (1)..(201): Homolog of NCBI NO: 8777312 NR Description: 3'(2'),5'-bisphosphate nucleotidase [Arabidopsis
  misc_feature (2)..(205): Homolog of NCBI NO: 3913517 NR Description: 3'(2'),5'-BISPHOSPHATE NUCLEOTIDASE (3'(2'),5-
  misc_feature (2)..(205): Homolog of NCBI NO: 14268820 NR Description: diphosphonucleotide phosphatase 1 [Zea mays]
  misc_feature (3)..(168): Homolog of NCBI NO: 15451579 NR Description: Putative PAP-specific phosphatase [Oryza sativa]

SEQ ID NO: 73820 - DNA, 1176 bp, Arabidopsis thaliana
  misc_feature (1)..(1176): Ceres Seq. ID no. 4982417
  misc_feature: MA Experiment ID: 108434 Result: Up-regulated in Transcription
  misc_feature: MA Experiment 108434 PARAMETER Experiment Name: At_Root_Tips_cDNA_P Parameter: Tissue Value: Root Tips
  misc_feature: MA Experiment ID: 108579 Result: Down-regulated in Transcription
  misc_feature: MA Experiment 108579 PARAMETER Experiment Name: At_4deg_Cold_cDNA_P Parameter: Temperature (deg C) Value: 4 vs. 22
  misc_feature: MA Experiment 108579 PARAMETER Experiment Name: At_4deg_Cold_cDNA_P Parameter: Timepoint (hr) Value: 6
  misc_feature: MA Experiment 108579 PARAMETER Experiment Name: At_4deg_Cold_cDNA_P Parameter: Tissue Value: Aerial
  misc_feature: MA Experiment ID: 20000184 Result: Down-regulated in Transcription
  misc_feature: MA Experiment 20000184 PARAMETER Experiment Name: At_Shoots__P Parameter: Age (day) Value: 7
  misc_feature: MA Experiment 20000184 PARAMETER Experiment Name: At_Shoots__P Parameter: Tissue Value: Shoots vs. Whole Plant
  misc_feature: MA Experiment ID: 20000213 Result: Down-regulated in Transcription
  misc_feature: MA Experiment 20000213 PARAMETER Experiment Name: At_4deg_Cold_P Parameter: Timepoint (hr) Value: 2
  misc_feature: MA Experiment ID: 20001248 Result: Up-regulated in Transcription
  misc_feature: MA Experiment 20001248 PARAMETER Experiment Name: At_Far-red-induction_P Parameter: Age (day) Value: 7
  misc_feature: MA Experiment 20001248 PARAMETER Experiment Name: At_Far-red-induction_P Parameter: Light Value: Far-red vs. White
  misc_feature: MA Experiment 20001248 PARAMETER Experiment Name: At_Far-red-induction_P Parameter: Organism Value: A. thaliana
  misc_feature: MA Experiment 20001248 PARAMETER Experiment Name: At_Far-red-induction_P Parameter: Plant Line Value: Columbia
  misc_feature: MA Experiment 20001248 PARAMETER Experiment Name: At_Far-red-induction_P Parameter: Timepoint (hr) Value: 4
  misc_feature: MA Experiment 20001248 PARAMETER Experiment Name: At_Far-red-induction_P Parameter: Tissue Value: Whole Plant
  misc_feature: MA Experiment ID: 20001450 Result: Up-regulated in Transcription
  misc_feature: MA Experiment 20001450 PARAMETER Experiment Name: At_Far-red-induction_P Parameter: Age (day) Value: 7
  misc_feature: MA Experiment 20001450 PARAMETER Experiment Name: At_Far-red-induction_P Parameter: Light Value: Far-red vs. White
  misc_feature: MA Experiment 20001450 PARAMETER Experiment Name: At_Far-red-induction_P Parameter: Organism Value: A. thaliana
  misc_feature: MA Experiment 20001450 PARAMETER Experiment Name: At_Far-red-induction_P Parameter: Plant Line Value: Columbia
  misc_feature: MA Experiment 20001450 PARAMETER Experiment Name: At_Far-red-induction_P Parameter: Timepoint (hr) Value: 8
  misc_feature: MA Experiment 20001450 PARAMETER Experiment Name: At_Far-red-induction_P Parameter: Tissue Value: Whole Plant
aacacacctacacaaaaatcaatcacagtctctgtctcactcgccggagtttcggtcactgcgccatctccggggtcgagttcgtcgtacttcatcgaactatgaactctcatgatatcgatgatcagttagaagcagatgtatacagtaacttgccttctcgaaatgattcttcaacagggaggagaaatcgaaactcgtgtagatcgaaacactcagagactgagcaacgaagaagaagcaaaatcaatgaaagatttcagagtttaatggatattatacctcagaatcagaatgatcagaaacgagataaagcttctttcttgttggaggttatagagtatattcactttcttcaagaaaaagttcacatgtatgaagattctcaccaaatgtggtatcaatccccaaccaaattgattccttggagaaatagtcatgggtctgttgcggaggaaaatgaccatcctcaaatcgttaaaagcttttcaagtaatgataaagttgctgcttcttcgggttttctcttggatacgtacaattcagtaaatcctgatattgactcagcagttagcaccaagattcctgaacacagtcctgtttcagcagtttcatcgtatctacgtaccgagccttcgctgcagtttgttcagcatgacttttggcaaccaaaaacaagttgtggaacaattaactgttttacaaatgaattgttaacatctgacgaaaaaacatcagccagcttgtccactgtctgctcacaaagggtacttaacactctaactgaagcacttaagtcatcgggtgttaacatgtcagagaccatgatatctgtgcagttaagccttcggaaaagagaagatcgcgagtattctgttgctgcgtttgcttctgaggataatggtaatagcatcgctgatgaagaaggggactctcctactgaaactagaagcttctgcaatgatattgatcattcccagaagagaataagacgataagatctggttttctattttctatgttatgacaactgtttgataattttgttactttcggtgagtcaggatcagtaggtgtagatactacttttatcgtgctgcaactattttaaatgatatagtaaaaactaagtagaatgatgtaacaagtttcgcaaatctataacaagagtttgct

SEQ ID NO: 73821 - protein, 331 aa, Arabidopsis thaliana
  peptide (1)..(331): Ceres Seq. ID no. 4982418
  misc_feature (67)..(119): Pfam Name: Helix-loop-helix DNA-binding domain Pfam Description: Helix-loop-helix DNA-binding domain
  misc_feature (34)..(331): Homolog of NCBI NO: 9758063 NR Description: DNA-binding protein-like [Arabidopsis thaliana]
  misc_feature (34)..(255): Homolog of NCBI NO: 15241563 NR Description: putative protein; protein id: At5g38860.1
  misc_feature (256)..(331): Homolog of NCBI NO: 15241563 NR Description: putative protein; protein id: At5g38860.1
  misc_feature (47)..(330): Homolog of NCBI NO: 15221582 NR Description: putative DNA-binding protein; protein id: supported by cDNA: 27793. [Arabidopsis thaliana]
  misc_feature (47)..(330): Homolog of NCBI NO: 21555388 NR Description: putative DNA-binding protein [Arabidopsis
  misc_feature (33)..(316): Homolog of NCBI NO: 30682248 NR Description: bHLH protein family [Arabidopsis thaliana]
  misc_feature (33)..(316): Homolog of NCBI NO: 11358566 NR Description: myc-like protein - Arabidopsis thaliana
  misc_feature (117)..(330): Homolog of NCBI NO: 19310568 NR Description: putative DNA-binding protein [Arabidopsis
HTYTKINHSLCLTRRSFGHCAISGVEFVVLHRTMNSHDIDDQLEADVYSNLPSRNDSSTGRRNRNSCRSKHSETEQRRRSKINERFQSLMDIIPQNQNDQKRDKASFLLEVIEYIHFLQEKVHMYEDSHQMWYQSPTKLIPWRNSHGSVAEENDHPQIVKSFSSNDKVAASSGFLLDTYNSVNPDIDSAVSTKIPEHSPVSAVSSYLRTEPSLQFVQHDFWQPKTSCGTINCFTNELLTSDEKTSASLSTVCSQRVLNTLTEALKSSGVNMSETMISVQLSLRKREDREYSVAAFASEDNGNSIADEEGDSPTETRSFCNDIDHSQKRIRR

SEQ ID NO: 73822 - protein, 298 aa, Arabidopsis thaliana
  peptide (1)..(298): Ceres Seq. ID no. 4982419
  misc_feature (34)..(86): Pfam Name: Helix-loop-helix DNA-binding domain Pfam Description: Helix-loop-helix DNA-binding domain
  misc_feature (1)..(298): Homolog of NCBI NO: 9758063 NR Description: DNA-binding protein-like [Arabidopsis thaliana]
  misc_feature (1)..(222): Homolog of NCBI NO: 15241563 NR Description: putative protein; protein id: At5g38860.1
  misc_feature (223)..(298): Homolog of NCBI NO: 15241563 NR Description: putative protein; protein id: At5g38860.1
  misc_feature (14)..(297): Homolog of NCBI NO: 15221582 NR Description: putative DNA-binding protein; protein id: supported by cDNA: 27793. [Arabidopsis thaliana]
  misc_feature (14)..(297): Homolog of NCBI NO: 21555388 NR Description: putative DNA-binding protein [Arabidopsis
  misc_feature (1)..(283): Homolog of NCBI NO: 30682248 NR Description: bHLH protein family [Arabidopsis thaliana]
  misc_feature (1)..(283): Homolog of NCBI NO: 11358566 NR Description: myc-like protein - Arabidopsis thaliana
  misc_feature (84)..(297): Homolog of NCBI NO: 19310568 NR Description: putative DNA-binding protein [Arabidopsis
MNSHDIDDQLEADVYSNLPSRNDSSTGRRNRNSCRSKHSETEQRRRSKINERFQSLMDIIPQNQNDQKRDKASFLLEVIEYIHFLQEKVHMYEDSHQMWYQSPTKLIPWRNSHGSVAEENDHPQIVKSFSSNDKVAASSGFLLDTYNSVNPDIDSAVSTKIPEHSPVSAVSSYLRTEPSLQFVQHDFWQPKTSCGTINCFTNELLTSDEKTSASLSTVCSQRVLNTLTEALKSSGVNMSETMISVQLSLRKREDREYSVAAFASEDNGNSIADEEGDSPTETRSFCNDIDHSQKRIRR

SEQ ID NO: 73823 - protein, 242 aa, Arabidopsis thaliana
  peptide (1)..(242): Ceres Seq. ID no. 4982420
  misc_feature (1)..(242): Homolog of NCBI NO: 9758063 NR Description: DNA-binding protein-like [Arabidopsis thaliana]
  misc_feature (1)..(166): Homolog of NCBI NO: 15241563 NR Description: putative protein; protein id: At5g38860.1
  misc_feature (167)..(242): Homolog of NCBI NO: 15241563 NR Description: putative protein; protein id: At5g38860.1
  misc_feature (1)..(241): Homolog of NCBI NO: 15221582 NR Description: putative DNA-binding protein; protein id: supported by cDNA: 27793. [Arabidopsis thaliana]
  misc_feature (1)..(241): Homolog of NCBI NO: 21555388 NR Description: putative DNA-binding protein [Arabidopsis
  misc_feature (1)..(227): Homolog of NCBI NO: 30682248 NR Description: bHLH protein family [Arabidopsis thaliana]
  misc_feature (1)..(227): Homolog of NCBI NO: 11358566 NR Description: myc-like protein - Arabidopsis thaliana
  misc_feature (28)..(241): Homolog of NCBI NO: 19310568 NR Description: putative DNA-binding protein [Arabidopsis
MDIIPQNQNDQKRDKASFLLEVIEYIHFLQEKVHMYEDSHQMWYQSPTKLIPWRNSHGSVAEENDHPQIVKSFSSNDKVAASSGFLLDTYNSVNPDIDSAVSTKIPEHSPVSAVSSYLRTEPSLQFVQHDFWQPKTSCGTINCFTNELLTSDEKTSASLSTVCSQRVLNTLTEALKSSGVNMSETMISVQLSLRKREDREYSVAAFASEDNGNSIADEEGDSPTETRSFCNDIDHSQKRIRR

SEQ ID NO: 73824 - DNA, 1786 bp, Arabidopsis thaliana
  misc_feature (1)..(1786): Ceres Seq. ID no. 4982425
  misc_feature: MA Experiment ID: 20000227 Result: Up-regulated in Transcription
  misc_feature: MA Experiment 20000227 PARAMETER Experiment Name: At_Root-Tips-vs-Tops_P Parameter: Tissue Value: Root Tips vs. Root Tops
  misc_feature: MA Experiment ID: 20000234 Result: Up-regulated in Transcription
  misc_feature: MA Experiment 20000234 PARAMETER Experiment Name: At_Siliques_P Parameter: Age (day) Value: 21
  misc_feature: MA Experiment 20000234 PARAMETER Experiment Name: At_Siliques_P Parameter: Organism Value: A. thaliana
  misc_feature: MA Experiment 20000234 PARAMETER Experiment Name: At_Siliques_P Parameter: Plant Line Value: WS
  misc_feature: MA Experiment 20000234 PARAMETER Experiment Name: At_Siliques_P Parameter: Tissue Value: Less Than 5mm Siliques vs. Whole Plant
  misc_feature: MA Experiment ID: 20000265 Result: Up-regulated in Transcription
  misc_feature: MA Experiment 20000265 PARAMETER Experiment Name: At_Open_Flower_P Parameter: Age (day) Value: 21
  misc_feature: MA Experiment 20000265 PARAMETER Experiment Name: At_Open_Flower_P Parameter: Plant Line Value: WS
  misc_feature: MA Experiment 20000265 PARAMETER Experiment Name: At_Open_Flower_P Parameter: Tissue Value: Closed Flower vs. Whole Plant
  misc_feature: MA Experiment ID: 20000439 Result: Up-regulated in Transcription
  misc_feature: MA Experiment 20000439 PARAMETER Experiment Name: At_Roots__P Parameter: Age (day) Value: 14 vs. 21
  misc_feature: MA Experiment 20000439 PARAMETER Experiment Name: At_Roots__P Parameter: Organism Value: A. thaliana
  misc_feature: MA Experiment 20000439 PARAMETER Experiment Name: At_Roots__P Parameter: Tissue Value: Roots vs. Whole Plant
  misc_feature: MA Experiment ID: 20001911 Result: Down-regulated in Transcription
  misc_feature: MA Experiment 20001911 PARAMETER Experiment Name: At_Drought_Reproduction_P Parameter: Age (day) Value: 40
  misc_feature: MA Experiment 20001911 PARAMETER Experiment Name: At_Drought_Reproduction_P Parameter: Organism Value: A. thaliana
  misc_feature: MA Experiment 20001911 PARAMETER Experiment Name: At_Drought_Reproduction_P Parameter: Plant Line Value: WS
  misc_feature: MA Experiment 20001911 PARAMETER Experiment Name: At_Drought_Reproduction_P Parameter: Timepoint (day) Value: 10
  misc_feature: MA Experiment 20001911 PARAMETER Experiment Name: At_Drought_Reproduction_P Parameter: Tissue Value: Flowers
  misc_feature: MA Experiment 20001911 PARAMETER Experiment Name: At_Drought_Reproduction_P Parameter: Treatment Value: Drought vs. No Drought
tctctattctcttactaacgttatttcttcaatctcattgatcaaaaaaaaccaaaaccctaatctgcaaaaatctcaatttcctccaaaagtttcagtttttaaaaatgggttttcttcttttgtaacgaaaaaatgtgtcaaactttgaattgaccatttttttttataaggattcgatgaagaaattgagaagctattactcaaatgtgagacatcatcagaatcaccatcatcatcaccatcatcatagcaacattgtttcttcagagaggaaatggatatttttccctctattgattggttcaatcttcgctttgttcttactcttcctcacaacaaccctaacttcaccaaccggaggagtccgatttctcccttttacccgacccgttttgttaaccggatctggttcatcagctttcgttgaatccaaaatcaaacctcaacaaatctcatcactcccgtcgccaccgcgttttgcttacttgatttctggatccgccggcgacgggaaatctctccggcgaactcttttggctctttaccatccgaataatcggtatgttgttcatttagatagagaatcttcgcgtgaggagagagaggagcttcatggatatatcaaaaactcgtctttgtttcgaaggtttatgaatgttcatatgattgagaaagctaatcttgtcacgtatcgtggacctactatggttgccaatacacttcacgccgctgcgattttgcttagagaaggagctgattgggattggtttatcaatcttagctcttctgactatcctttagtgactcaagatgatttgttgcatatcttttcgcatttgccgcgggatttgaacttcattgatcatactagtaacattggatggaaagcatcacaaagagcaaaaccggtgattatagatcctggactgtatttgaacaagaaatctgatgttttttgggttacgcaaagacggagcatcccaacagcattcaagcttttcacaggctctgcttggatggcgttatctcggccattcgtcgactattgtatatggggttgggataatctacctcgtacggtcttaatgtattactcgaattttctctcttctccagaaggatattttcacactgttctctgcaacgctgaggaattcagaaacacaacggtaaatagcgacctgcacttcatatcgtgggacaatccgcctaagcagcatccacaccatctcactcttacagacatgaccaaaatggtaaatagcaatgccccgtttgctagaaagttcagaagagaagatcctgtccttgacaagatcgatgatgagctccttaacagaggtcctgggatgataacacctggcggttggtgcattggaagccatgagaatgggagtgacccttgtgctgttattggtgatactgatgttatcaggcctggtccaggcgctagacggctcgagaatctggtaacttcgttattatccactgagaatttccgatcaaaacagtgtaagtgatctgatatatctagagaacgacatcacatagagatggaatgtagcagccttgattattggggttagatgtgatttaggatctgatagaaatccctcttttagtcaagaatataagtgaagaaatacagaacaattaggctatatgatgtgggaagtatttgtcttgttgctccacacaacatgccttaaggtcttgttgtagttctcagattggaattttgagattttgtactctgctgttttaaagttagtttcttcctttc

SEQ ID NO: 73825 - protein, 447 aa, Arabidopsis thaliana
  peptide (1)..(447): Ceres Seq. ID no. 4982426
  misc_feature (101)..(326): Pfam Name: Core-2/I-Branching enzyme Pfam Description: Core-2/I-Branching enzyme
  misc_feature (1)..(447): Homolog of NCBI NO: 15242532 NR Description: N-acetylglucosaminyltransferase family
  misc_feature (1)..(447): Homolog of NCBI NO: 15242199 NR Description: N-acetylglucosaminyltransferase family enzyme family); protein id: At5g15050.1, supported by cDNA: supported by cDNA: gi_16209673 [Arabidopsis thaliana]
  misc_feature (28)..(447): Homolog of NCBI NO: 18400725 NR Description: N-acetylglucosaminyltransferase family enzyme family); protein id: At3g15350.1, supported by cDNA:
  misc_feature (28)..(447): Homolog of NCBI NO: 15146308 NR Description: AT3g15350/K7L4_15 [Arabidopsis thaliana]
  misc_feature (20)..(446): Homolog of NCBI NO: 15218824 NR Description: N-acetylglucosaminyltransferase family enzyme family); protein id: At1g03520.1, supported by cDNA: supported by cDNA: gi_20465790 [Arabidopsis thaliana] thaliana
  misc_feature (29)..(447): Homolog of NCBI NO: 30687610 NR Description: N-acetylglucosaminyltransferase family
  misc_feature (20)..(446): Homolog of NCBI NO: 15236287 NR Description: N-acetylglucosaminyltransferase family
  misc_feature (56)..(447): Homolog of NCBI NO: 7486258 NR Description: hypothetical protein F27G19.80 - Arabidopsis >gi|4972073|emb|CAB43880.1| putative protein [Arabidopsis >gi|7269602|emb|CAB81398.1| putative protein [Arabidopsis
  misc_feature (45)..(447): Homolog of NCBI NO: 34903664 NR Description: B1015E06.17 [Oryza sativa (japonica
  misc_feature (31)..(446): Homolog of NCBI NO: 15219202 NR Description: N-acetylglucosaminyltransferase family
MKKLRSYYSNVRHHQNHHHHHHHHSNIVSSERKWIFFPLLIGSIFALFLLFLTTTLTSPTGGVRFLPFTRPVLLTGSGSSAFVESKIKPQQISSLPSPPRFAYLISGSAGDGKSLRRTLLALYHPNNRYVVHLDRESSREEREELHGYIKNSSLFRRFMNVHMIEKANLVTYRGPTMVANTLHAAAILLREGADWDWFINLSSSDYPLVTQDDLLHIFSHLPRDLNFIDHTSNIGWKASQRAKPVIIDPGLYLNKKSDVFWVTQRRSIPTAFKLFTGSAWMALSRPFVDYCIWGWDNLPRTVLMYYSNFLSSPEGYFHTVLCNAEEFRNTTVNSDLHFISWDNPPKQHPHHLTLTDMTKMVNSNAPFARKFRREDPVLDKIDDELLNRGPGMITPGGWCIGSHENGSDPCAVIGDTDVIRPGPGARRLENLVTSLLSTENFRSKQCK

SEQ ID NO: 73826 - protein, 289 aa, Arabidopsis thaliana
  peptide (1)..(289): Ceres Seq. ID no. 4982427
  misc_feature (1)..(168): Pfam Name: Core-2/I-Branching enzyme Pfam Description: Core-2/I-Branching enzyme
  misc_feature (1)..(289): Homolog of NCBI NO: 15242532 NR Description: N-acetylglucosaminyltransferase family
  misc_feature (1)..(289): Homolog of NCBI NO: 15242199 NR Description: N-acetylglucosaminyltransferase family enzyme family); protein id: At5g15050.1, supported by cDNA: supported by cDNA: gi_16209673 [Arabidopsis thaliana]
  misc_feature (1)..(289): Homolog of NCBI NO: 18400725 NR Description: N-acetylglucosaminyltransferase family enzyme family); protein id: At3g15350.1, supported by cDNA:
  misc_feature (1)..(289): Homolog of NCBI NO: 15146308 NR Description: AT3g15350/K7L4_15 [Arabidopsis thaliana]
  misc_feature (1)..(288): Homolog of NCBI NO: 15218824 NR Description: N-acetylglucosaminyltransferase family enzyme family); protein id: At1g03520.1, supported by cDNA: supported by cDNA: gi_20465790 [Arabidopsis thaliana] thaliana
  misc_feature (1)..(289): Homolog of NCBI NO: 30687610 NR Description: N-acetylglucosaminyltransferase family
  misc_feature (1)..(288): Homolog of NCBI NO: 15236287 NR Description: N-acetylglucosaminyltransferase family
  misc_feature (1)..(289): Homolog of NCBI NO: 7486258 NR Description: hypothetical protein F27G19.80 - Arabidopsis >gi|4972073|emb|CAB43880.1| putative protein [Arabidopsis >gi|7269602|emb|CAB81398.1| putative protein [Arabidopsis
  misc_feature (1)..(289): Homolog of NCBI NO: 34903664 NR Description: B1015E06.17 [Oryza sativa (japonica
  misc_feature (1)..(288): Homolog of NCBI NO: 15219202 NR Description: N-acetylglucosaminyltransferase family
MNVHMIEKANLVTYRGPTMVANTLHAAAILLREGADWDWFINLSSSDYPLVTQDDLLHIFSHLPRDLNFIDHTSNIGWKASQRAKPVIIDPGLYLNKKSDVFWVTQRRSIPTAFKLFTGSAWMALSRPFVDYCIWGWDNLPRTVLMYYSNFLSSPEGYFHTVLCNAEEFRNTTVNSDLHFISWDNPPKQHPHHLTLTDMTKMVNSNAPFARKFRREDPVLDKIDDELLNRGPGMITPGGWCIGSHENGSDPCAVIGDTDVIRPGPGARRLENLVTSLLSTENFRSKQCK

SEQ ID NO: 73827 - protein, 285 aa, Arabidopsis thaliana
  peptide (1)..(285): Ceres Seq. ID no. 4982428
  misc_feature (1)..(164): Pfam Name: Core-2/I-Branching enzyme Pfam Description: Core-2/I-Branching enzyme
  misc_feature (1)..(285): Homolog of NCBI NO: 15242532 NR Description: N-acetylglucosaminyltransferase family
  misc_feature (1)..(285): Homolog of NCBI NO: 15242199 NR Description: N-acetylglucosaminyltransferase family enzyme family); protein id: At5g15050.1, supported by cDNA: supported by cDNA: gi_16209673 [Arabidopsis thaliana]
  misc_feature (1)..(285): Homolog of NCBI NO: 18400725 NR Description: N-acetylglucosaminyltransferase family enzyme family); protein id: At3g15350.1, supported by cDNA:
  misc_feature (1)..(285): Homolog of NCBI NO: 15146308 NR Description: AT3g15350/K7L4_15 [Arabidopsis thaliana]
  misc_feature (1)..(284): Homolog of NCBI NO: 15218824 NR Description: N-acetylglucosaminyltransferase family enzyme family); protein id: At1g03520.1, supported by cDNA: supported by cDNA: gi_20465790 [Arabidopsis thaliana] thaliana
  misc_feature (1)..(285): Homolog of NCBI NO: 30687610 NR Description: N-acetylglucosaminyltransferase family
  misc_feature (1)..(284): Homolog of NCBI NO: 15236287 NR Description: N-acetylglucosaminyltransferase family
  misc_feature (1)..(285): Homolog of NCBI NO: 7486258 NR Description: hypothetical protein F27G19.80 - Arabidopsis >gi|4972073|emb|CAB43880.1| putative protein [Arabidopsis >gi|7269602|emb|CAB81398.1| putative protein [Arabidopsis
  misc_feature (1)..(285): Homolog of NCBI NO: 34903664 NR Description: B1015E06.17 [Oryza sativa (japonica
  misc_feature (1)..(284): Homolog of NCBI NO: 15219202 NR Description: N-acetylglucosaminyltransferase family
MIEKANLVTYRGPTMVANTLHAAAILLREGADWDWFINLSSSDYPLVTQDDLLHIFSHLPRDLNFIDHTSNIGWKASQRAKPVIIDPGLYLNKKSDVFWVTQRRSIPTAFKLFTGSAWMALSRPFVDYCIWGWDNLPRTVLMYYSNFLSSPEGYFHTVLCNAEEFRNTTVNSDLHFISWDNPPKQHPHHLTLTDMTKMVNSNAPFARKFRREDPVLDKIDDELLNRGPGMITPGGWCIGSHENGSDPCAVIGDTDVIRPGPGARRLENLVTSLLSTENFRSKQCK

SEQ ID NO: 73828 - DNA, 1015 bp, Arabidopsis thaliana
  misc_feature (1)..(1015): Ceres Seq. ID no. 4982473
  misc_feature: MA Experiment ID: 108434 Result: Up-regulated in Transcription
  misc_feature: MA Experiment 108434 PARAMETER Experiment Name: At_Root_Tips_cDNA_P Parameter: Tissue Value: Root Tips
  misc_feature: MA Experiment ID: 108462 Result: Down-regulated in Transcription
  misc_feature: MA Experiment 108462 PARAMETER Experiment Name: At_Germinating_Seeds_cDNA_P Parameter: Age (day) Value: 2 vs. 0
  misc_feature: MA Experiment 108462 PARAMETER Experiment Name: At_Germinating_Seeds_cDNA_P Parameter: Tissue Value: Germinating Seeds
  misc_feature: MA Experiment ID: 108463 Result: Down-regulated in Transcription
  misc_feature: MA Experiment 108463 PARAMETER Experiment Name: At_Germinating_Seeds_cDNA_P Parameter: Age (day) Value: 3 vs. 0
  misc_feature: MA Experiment 108463 PARAMETER Experiment Name: At_Germinating_Seeds_cDNA_P Parameter: Tissue Value: Germinating Seeds
  misc_feature: MA Experiment ID: 108464 Result: Down-regulated in Transcription
  misc_feature: MA Experiment 108464 PARAMETER Experiment Name: At_Germinating_Seeds_cDNA_P Parameter: Age (day) Value: 4 vs. 0
  misc_feature: MA Experiment 108464 PARAMETER Experiment Name: At_Germinating_Seeds_cDNA_P Parameter: Tissue Value: Germinating Seeds
  misc_feature: MA Experiment ID: 20000185 Result: Up-regulated in Transcription
  misc_feature: MA Experiment 20000185 PARAMETER Experiment Name: At_Roots__P Parameter: Age (day) Value: 7 vs. 21
  misc_feature: MA Experiment 20000185 PARAMETER Experiment Name: At_Roots__P Parameter: Organism Value: A. thaliana
  misc_feature: MA Experiment 20000185 PARAMETER Experiment Name: At_Roots__P Parameter: Tissue Value: Roots vs. Whole Plant
  misc_feature: MA Experiment ID: 20000234 Result: Up-regulated in Transcription
  misc_feature: MA Experiment 20000234 PARAMETER Experiment Name: At_Siliques_P Parameter: Age (day) Value: 21
  misc_feature: MA Experiment 20000234 PARAMETER Experiment Name: At_Siliques_P Parameter: Organism Value: A. thaliana
  misc_feature: MA Experiment 20000234 PARAMETER Experiment Name: At_Siliques_P Parameter: Plant Line Value: WS
  misc_feature: MA Experiment 20000234 PARAMETER Experiment Name: At_Siliques_P Parameter: Tissue Value: Less Than 5mm Siliques vs. Whole Plant
  misc_feature: MA Experiment ID: 20000235 Result: Up-regulated in Transcription
  misc_feature: MA Experiment 20000235 PARAMETER Experiment Name: At_Siliques_P Parameter: Age (day) Value: 21
  misc_feature: MA Experiment 20000235 PARAMETER Experiment Name: At_Siliques_P Parameter: Organism Value: A. thaliana
  misc_feature: MA Experiment 20000235 PARAMETER Experiment Name: At_Siliques_P Parameter: Plant Line Value: WS
  misc_feature: MA Experiment 20000235 PARAMETER Experiment Name: At_Siliques_P Parameter: Tissue Value: 5-10mm Siliques vs. Whole Plant
  misc_feature: MA Experiment ID: 20000265 Result: Up-regulated in Transcription
  misc_feature: MA Experiment 20000265 PARAMETER Experiment Name: At_Open_Flower_P Parameter: Age (day) Value: 21
  misc_feature: MA Experiment 20000265 PARAMETER Experiment Name: At_Open_Flower_P Parameter: Plant Line Value: WS
  misc_feature: MA Experiment 20000265 PARAMETER Experiment Name: At_Open_Flower_P Parameter: Tissue Value: Closed Flower vs. Whole Plant
  misc_feature: MA Experiment ID: 20000267 Result: Up-regulated in Transcription
  misc_feature: MA Experiment 20000267 PARAMETER Experiment Name: At_Drought_P Parameter: Age (day) Value: 7
  misc_feature: MA Experiment 20000267 PARAMETER Experiment Name: At_Drought_P Parameter: Organism Value: A. thaliana
  misc_feature: MA Experiment 20000267 PARAMETER Experiment Name: At_Drought_P Parameter: Plant Line Value: WS
  misc_feature: MA Experiment 20000267 PARAMETER Experiment Name: At_Drought_P Parameter: Timepoint (hr) Value: 6
  misc_feature: MA Experiment 20000267 PARAMETER Experiment Name: At_Drought_P Parameter: Tissue Value: Whole Plant
  misc_feature: MA Experiment 20000267 PARAMETER Experiment Name: At_Drought_P Parameter: Treatment Value: Drought vs. No Drought
  misc_feature: MA Experiment ID: 20000437 Result: Up-regulated in Transcription
  misc_feature: MA Experiment 20000437 PARAMETER Experiment Name: At_Drought_P Parameter: Age (day) Value: 8
  misc_feature: MA Experiment 20000437 PARAMETER Experiment Name: At_Drought_P Parameter: Organism Value: A. thaliana
  misc_feature: MA Experiment 20000437 PARAMETER Experiment Name: At_Drought_P Parameter: Plant Line Value: WS
  misc_feature: MA Experiment 20000437 PARAMETER Experiment Name: At_Drought_P Parameter: Timepoint (hr) Value: 24
  misc_feature: MA Experiment 20000437 PARAMETER Experiment Name: At_Drought_P Parameter: Tissue Value: Whole Plant
  misc_feature: MA Experiment 20000437 PARAMETER Experiment Name: At_Drought_P Parameter: Treatment Value: Drought vs. No Drought
  misc_feature: MA Experiment ID: 20000438 Result: Down-regulated in Transcription
  misc_feature: MA Experiment 20000438 PARAMETER Experiment Name: At_Shoots__P Parameter: Age (day) Value: 14
  misc_feature: MA Experiment 20000438 PARAMETER Experiment Name: At_Shoots__P Parameter: Tissue Value: Shoots vs. Whole Plant
  misc_feature: MA Experiment ID: 20000439 Result: Up-regulated in Transcription
  misc_feature: MA Experiment 20000439 PARAMETER Experiment Name: At_Roots__P Parameter: Age (day) Value: 14 vs. 21
  misc_feature: MA Experiment 20000439 PARAMETER Experiment Name: At_Roots__P Parameter: Organism Value: A. thaliana
  misc_feature: MA Experiment 20000439 PARAMETER Experiment Name: At_Roots__P Parameter: Tissue Value: Roots vs. Whole Plant
  misc_feature: MA Experiment ID: 20000441 Result: Down-regulated in Transcription
  misc_feature: MA Experiment 20000441 PARAMETER Experiment Name: At_1uM_BR-BRZ__P Parameter: Tissue Value: Shoot Apices
  misc_feature: MA Experiment 20000441 PARAMETER Experiment Name: At_1uM_BR-BRZ__P Parameter: Treatment Value: 1uM BR vs. No Treatment
  misc_feature: MA Experiment ID: 20000443 Result: Down-regulated in Transcription
  misc_feature: MA Experiment 20000443 PARAMETER Experiment Name: At_1uM_BR-BRZ__P Parameter: Tissue Value: Shoot Apices
  misc_feature: MA Experiment 20000443 PARAMETER Experiment Name: At_1uM_BR-BRZ__P Parameter: Treatment Value: 1uM BRZ vs. No Treatment
acttcagcaaaaccactacacctatcttatctctcagattttctcaagaagattgtgtggaagatgatgagacggaagatttttctctttggtgattccatcactgaagaatcctttagtgacggtggctggggtgcttctctcgccgatcttctccgccgcaaggctgatatggtgctacgaggatacagtggatataacacgaggtgggcactgaaagtggtggagagagtttttccggtggcagaagaagacggcggagattctccggcagctgtgactgttttctttggagcgaacgacgcgtgtcttccggagagatgctcggggtttcagcatgtgccacttcacgagtacaagcagaatcttcgctctattgtttcgtttctcaagaatcgttggccacaaacggccattattcttataactccgcctccaatagacgaagaggcccgcctcagatatccttatatcgaaaacacaacggggttgccggaaagaacgaatgaagtagccggactatacgcaaaagcatgtatagcagtagctgaggaatgtcaaatttcggtcactgatctttggtccaaaatgcagcaaattccaaattggcaaacagaatgtctatgggacgggttacatttgagtcgggtcggtaacaaagtagtgtttgaagaagtagcaaagaagcttaaagaagaaggcattggagctgaggacttagctgtggatcttccccttatagaagatgttgaccctaaggatcctctcaaatcctttgatgagttttgatgctttatattactaccatgcagtttggttcttctatctttgattacttcttaatttcgatattattttagggaatgtattattttagggaatgtgacattattaggcactttgtgagaatctttttacgtttgaggcacttgtgagagagagggcactttgccatctttttttagaggagattgaaccaatttgcccctgaagtgatgaaaacacaataattttt

SEQ ID NO: 73829 - protein, 262 aa, Arabidopsis thaliana; identical to SEQ ID NO: 28668
  peptide (1)..(262): Ceres Seq. ID no. 4982474
  misc_feature (27)..(226): Pfam Name: GDSL-like Lipase/Acylhydrolase Pfam Description: GDSL-like Lipase/Acylhydrolase
  misc_feature (22)..(262): Homolog of NCBI NO: 38454102 NR Description: At5g45920 [Arabidopsis thaliana]
  misc_feature (23)..(262): Homolog of NCBI NO: 15242539 NR Description: putative protein; protein id: At5g45920.1
  misc_feature (23)..(260): Homolog of NCBI NO: 34903948 NR Description: OSJNBa0038J17.19 [Oryza sativa (japonica >gi|7523515|dbj|BAA94243.1| unnamed protein product [Oryza sativa
  misc_feature (23)..(261): Homolog of NCBI NO: 15242002 NR Description: putative protein; protein id: At5g62930.1, by cDNA: gi_18087588 [Arabidopsis thaliana]
  misc_feature (22)..(259): Homolog of NCBI NO: 37535366 NR Description: putative esterase [Oryza sativa (japonica
  misc_feature (25)..(232): Homolog of NCBI NO: 32352168 NR Description: hypothetical protein [Oryza sativa (japonica
  misc_feature (26)..(255): Homolog of NCBI NO: 27478045 NR Description: hypothetical protein XP_209490 [Homo sapiens]
  misc_feature (26)..(255): Homolog of NCBI NO: 27754071 NR Description: hypothetical protein 4833421E05Rik; RIKEN cDNA gene [Mus musculus] >gi|12837739|dbj|BAB23934.1| unnamed protein
  misc_feature (23)..(232): Homolog of NCBI NO: 13161403 NR Description: CPRD49 [Vigna unguiculata]
  misc_feature (24)..(232): Homolog of NCBI NO: 21554235 NR Description: CPRD49 [Arabidopsis thaliana]

SEQ ID NO: 73830 - protein, 241 aa, Arabidopsis thaliana; identical to SEQ ID NO: 28669
  peptide (1)..(241): Ceres Seq. ID no. 4982475
  misc_feature (6)..(205): Pfam Name: GDSL-like Lipase/Acylhydrolase Pfam Description: GDSL-like Lipase/Acylhydrolase
  misc_feature (1)..(241): Homolog of NCBI NO: 38454102 NR Description: At5g45920 [Arabidopsis thaliana]
  misc_feature (2)..(241): Homolog of NCBI NO: 15242539 NR Description: putative protein; protein id: At5g45920.1
  misc_feature (2)..(239): Homolog of NCBI NO: 34903948 NR Description: OSJNBa0038J17.19 [Oryza sativa (japonica >gi|7523515|dbj|BAA94243.1| unnamed protein product [Oryza sativa
  misc_feature (2)..(240): Homolog of NCBI NO: 15242002 NR Description: putative protein; protein id: At5g62930.1, by cDNA: gi_18087588 [Arabidopsis thaliana]
  misc_feature (1)..(238): Homolog of NCBI NO: 37535366 NR Description: putative esterase [Oryza sativa (japonica
  misc_feature (4)..(211): Homolog of NCBI NO: 32352168 NR Description: hypothetical protein [Oryza sativa (japonica
  misc_feature (5)..(234): Homolog of NCBI NO: 27478045 NR Description: hypothetical protein XP_209490 [Homo sapiens]
  misc_feature (5)..(234): Homolog of NCBI NO: 27754071 NR Description: hypothetical protein 4833421E05Rik; RIKEN cDNA gene [Mus musculus] >gi|12837739|dbj|BAB23934.1| unnamed protein
  misc_feature (2)..(211): Homolog of NCBI NO: 13161403 NR Description: CPRD49 [Vigna unguiculata]
  misc_feature (3)..(211): Homolog of NCBI NO: 21554235 NR Description: CPRD49 [Arabidopsis thaliana]

SEQ ID NO: 73831 - protein, 240 aa, Arabidopsis thaliana; identical to SEQ ID NO: 28670
  peptide (1)..(240): Ceres Seq. ID no. 4982476
  misc_feature (5)..(204): Pfam Name: GDSL-like Lipase/Acylhydrolase Pfam Description: GDSL-like Lipase/Acylhydrolase
  misc_feature (1)..(240): Homolog of NCBI NO: 38454102 NR Description: At5g45920 [Arabidopsis thaliana]
  misc_feature (1)..(240): Homolog of NCBI NO: 15242539 NR Description: putative protein; protein id: At5g45920.1
  misc_feature (1)..(238): Homolog of NCBI NO: 34903948 NR Description: OSJNBa0038J17.19 [Oryza sativa (japonica >gi|7523515|dbj|BAA94243.1| unnamed protein product [Oryza sativa
  misc_feature (1)..(239): Homolog of NCBI NO: 15242002 NR Description: putative protein; protein id: At5g62930.1, by cDNA: gi_18087588 [Arabidopsis thaliana]
  misc_feature (1)..(237): Homolog of NCBI NO: 37535366 NR Description: putative esterase [Oryza sativa (japonica
  misc_feature (3)..(210): Homolog of NCBI NO: 32352168 NR Description: hypothetical protein [Oryza sativa (japonica
  misc_feature (4)..(233): Homolog of NCBI NO: 27478045 NR Description: hypothetical protein XP_209490 [Homo sapiens]
  misc_feature (4)..(233): Homolog of NCBI NO: 27754071 NR Description: hypothetical protein 4833421E05Rik; RIKEN cDNA gene [Mus musculus] >gi|12837739|dbj|BAB23934.1| unnamed protein
  misc_feature (1)..(210): Homolog of NCBI NO: 13161403 NR Description: CPRD49 [Vigna unguiculata]
  misc_feature (2)..(210): Homolog of NCBI NO: 21554235 NR Description: CPRD49 [Arabidopsis thaliana]

SEQ ID NO: 73832 - DNA, 1661 bp, Arabidopsis thaliana
  misc_feature (1)..(1661): Ceres Seq. ID no. 4982518
  misc_feature: MA Experiment ID: 108434 Result: Up-regulated in Transcription
  misc_feature: MA Experiment 108434 PARAMETER Experiment Name: At_Root_Tips_cDNA_P Parameter: Tissue Value: Root Tips
  misc_feature: MA Experiment ID: 108461 Result: Up-regulated in Transcription
  misc_feature: MA Experiment 108461 PARAMETER Experiment Name: At_Germinating_Seeds_cDNA_P Parameter: Age (day) Value: 1 vs. 0
  misc_feature: MA Experiment 108461 PARAMETER Experiment Name: At_Germinating_Seeds_cDNA_P Parameter: Tissue Value: Germinating Seeds
  misc_feature: MA Experiment ID: 108462 Result: Up-regulated in Transcription
  misc_feature: MA Experiment 108462 PARAMETER Experiment Name: At_Germinating_Seeds_cDNA_P Parameter: Age (day) Value: 2 vs. 0
  misc_feature: MA Experiment 108462 PARAMETER Experiment Name: At_Germinating_Seeds_cDNA_P Parameter: Tissue Value: Germinating Seeds
  misc_feature: MA Experiment ID: 108464 Result: Up-regulated in Transcription
  misc_feature: MA Experiment 108464 PARAMETER Experiment Name: At_Germinating_Seeds_cDNA_P Parameter: Age (day) Value: 4 vs. 0
  misc_feature: MA Experiment 108464 PARAMETER Experiment Name: At_Germinating_Seeds_cDNA_P Parameter: Tissue Value: Germinating Seeds
  misc_feature: MA Experiment ID: 108595 Result: Down-regulated in Transcription
  misc_feature: MA Experiment 108595 PARAMETER Experiment Name: At_Ler-pi_Ovule_cDNA_P Parameter: Plant Line Value: null
  misc_feature: MA Experiment ID: 20000111 Result: Down-regulated in Transcription
  misc_feature: MA Experiment 20000111 PARAMETER Experiment Name: At_42deg_Heat_cDNA_P Parameter: Temperature (deg C) Value: 42 vs. 22
  misc_feature: MA Experiment 20000111 PARAMETER Experiment Name: At_42deg_Heat_cDNA_P Parameter: Timepoint (hr) Value: 6
  misc_feature: MA Experiment 20000111 PARAMETER Experiment Name: At_42deg_Heat_cDNA_P Parameter: Tissue Value: Aerial
  misc_feature: MA Experiment ID: 20000112 Result: Down-regulated in Transcription
  misc_feature: MA Experiment 20000112 PARAMETER Experiment Name: At_42deg_Heat_cDNA_P Parameter: Temperature (deg C) Value: 42 vs. 22
  misc_feature: MA Experiment 20000112 PARAMETER Experiment Name: At_42deg_Heat_cDNA_P Parameter: Timepoint (hr) Value: 2
  misc_feature: MA Experiment 20000112 PARAMETER Experiment Name: At_42deg_Heat_cDNA_P Parameter: Tissue Value: Aerial
  misc_feature: MA Experiment ID: 20000113 Result: Down-regulated in Transcription
  misc_feature: MA Experiment 20000113 PARAMETER Experiment Name: At_42deg_Heat_cDNA_P Parameter: Temperature (deg C) Value: 42 vs. 22
  misc_feature: MA Experiment 20000113 PARAMETER Experiment Name: At_42deg_Heat_cDNA_P Parameter: Timepoint (hr) Value: 8
  misc_feature: MA Experiment 20000113 PARAMETER Experiment Name: At_42deg_Heat_cDNA_P Parameter: Tissue Value: Aerial
  misc_feature: MA Experiment ID: 20000144 Result: Down-regulated in Transcription
  misc_feature: MA Experiment 20000144 PARAMETER Experiment Name: At_42deg_Heat_cDNA_P Parameter: Temperature (deg C) Value: 42 vs. 22
  misc_feature: MA Experiment 20000144 PARAMETER Experiment Name: At_42deg_Heat_cDNA_P Parameter: Timepoint (hr) Value: 1
  misc_feature: MA Experiment 20000144 PARAMETER Experiment Name: At_42deg_Heat_cDNA_P Parameter: Tissue Value: Aerial
  misc_feature: MA Experiment ID: 20000171 Result: Down-regulated in Transcription
  misc_feature: MA Experiment 20000171 PARAMETER Experiment Name: At_42deg_Heat_P Parameter: Age (day) Value: 14
  misc_feature: MA Experiment 20000171 PARAMETER Experiment Name: At_42deg_Heat_P Parameter: Organism Value: A. thaliana
  misc_feature: MA Experiment 20000171 PARAMETER Experiment Name: At_42deg_Heat_P Parameter: Plant Line Value: WS
  misc_feature: MA Experiment 20000171 PARAMETER Experiment Name: At_42deg_Heat_P Parameter: Temperature (deg C) Value: 42 vs. 22
  misc_feature: MA Experiment 20000171 PARAMETER Experiment Name: At_42deg_Heat_P Parameter: Timepoint (hr) Value: 1
  misc_feature: MA Experiment 20000171 PARAMETER Experiment Name: At_42deg_Heat_P Parameter: Tissue Value: Aerial
  misc_feature: MA Experiment ID: 20000173 Result: Down-regulated in Transcription
  misc_feature: MA Experiment 20000173 PARAMETER Experiment Name: At_42deg_Heat_P Parameter: Age (day) Value: 14
  misc_feature: MA Experiment 20000173 PARAMETER Experiment Name: At_42deg_Heat_P Parameter: Organism Value: A. thaliana
  misc_feature: MA Experiment 20000173 PARAMETER Experiment Name: At_42deg_Heat_P Parameter: Plant Line Value: WS
  misc_feature: MA Experiment 20000173 PARAMETER Experiment Name: At_42deg_Heat_P Parameter: Temperature (deg C) Value: 42 vs. 22
  misc_feature: MA Experiment 20000173 PARAMETER Experiment Name: At_42deg_Heat_P Parameter: Timepoint (hr) Value: 6
  misc_feature: MA Experiment 20000173 PARAMETER Experiment Name: At_42deg_Heat_P Parameter: Tissue Value: Aerial
  misc_feature: MA Experiment ID: 20000180 Result: Up-regulated in Transcription
  misc_feature: MA Experiment 20000180 PARAMETER Experiment Name: At_Germinating_Seeds_P Parameter: Age (hr) Value: 24 vs. 0
  misc_feature: MA Experiment 20000180 PARAMETER Experiment Name: At_Germinating_Seeds_P Parameter: Tissue Value: Germinating Seeds
  misc_feature: MA Experiment ID: 20000184 Result: Down-regulated in Transcription
  misc_feature: MA Experiment 20000184 PARAMETER Experiment Name: At_Shoots__P Parameter: Age (day) Value: 7
  misc_feature: MA Experiment 20000184 PARAMETER Experiment Name: At_Shoots__P Parameter: Tissue Value: Shoots vs. Whole Plant
  misc_feature: MA Experiment ID: 20000185 Result: Up-regulated in Transcription
  misc_feature: MA Experiment 20000185 PARAMETER Experiment Name: At_Roots__P Parameter: Age (day) Value: 7 vs. 21
  misc_feature: MA Experiment 20000185 PARAMETER Experiment Name: At_Roots__P Parameter: Organism Value: A. thaliana
  misc_feature: MA Experiment 20000185 PARAMETER Experiment Name: At_Roots__P Parameter: Tissue Value: Roots vs. Whole Plant
  misc_feature: MA Experiment ID: 20000224 Result: Up-regulated in Transcription
  misc_feature: MA Experiment ID: 20000234 Result: Up-regulated in Transcription
  misc_feature: MA Experiment 20000234 PARAMETER Experiment Name: At_Siliques_P Parameter: Age (day) Value: 21
  misc_feature: MA Experiment 20000234 PARAMETER Experiment Name: At_Siliques_P Parameter: Organism Value: A. thaliana
  misc_feature: MA Experiment 20000234 PARAMETER Experiment Name: At_Siliques_P Parameter: Plant Line Value: WS
  misc_feature: MA Experiment 20000234 PARAMETER Experiment Name: At_Siliques_P Parameter: Tissue Value: Less Than 5mm Siliques vs. Whole Plant
  misc_feature: MA Experiment ID: 20000265 Result: Up-regulated in Transcription
  misc_feature: MA Experiment 20000265 PARAMETER Experiment Name: At_Open_Flower_P Parameter: Age (day) Value: 21
  misc_feature: MA Experiment 20000265 PARAMETER Experiment Name: At_Open_Flower_P Parameter: Plant Line Value: WS
  misc_feature: MA Experiment 20000265 PARAMETER Experiment Name: At_Open_Flower_P Parameter: Tissue Value: Closed Flower vs. Whole Plant
  misc_feature: MA Experiment ID: 20000286 Result: Up-regulated in Transcription
  misc_feature: MA Experiment 20000286 PARAMETER Experiment Name: At_Open_Flower_P Parameter: Age (day) Value: 21
  misc_feature: MA Experiment 20000286 PARAMETER Experiment Name: At_Open_Flower_P Parameter: Plant Line Value: WS
  misc_feature: MA Experiment 20000286 PARAMETER Experiment Name: At_Open_Flower_P Parameter: Tissue Value: Half Open vs. Whole Plant
  misc_feature: MA Experiment ID: 20000439 Result: Up-regulated in Transcription
  misc_feature: MA Experiment 20000439 PARAMETER Experiment Name: At_Roots__P Parameter: Age (day) Value: 14 vs. 21
  misc_feature: MA Experiment 20000439 PARAMETER Experiment Name: At_Roots__P Parameter: Organism Value: A. thaliana
  misc_feature: MA Experiment 20000439 PARAMETER Experiment Name: At_Roots__P Parameter: Tissue Value: Roots vs. Whole Plant
  misc_feature: MA Experiment ID: 20001451 Result: Down-regulated in Transcription
  misc_feature: MA Experiment 20001451 PARAMETER Experiment Name: At_Far-red-induction_P Parameter: Age (day) Value: 7
  misc_feature: MA Experiment 20001451 PARAMETER Experiment Name: At_Far-red-induction_P Parameter: Light Value: Far-red vs. White
  misc_feature: MA Experiment 20001451 PARAMETER Experiment Name: At_Far-red-induction_P Parameter: Organism Value: A. thaliana
  misc_feature: MA Experiment 20001451 PARAMETER Experiment Name: At_Far-red-induction_P Parameter: Plant Line Value: Columbia
  misc_feature: MA Experiment 20001451 PARAMETER Experiment Name: At_Far-red-induction_P Parameter: Timepoint (hr) Value: 24
  misc_feature: MA Experiment 20001451 PARAMETER Experiment Name: At_Far-red-induction_P Parameter: Tissue Value: Whole Plant
  misc_feature: Pfam Name: Pkinase Pfam Description: Protein kinase domain
atcaagaagaagtctctgctagttccaaaacagaacaagtgaatccctcaagtttcttattacaaaacccaaaaaccaaagtgaaccagtgttgttgtttgtactcacagatccattctccactgattcatttcttgctctgcttcttctctcttagttttgttaagaatcttctcttatccattgtgttttttctattttataaatacatatataattttagttgggggagagcttgcctggtgtcgccttcttctctctctaagacttgtgcttaatttacggacatgtgaagatacttcgcttttgcctcatcgaagggcatgttagctatttacttatctcttctcttctcttctttgtcttgtgagctctcaaatcttcatagatacaaatcaagaaagtgatcaaacaaaaaaaggacaagtctttttggtatttcagatcgagaaaaaatgtggttgcaaggtttgaagtaatcttgcaatggattctttgactggatttagaatggaacccaaatggcaaattgatcctcagcttctctttgttggtccaaagattggtgaaggagctcatgctaaagtctatgagggaaaatacaagaatcagacagttgctataaagatagttcacagaggagaaacaccagaagagattgctaaaagagattcaagattccttagagaagtagaaatgctctcacgtgttcaacacaagaatttggtcaagttcattggtgcttgcaaggagcctgtaatggtgatagttacagaacttcttcaaggcggtacattgcgtaaatatctattaaacttgagacccgcatgtttggagactcgtgtggctatcggttttgcgcttgatattgctcgtggtatggaatgcttgcattcccatgggatcattcaccgtgatctcaaacccgagaacttgcttttaactgcagaccataaaacagtaaaactagcagattttggattagcaagagaagagtcactgactgagatgatgacggctgagacaggaacataccgatggatggcacctgagttgtacagcacggtaactcttcgattgggagagaagaagcactacaatcataaagtcgacgcctatagctttgcaatagttctttgggagcttttacacaataaattgccttttgagggaatgtcaaatctccaagcagcatatgcagcagccttcaaaaatgtgagaccaagcgcggagagcttaccggaggagttgggcgacattgtaacatcatgttggaatgaggatccgaatgctcggcccaacttcacgcatatcattgagttacttcttaactatctctctaaagttggatctccgatatccgctattccacaacggattcttgcttcgaagaacacgctattgccaccggattctcctggaactagctctttgatggctaagcttgatgaatgtggggaaactccaaaggccaaaagtgaagacaaacgaaaaggtttgtttttctgcttcaatcaatgttattaaccttgaaatcacagagtggttttaggaccagagatttggtagacatcactcaaattattcatgtaataatatcctccctaccatatgaatttagcaagaagttcatttatataaataaatagttatgtaattgt

SEQ ID NO: 73833 - protein, 346 aa, Arabidopsis thaliana; identical to SEQ ID NO: 37299
  peptide (1)..(346): Ceres Seq. ID no. 4982519
  misc_feature: Pfam Name: Pkinase Pfam Description: Protein kinase domain
  misc_feature (1)..(346): Homolog of NCBI NO: 15240630 NR Description: protein kinase ATN1-like protein; protein id:
  misc_feature (1)..(342): Homolog of NCBI NO: 15237443 NR Description: protein kinase - like protein; protein id: [Arabidopsis thaliana] >gi|9758080|dbj|BAB08524.1| protein kinase
  misc_feature (3)..(346): Homolog of NCBI NO: 32815816 NR Description: protein kinase [Cucumis sativus]
  misc_feature (7)..(340): Homolog of NCBI NO: 2129698 NR Description: protein kinase ATN1 (EC 2.7.1.-) - Arabidopsis
  misc_feature (7)..(340): Homolog of NCBI NO: 15232197 NR Description: putative protein kinase, ATN1; protein id: supported by cDNA: gi_16604327, supported by cDNA: gi_19699189 thaliana] >gi|11994183|dbj|BAB01286.1| nearly identical to
  misc_feature (9)..(290): Homolog of NCBI NO: 30679428 NR Description: protein kinase, putative [Arabidopsis thaliana]
  misc_feature (82)..(290): Homolog of NCBI NO: 11259780 NR Description: protein kinase ATN1-like protein - Arabidopsis
  misc_feature (9)..(82): Homolog of NCBI NO: 11259780 NR Description: protein kinase ATN1-like protein - Arabidopsis
  misc_feature (9)..(319): Homolog of NCBI NO: 28876011 NR Description: putative protein kinase [Oryza sativa (japonica
  misc_feature (7)..(336): Homolog of NCBI NO: 15240070 NR Description: protein kinase ATN1-like protein; protein id:

SEQ ID NO: 73834 - protein, 338 aa, Arabidopsis thaliana; identical to SEQ ID NO: 37300
  peptide (1)..(338): Ceres Seq. ID no. 4982520
  misc_feature: Pfam Name: Pkinase Pfam Description: Protein kinase domain
  misc_feature (1)..(338): Homolog of NCBI NO: 15240630 NR Description: protein kinase ATN1-like protein; protein id:
  misc_feature (1)..(334): Homolog of NCBI NO: 15237443 NR Description: protein kinase - like protein; protein id: [Arabidopsis thaliana] >gi|9758080|dbj|BAB08524.1| protein kinase
  misc_feature (1)..(338): Homolog of NCBI NO: 32815816 NR Description: protein kinase [Cucumis sativus]
  misc_feature (1)..(332): Homolog of NCBI NO: 2129698 NR Description: protein kinase ATN1 (EC 2.7.1.-) - Arabidopsis
  misc_feature (1)..(332): Homolog of NCBI NO: 15232197 NR Description: putative protein kinase, ATN1; protein id: supported by cDNA: gi_16604327, supported by cDNA: gi_19699189 thaliana] >gi|11994183|dbj|BAB01286.1| nearly identical to
  misc_feature (1)..(282): Homolog of NCBI NO: 30679428 NR Description: protein kinase, putative [Arabidopsis thaliana]
  misc_feature (74)..(282): Homolog of NCBI NO: 11259780 NR Description: protein kinase ATN1-like protein - Arabidopsis
  misc_feature (1)..(74): Homolog of NCBI NO: 11259780 NR Description: protein kinase ATN1-like protein - Arabidopsis
  misc_feature (1)..(311): Homolog of NCBI NO: 28876011 NR Description: putative protein kinase [Oryza sativa (japonica
  misc_feature (1)..(328): Homolog of NCBI NO: 15240070 NR Description: protein kinase ATN1-like protein; protein id:

SEQ ID NO: 73835 - protein, 276 aa, Arabidopsis thaliana; identical to SEQ ID NO: 37301
  peptide (1)..(276): Ceres Seq. ID no. 4982521
  misc_feature: Pfam Name: Pkinase Pfam Description: Protein kinase domain
  misc_feature (1)..(276): Homolog of NCBI NO: 15240630 NR Description: protein kinase ATN1-like protein; protein id:
  misc_feature (1)..(272): Homolog of NCBI NO: 15237443 NR Description: protein kinase - like protein; protein id: [Arabidopsis thaliana] >gi|9758080|dbj|BAB08524.1| protein kinase
  misc_feature (1)..(276): Homolog of NCBI NO: 32815816 NR Description: protein kinase [Cucumis sativus]
  misc_feature (1)..(270): Homolog of NCBI NO: 2129698 NR Description: protein kinase ATN1 (EC 2.7.1.-) - Arabidopsis
  misc_feature (1)..(270): Homolog of NCBI NO: 15232197 NR Description: putative protein kinase, ATN1; protein id: supported by cDNA: gi_16604327, supported by cDNA: gi_19699189 thaliana] >gi|11994183|dbj|BAB01286.1| nearly identical to
  misc_feature (1)..(220): Homolog of NCBI NO: 30679428 NR Description: protein kinase, putative [Arabidopsis thaliana]
  misc_feature (12)..(220): Homolog of NCBI NO: 11259780 NR Description: protein kinase ATN1-like protein - Arabidopsis
  misc_feature (1)..(12): Homolog of NCBI NO: 11259780 NR Description: protein kinase ATN1-like protein - Arabidopsis
  misc_feature (1)..(249): Homolog of NCBI NO: 28876011 NR Description: putative protein kinase [Oryza sativa (japonica
  misc_feature (1)..(266): Homolog of NCBI NO: 15240070 NR Description: protein kinase ATN1-like protein; protein id:

SEQ ID NO: 73836 - DNA, 3057 bp, Arabidopsis thaliana
  misc_feature (1)..(3057): Ceres Seq. ID no. 4982775
  misc_feature: MA Experiment ID: 20000495 Result: Down-regulated in Transcription
  misc_feature: MA Experiment 20000495 PARAMETER Experiment Name: At_Guard_Cells_P Parameter: Harvest Date Value: 8/2/2002
  misc_feature: MA Experiment 20000495 PARAMETER Experiment Name: At_Guard_Cells_P Parameter: Organism Value: A. thaliana
  misc_feature: MA Experiment 20000495 PARAMETER Experiment Name: At_Guard_Cells_P Parameter: Tissue Value: Guard Cells vs. Leaves
  misc_feature: MA Experiment ID: 20000496 Result: Down-regulated in Transcription
  misc_feature: MA Experiment 20000496 PARAMETER Experiment Name: At_Guard_Cells_P Parameter: Harvest Date Value: 7/19/2002
  misc_feature: MA Experiment 20000496 PARAMETER Experiment Name: At_Guard_Cells_P Parameter: Organism Value: Canola
  misc_feature: MA Experiment 20000496 PARAMETER Experiment Name: At_Guard_Cells_P Parameter: Tissue Value: Guard Cells vs. Leaves
atggatgaagattcgtctatggtggctgacaacgatcaggatcgtgagtttcagagccttgatggaggccaatctccttcgcctatggaaagagaaacgcctcagcagatgaacgaccaatcacctcctcctgaaggcggatcggtgcctacgccgccgccttcggatcctaatccggcaacttctcagcagcaagcggctgcggttgttggacaagagcagcagccggcgctagttgttggtccgaggtgtgcacctacgtattcggtggtggatgctatgatggataaaaaagaggatgggcctggccctaggtgtggtcacaccttgacggctgtgcctgctgttggtgatgaaggaacgcctggttatattggtcctcgtcttgtattgtttggtggtgcgacggctcttgagggaaattctggtggcaccggaactcctacttcagctggaagtgccggcattcggctagctggggcaactgctgatgttcattgttatgatgtactttctaataagtggactaggcttacaccttttggagaaccaccaaccccgagggccgcacatgttgcaactgcagtcgggaccatggtagttattcagggtggaattggtcctgctggtttatcggctgaagaccttcatgttcttgatctcactcaacaacggccacgatggcacagggttgttgttcagggtcctggaccaggacctcgttatggacatgtcatggcactcgtggggcaaaggtatctcatggcaattggtggaaatgatggaaaacgtccacttgctgatgtatgggccttggatactgccgccaagccttatgaatggcgtaagttggaaccagaaggggaaggtccacctccctgcatgtatgcaactgcaagtgcgcgctccgatggtcttcttctcctctgtggtggaagggatgcaaacagtgtgcctctggccagtgcatatggacttgcgaagcacagagatggacgttgggaatgggccatagcccctggtgtctcaccatcttccagatatcagcatgcagcagtctttgtaaatgcaagacttcatgtgtccggtggggcacttggtggtggacgcatggttgaagactcatccagtgttgcagtattggatactgcagcaggtgtatggtgtgatacaaaatcagttgttactagtcctagaactggtaggtatagtgccgatgcagctggtggcgatgcttcggttgagctgactaggcggtgtaggcatgctgctgctgcagtcggtgatttgatatttatctacggtggtttacgtggaggggtgttactcgatgacttattggttgctgaagatcttgctgctgcggaaacaacatatgctgcttctcatgctgctgcagctgcggcaacaaattctccaccaggtcgattacctggaaggtatggtttttcagatgaaaggaacagggagttatctgaatcagctgctgatggcgctgtggtgctgggaagccctgttgcaccccctgtaaatggtgatatgcatactgatattagccctgaaaatgcattacttccaggaactcggagaacgaataagggtgtggagtatcttgttgaagcatcagcagcggaagctgaggcgatcagtgcgacgttggctgctgccaaggcaagacaagtcaatggtgaagttgaactccctgatagggattgtggtgcagaggctacacccagtgggaaacctacattttcgctaatcaagccagattctatgggctcaatgagtgttacacctgcagggattcgtcttcatcatagagctgtggtggttgctgctgaaactggtggcgccttaggtggaatggttagacagttatccattgatcaatttgaaaatgagggacggcgtgtcagttatgggacaccagaaagtgcaacagcagcaaggaaactattagatcgacaaatgtcaatcaacagtgttccaaagaaggttatagctcatcttttgaagcctcgtggttggaagcctcctgttcgacggcagtttttcctagattgcaatgaaatagctgatctttgtgatagtgcagaacgtatcttcgcaagtgaaccgactgtattacagcttaaagctcctatcaaaatatttggtgatctgcatgggcagtttggggatcttatgcgcctttttgatgaatatggttcaccatctacagctggagacatatcatatatcgactacctcttcttaggggactatgttgatcggggtcaacacagtctagaaacaatctcccttctacttgcactaaaggttgagtaccagcataatgtacacttaattcggggaaaccatgaagctgcagatatcaatgccctttttggcttccggatagagtgtattgagcgaatgggtgaacgtgatggaatctgggtgtggcaccgaataaatcgtttattcaattggctacctcttgctgcatcgattgagaagaaaattatctgtatgcatgggggtattggtcgttctataaatcatgtggagcagatagaaaatattcaacgtccaattacaatggaagctggctccattgttcttatggatttattatggtcggatccaactgaaaatgacagtgtcgaaggtttaaggcccaatgctagaggccctggattggttacttttgggcctgaccgtgtcatggagttctgcaacaacaacgatcttcagttgattgtacgagcacacgaatgcgtaatggatggatttgagcgttttgctcaggggcatttgataacgctcttttctgctacaaactattgtggtactgcaaacaatgctggggctatcttggtactagggagagatcttgtagtggtacctaagctcattcatccgttacctccagcactttcatcgcctgaaacttcaccagaaagacatatagaagacacatggatgcaggagctgaacgcaaataggccagcgacgccaacccgaggacgcccacaaaattcaaatgaccgaggaggttctctggcttggatgtga

SEQ ID NO: 73837 - protein, 1018 aa, Arabidopsis thaliana
  peptide (1)..(1018): Ceres Seq. ID no. 4982776
  misc_feature (713)..(922): Pfam Name: Calcineurin-like phosphoesterase Pfam Description: Calcineurin-like phosphoesterase
  misc_feature (520)..(1018): Homolog of NCBI NO: 30679350 NR Description: phospho-ser/thr phosphatase -related [Arabidopsis
  misc_feature (85)..(534): Homolog of NCBI NO: 30679350 NR Description: phospho-ser/thr phosphatase -related [Arabidopsis
  misc_feature (520)..(1018): Homolog of NCBI NO: 22022522 NR Description: AT4g03080/T4I9_4 [Arabidopsis thaliana]
  misc_feature (85)..(534): Homolog of NCBI NO: 22022522 NR Description: AT4g03080/T4I9_4 [Arabidopsis thaliana]
  misc_feature (520)..(1018): Homolog of NCBI NO: 7488152 NR Description: probable phosphoprotein phosphatase (EC 3.1.3.16)
  misc_feature (85)..(504): Homolog of NCBI NO: 7488152 NR Description: probable phosphoprotein phosphatase (EC 3.1.3.16)
  misc_feature (665)..(996): Homolog of NCBI NO: 25513447 NR Description: probable phosphoprotein phosphatase (EC 3.1.3.16)
  misc_feature (32)..(278): Homolog of NCBI NO: 25513447 NR Description: probable phosphoprotein phosphatase (EC 3.1.3.16)
  misc_feature (576)..(629): Homolog of NCBI NO: 25513447 NR Description: probable phosphoprotein phosphatase (EC 3.1.3.16)
  misc_feature (207)..(408): Homolog of NCBI NO: 25513447 NR Description: probable phosphoprotein phosphatase (EC 3.1.3.16)
MDEDSSMVADNDQDREFQSLDGGQSPSPMERETPQQMNDQSPPPEGGSVPTPPPSDPNPATSQQQAAAVVGQEQQPALVVGPRCAPTYSVVDAMMDKKEDGPGPRCGHTLTAVPAVGDEGTPGYIGPRLVLFGGATALEGNSGGTGTPTSAGSAGIRLAGATADVHCYDVLSNKWTRLTPFGEPPTPRAAHVATAVGTMVVIQGGIGPAGLSAEDLHVLDLTQQRPRWHRVVVQGPGPGPRYGHVMALVGQRYLMAIGGNDGKRPLADVWALDTAAKPYEWRKLEPEGEGPPPCMYATASARSDGLLLLCGGRDANSVPLASAYGLAKHRDGRWEWAIAPGVSPSSRYQHAAVFVNARLHVSGGALGGGRMVEDSSSVAVLDTAAGVWCDTKSVVTSPRTGRYSADAAGGDASVELTRRCRHAAAAVGDLIFIYGGLRGGVLLDDLLVAEDLAAAETTYAASHAAAAAATNSPPGRLPGRYGFSDERNRELSESAADGAVVLGSPVAPPVNGDMHTDISPENALLPGTRRTNKGVEYLVEASAAEAEAISATLAAAKARQVNGEVELPDRDCGAEATPSGKPTFSLIKPDSMGSMSVTPAGIRLHHRAVVVAAETGGALGGMVRQLSIDQFENEGRRVSYGTPESATAARKLLDRQMSINSVPKKVIAHLLKPRGWKPPVRRQFFLDCNEIADLCDSAERIFASEPTVLQLKAPIKIFGDLHGQFGDLMRLFDEYGSPSTAGDISYIDYLFLGDYVDRGQHSLETISLLLALKVEYQHNVHLIRGNHEAADINALFGFRIECIERMGERDGIWVWHRINRLFNWLPLAASIEKKIICMHGGIGRSINHVEQIENIQRPITMEAGSIVLMDLLWSDPTENDSVEGLRPNARGPGLVTFGPDRVMEFCNNNDLQLIVRAHECVMDGFERFAQGHLITLFSATNYCGTANNAGAILVLGRDLVVVPKLIHPLPPALSSPETSPERHIEDTWMQELNANRPATPTRGRPQNSNDRGGSLAWM

SEQ ID NO: 73838 - protein, 1012 aa, Arabidopsis thaliana
  peptide (1)..(1012): Ceres Seq. ID no. 4982777
  misc_feature (707)..(916): Pfam Name: Calcineurin-like phosphoesterase Pfam Description: Calcineurin-like phosphoesterase
  misc_feature (514)..(1012): Homolog of NCBI NO: 30679350 NR Description: phospho-ser/thr phosphatase -related [Arabidopsis
  misc_feature (79)..(528): Homolog of NCBI NO: 30679350 NR Description: phospho-ser/thr phosphatase -related [Arabidopsis
  misc_feature (514)..(1012): Homolog of NCBI NO: 22022522 NR Description: AT4g03080/T4I9_4 [Arabidopsis thaliana]
  misc_feature (79)..(528): Homolog of NCBI NO: 22022522 NR Description: AT4g03080/T4I9_4 [Arabidopsis thaliana]
  misc_feature (514)..(1012): Homolog of NCBI NO: 7488152 NR Description: probable phosphoprotein phosphatase (EC 3.1.3.16)
  misc_feature (79)..(498): Homolog of NCBI NO: 7488152 NR Description: probable phosphoprotein phosphatase (EC 3.1.3.16)
  misc_feature (659)..(990): Homolog of NCBI NO: 25513447 NR Description: probable phosphoprotein phosphatase (EC 3.1.3.16)
  misc_feature (26)..(272): Homolog of NCBI NO: 25513447 NR Description: probable phosphoprotein phosphatase (EC 3.1.3.16)
  misc_feature (570)..(623): Homolog of NCBI NO: 25513447 NR Description: probable phosphoprotein phosphatase (EC 3.1.3.16)
  misc_feature (201)..(402): Homolog of NCBI NO: 25513447 NR Description: probable phosphoprotein phosphatase (EC 3.1.3.16)
MVADNDQDREFQSLDGGQSPSPMERETPQQMNDQSPPPEGGSVPTPPPSDPNPATSQQQAAAVVGQEQQPALVVGPRCAPTYSVVDAMMDKKEDGPGPRCGHTLTAVPAVGDEGTPGYIGPRLVLFGGATALEGNSGGTGTPTSAGSAGIRLAGATADVHCYDVLSNKWTRLTPFGEPPTPRAAHVATAVGTMVVIQGGIGPAGLSAEDLHVLDLTQQRPRWHRVVVQGPGPGPRYGHVMALVGQRYLMAIGGNDGKRPLADVWALDTAAKPYEWRKLEPEGEGPPPCMYATASARSDGLLLLCGGRDANSVPLASAYGLAKHRDGRWEWAIAPGVSPSSRYQHAAVFVNARLHVSGGALGGGRMVEDSSSVAVLDTAAGVWCDTKSVVTSPRTGRYSADAAGGDASVELTRRCRHAAAAVGDLIFIYGGLRGGVLLDDLLVAEDLAAAETTYAASHAAAAAATNSPPGRLPGRYGFSDERNRELSESAADGAVVLGSPVAPPVNGDMHTDISPENALLPGTRRTNKGVEYLVEASAAEAEAISATLAAAKARQVNGEVELPDRDCGAEATPSGKPTFSLIKPDSMGSMSVTPAGIRLHHRAVVVAAETGGALGGMVRQLSIDQFENEGRRVSYGTPESATAARKLLDRQMSINSVPKKVIAHLLKPRGWKPPVRRQFFLDCNEIADLCDSAERIFASEPTVLQLKAPIKIFGDLHGQFGDLMRLFDEYGSPSTAGDISYIDYLFLGDYVDRGQHSLETISLLLALKVEYQHNVHLIRGNHEAADINALFGFRIECIERMGERDGIWVWHRINRLFNWLPLAASIEKKIICMHGGIGRSINHVEQIENIQRPITMEAGSIVLMDLLWSDPTENDSVEGLRPNARGPGLVTFGPDRVMEFCNNNDLQLIVRAHECVMDGFERFAQGHLITLFSATNYCGTANNAGAILVLGRDLVVVPKLIHPLPPALSSPETSPERHIEDTWMQELNANRPATPTRGRPQNSNDRGGSLAWM

SEQ ID NO: 73839 - protein, 990 aa, Arabidopsis thaliana
  peptide (1)..(990): Ceres Seq. ID no. 4982778
  misc_feature (685)..(894): Pfam Name: Calcineurin-like phosphoesterase Pfam Description: Calcineurin-like phosphoesterase
  misc_feature (492)..(990): Homolog of NCBI NO: 30679350 NR Description: phospho-ser/thr phosphatase -related [Arabidopsis
  misc_feature (57)..(506): Homolog of NCBI NO: 30679350 NR Description: phospho-ser/thr phosphatase -related [Arabidopsis
  misc_feature (492)..(990): Homolog of NCBI NO: 22022522 NR Description: AT4g03080/T4I9_4 [Arabidopsis thaliana]
  misc_feature (57)..(506): Homolog of NCBI NO: 22022522 NR Description: AT4g03080/T4I9_4 [Arabidopsis thaliana]
  misc_feature (492)..(990): Homolog of NCBI NO: 7488152 NR Description: probable phosphoprotein phosphatase (EC 3.1.3.16)
  misc_feature (57)..(476): Homolog of NCBI NO: 7488152 NR Description: probable phosphoprotein phosphatase (EC 3.1.3.16)
  misc_feature (637)..(968): Homolog of NCBI NO: 25513447 NR Description: probable phosphoprotein phosphatase (EC 3.1.3.16)
  misc_feature (4)..(250): Homolog of NCBI NO: 25513447 NR Description: probable phosphoprotein phosphatase (EC 3.1.3.16)
  misc_feature (548)..(601): Homolog of NCBI NO: 25513447 NR Description: probable phosphoprotein phosphatase (EC 3.1.3.16)
  misc_feature (179)..(380): Homolog of NCBI NO: 25513447 NR Description: probable phosphoprotein phosphatase (EC 3.1.3.16)
MERETPQQMNDQSPPPEGGSVPTPPPSDPNPATSQQQAAAVVGQEQQPALVVGPRCAPTYSVVDAMMDKKEDGPGPRCGHTLTAVPAVGDEGTPGYIGPRLVLFGGATALEGNSGGTGTPTSAGSAGIRLAGATADVHCYDVLSNKWTRLTPFGEPPTPRAAHVATAVGTMVVIQGGIGPAGLSAEDLHVLDLTQQRPRWHRVVVQGPGPGPRYGHVMALVGQRYLMAIGGNDGKRPLADVWALDTAAKPYEWRKLEPEGEGPPPCMYATASARSDGLLLLCGGRDANSVPLASAYGLAKHRDGRWEWAIAPGVSPSSRYQHAAVFVNARLHVSGGALGGGRMVEDSSSVAVLDTAAGVWCDTKSVVTSPRTGRYSADAAGGDASVELTRRCRHAAAAVGDLIFIYGGLRGGVLLDDLLVAEDLAAAETTYAASHAAAAAATNSPPGRLPGRYGFSDERNRELSESAADGAVVLGSPVAPPVNGDMHTDISPENALLPGTRRTNKGVEYLVEASAAEAEAISATLAAAKARQVNGEVELPDRDCGAEATPSGKPTFSLIKPDSMGSMSVTPAGIRLHHRAVVVAAETGGALGGMVRQLSIDQFENEGRRVSYGTPESATAARKLLDRQMSINSVPKKVIAHLLKPRGWKPPVRRQFFLDCNEIADLCDSAERIFASEPTVLQLKAPIKIFGDLHGQFGDLMRLFDEYGSPSTAGDISYIDYLFLGDYVDRGQHSLETISLLLALKVEYQHNVHLIRGNHEAADINALFGFRIECIERMGERDGIWVWHRINRLFNWLPLAASIEKKIICMHGGIGRSINHVEQIENIQRPITMEAGSIVLMDLLWSDPTENDSVEGLRPNARGPGLVTFGPDRVMEFCNNNDLQLIVRAHECVMDGFERFAQGHLITLFSATNYCGTANNAGAILVLGRDLVVVPKLIHPLPPALSSPETSPERHIEDTWMQELNANRPATPTRGRPQNSNDRGGSLAWM

SEQ ID NO: 73840 - DNA, 3000 bp, Arabidopsis thaliana
  misc_feature (1)..(3000): Ceres Seq. ID no. 4982946
  misc_feature: MA Experiment ID: 20000180 Result: Down-regulated in Transcription
  misc_feature: MA Experiment 20000180 PARAMETER Experiment Name: At_Germinating_Seeds_P Parameter: Age (hr) Value: 24 vs. 0
  misc_feature: MA Experiment 20000180 PARAMETER Experiment Name: At_Germinating_Seeds_P Parameter: Tissue Value: Germinating Seeds
  misc_feature: MA Experiment ID: 20000227 Result: Up-regulated in Transcription
  misc_feature: MA Experiment 20000227 PARAMETER Experiment Name: At_Root-Tips-vs-Tops_P Parameter: Tissue Value: Root Tips vs. Root Tops
  misc_feature: MA Experiment ID: 20000439 Result: Down-regulated in Transcription
  misc_feature: MA Experiment 20000439 PARAMETER Experiment Name: At_Roots__P Parameter: Age (day) Value: 14 vs. 21
  misc_feature: MA Experiment 20000439 PARAMETER Experiment Name: At_Roots__P Parameter: Organism Value: A. thaliana
  misc_feature: MA Experiment 20000439 PARAMETER Experiment Name: At_Roots__P Parameter: Tissue Value: Roots vs. Whole Plant
  misc_feature: MA Experiment ID: 20001247 Result: Down-regulated in Transcription
  misc_feature: MA Experiment 20001247 PARAMETER Experiment Name: At_Far-red-induction_P Parameter: Age (day) Value: 7
  misc_feature: MA Experiment 20001247 PARAMETER Experiment Name: At_Far-red-induction_P Parameter: Light Value: Far-red vs. White
  misc_feature: MA Experiment 20001247 PARAMETER Experiment Name: At_Far-red-induction_P Parameter: Organism Value: A. thaliana
  misc_feature: MA Experiment 20001247 PARAMETER Experiment Name: At_Far-red-induction_P Parameter: Plant Line Value: Columbia
  misc_feature: MA Experiment 20001247 PARAMETER Experiment Name: At_Far-red-induction_P Parameter: Timepoint (hr) Value: 1
  misc_feature: MA Experiment 20001247 PARAMETER Experiment Name: At_Far-red-induction_P Parameter: Tissue Value: Whole Plant
  misc_feature: MA Experiment ID: 20001557 Result: Up-regulated in Transcription
  misc_feature: MA Experiment 20001557 PARAMETER Experiment Name: At_Drought_Soil_Dry_P Parameter: Age (day) Value: 27
  misc_feature: MA Experiment 20001557 PARAMETER Experiment Name: At_Drought_Soil_Dry_P Parameter: Organism Value: A. thaliana
  misc_feature: MA Experiment 20001557 PARAMETER Experiment Name: At_Drought_Soil_Dry_P Parameter: Plant Line Value: WS
  misc_feature: MA Experiment 20001557 PARAMETER Experiment Name: At_Drought_Soil_Dry_P Parameter: Post Timepoint (hr) Value: 3
  misc_feature: MA Experiment 20001557 PARAMETER Experiment Name: At_Drought_Soil_Dry_P Parameter: Post-Treatment Value: Re-Water vs. No Drought
  misc_feature: MA Experiment 20001557 PARAMETER Experiment Name: At_Drought_Soil_Dry_P Parameter: Timepoint (day) Value: 13
  misc_feature: MA Experiment 20001557 PARAMETER Experiment Name: At_Drought_Soil_Dry_P Parameter: Treatment Value: Drought vs. No Drought
atgaactccaatctgctatcgaatcctatatcatcggaggtcttcacctccattgatttgggaacaaattctttcaagcttctaatagtccaagctgagccttccggtagatctttcgttccaatcgagagactcaaagagccagtggtgttgtctcgtgaatctccaacctcaatttcgtctcaatctcaggctcgcgcgcttcaatctctacggaaattcaaaagtttaattctctcgcaccacgtctctggtgataggatccgatgcgttgcaacggaagccttacggcgagccgagaatcaggaagagttcgtggatgcggtttttgaggatgttgggcttaaggtcgatgtgctttctggtgaagaggaagccaggttagtttatttaggcgtgcttcagtttttacctgtgtttgagaaatcagtgttgtgtgttgatattggaggtggttctactgaatttgtggttggtaagtgtggtgatgtcaagcttgctgtttctttaaagctaggtcacgtgaatttgacgcagatgtttatgaaaaatggtattggattgaaggaaatgagagactatattcgtcatgcgattgatgagtctaggttagcagaaaaattgaatgaatcagatggttttgaggttgttgtgggatcttctggaactatacgagctattgagaatgcagttttcagtggctatggagctgatttgtgtgatttcaatttggaagggtataagagggactggagatttggtacaagagagctgagcagcgttgtagcaaagctatgcagtgaaggagacgaagagctgattcgaagggagggatttttcaagagaagatcagagttcattgttgctggggctgtattgttggaggaaatattcaaggctcttggcatagaggacatggaggtctcagagtatgcattggcagagggtgtgattgctgattctctggccaaagcttttgatggatcatatgatttaaatgctaatgcaagatggcgatcggtcatgaggcttgccacgcgtttcagtggtaaaaagcgaatgactcatgcgatacactgtgccaagattgcaaaggttatcttagacgataaagatcttgagtatctcgaagctgcttgtttcttgcacaatatcggaatcatcacagggaaaaagggttatcataagcaatcttatcatatcatcaagaatggggatcatctccacagctacactgctgaggaaatcgagcttatagctatgcttgtgagataccaaagaaaaaagtttcccaagcttgatcgtgcacctcttaagggcttcactggggaggcaaagcgaaaattcataattttgtgtttgattacacgattatcagttacacttcaacggaatgagaatatggatctccaagaagttgaatttattgaatcttccgagatcttcaaactcgtgctgaaaagacaacaccaggaaccggtagaggttggttgtcaagatcaagtaaacaaaaactctgatgaatcacaactggagaaagaagttgagcattttaaaaggagagttgttggtttctttcctggagttttccgttgtccaatttgtgaagtcgaaaatgtcagttttaaaccagaaactgatggtaaaactatgattgtacgcagattgaattggtgtaatgaaaagagatttgactccatgttaacttttcccactggatgtgtgcatttgggttataagcagatgttgaaacggttgccttcgaatcaaggtcatctacacatgactgcaggaccaaaatctttatctttcttctcttccatgaaaagccggggaatttgggctgacgagtatacttacgcgcctttgctcaaatcctgttcgtctctttctgatttgcgatttgggaaatgcgttcatggtgagcttataagaactgggttccaccgtcttgggaaaattaggattggggtggtggagctttatacttccggtgggagaatgggtgatgcacagaaagtgttcgacgaaatgtctgagagaaacgttgtcgtctggaatcttatgattcgcgggttctgtgactccggggacgttgaaagaggtcttcatttgttcaaacagatgagcgaaagaagcattgtgtcgtggaattcgatgatatctagcttgtctaaatgtggtagagatcgtgaggctttggagcttttctgcgaaatgattgatcaaggttttgaccctgatgaggcgactgtggttacagtcttgccaatttctgcatctctaggagtgttggataccggaaaatggattcattctaccgcagaatccagtggtttgtttaaagatttcatcaccgtgggaaacgctttggtagatttctactgcaaaagcggcgacttggaggcagcaacggctatatttagaaaaatgcagcgtagaaacgttgtttcatggaacacattgatatcgggatcagccgtaaacggaaagggagaatttgggatagacttgtttgatgctatgatagaggaagggaaagtagctccaaatgaagcgacatttttgggggttttggcatgttgctcatacacaggtcaggtggagagaggagaggaattgtttggtttgatgatggaaagattcaaacttgaggcgagaaccgagcattacggtgccatggtagatctaatgagtagaagtgggagaatcacagaggcgtttaagtttctaaaaaatatgcccgtaaacgcaaatgcggcaatgtgggggtcgctgctcagtgcttgtcgtagccacggagatgtaaagctagcagaagttgcagcaatggagttagtgaagattgagccagggaattcggggaattatgtgttgttatctaatttgtatgcagaggaagggagatggcaagatgtggagaaggtacgaacgttgatgaaaaagaaccgccttagaaagtctactggccaaagcaccatttgcgatgtttcagtctga

SEQ ID NO: 73841 - protein, 999 aa, Arabidopsis thaliana
  peptide (1)..(999): Ceres Seq. ID no. 4982947
  misc_feature (28)..(325): Pfam Name: Ppx/GppA phosphatase family Pfam Description: Ppx/GppA phosphatase family
  misc_feature (1)..(428): Homolog of NCBI NO: 25402524 NR Description: hypothetical protein [imported] - Arabidopsis >gi|3249102|gb|AAC24085.1| Similar to exopolyphosphatase
  misc_feature (598)..(999): Homolog of NCBI NO: 25402522 NR Description: hypothetical protein [imported] - Arabidopsis
  misc_feature (611)..(994): Homolog of NCBI NO: 15241180 NR Description: putative protein; protein id: At5g56310.1 thaliana] >gi|10177829|dbj|BAB11258.1|
  misc_feature (365)..(527): Homolog of NCBI NO: 25402524 NR Description: hypothetical protein [imported] - Arabidopsis >gi|3249102|gb|AAC24085.1| Similar to exopolyphosphatase
  misc_feature (616)..(994): Homolog of NCBI NO: 15225375 NR Description: unknown protein; protein id: At2g20540.1
  misc_feature (600)..(994): Homolog of NCBI NO: 9279687 NR Description: gb|AAC35225.1~gene_id:MWI23.6~strong similarity
  misc_feature (600)..(994): Homolog of NCBI NO: 15228829 NR Description: hypothetical protein; protein id: At3g22690.1
  misc_feature (600)..(997): Homolog of NCBI NO: 15229345 NR Description: hypothetical protein; protein id: At3g04750.1 thaliana] >gi|6175175|gb|AAF04901.1|AC011437_16 hypothetical
  misc_feature (600)..(999): Homolog of NCBI NO: 15241651 NR Description: putative protein; protein id: At5g08510.1 thaliana] >gi|9759345|dbj|BAB10000.1|
  misc_feature (639)..(997): Homolog of NCBI NO: 34902972 NR Description: unnamed protein product [Oryza sativa (japonica group)] >gi|9558518|dbj|BAB03436.1| unnamed protein product
MNSNLLSNPISSEVFTSIDLGTNSFKLLIVQAEPSGRSFVPIERLKEPVVLSRESPTSISSQSQARALQSLRKFKSLILSHHVSGDRIRCVATEALRRAENQEEFVDAVFEDVGLKVDVLSGEEEARLVYLGVLQFLPVFEKSVLCVDIGGGSTEFVVGKCGDVKLAVSLKLGHVNLTQMFMKNGIGLKEMRDYIRHAIDESRLAEKLNESDGFEVVVGSSGTIRAIENAVFSGYGADLCDFNLEGYKRDWRFGTRELSSVVAKLCSEGDEELIRREGFFKRRSEFIVAGAVLLEEIFKALGIEDMEVSEYALAEGVIADSLAKAFDGSYDLNANARWRSVMRLATRFSGKKRMTHAIHCAKIAKVILDDKDLEYLEAACFLHNIGIITGKKGYHKQSYHIIKNGDHLHSYTAEEIELIAMLVRYQRKKFPKLDRAPLKGFTGEAKRKFIILCLITRLSVTLQRNENMDLQEVEFIESSEIFKLVLKRQHQEPVEVGCQDQVNKNSDESQLEKEVEHFKRRVVGFFPGVFRCPICEVENVSFKPETDGKTMIVRRLNWCNEKRFDSMLTFPTGCVHLGYKQMLKRLPSNQGHLHMTAGPKSLSFFSSMKSRGIWADEYTYAPLLKSCSSLSDLRFGKCVHGELIRTGFHRLGKIRIGVVELYTSGGRMGDAQKVFDEMSERNVVVWNLMIRGFCDSGDVERGLHLFKQMSERSIVSWNSMISSLSKCGRDREALELFCEMIDQGFDPDEATVVTVLPISASLGVLDTGKWIHSTAESSGLFKDFITVGNALVDFYCKSGDLEAATAIFRKMQRRNVVSWNTLISGSAVNGKGEFGIDLFDAMIEEGKVAPNEATFLGVLACCSYTGQVERGEELFGLMMERFKLEARTEHYGAMVDLMSRSGRITEAFKFLKNMPVNANAAMWGSLLSACRSHGDVKLAEVAAMELVKIEPGNSGNYVLLSNLYAEEGRWQDVEKVRTLMKKNRLRKSTGQSTICDVSV

SEQ ID NO: 73842 - protein, 820 aa, Arabidopsis thaliana
  peptide (1)..(820): Ceres Seq. ID no. 4982948
  misc_feature (1)..(146): Pfam Name: Ppx/GppA phosphatase family Pfam Description: Ppx/GppA phosphatase family
  misc_feature (1)..(249): Homolog of NCBI NO: 25402524 NR Description: hypothetical protein [imported] - Arabidopsis >gi|3249102|gb|AAC24085.1| Similar to exopolyphosphatase
  misc_feature (419)..(820): Homolog of NCBI NO: 25402522 NR Description: hypothetical protein [imported] - Arabidopsis
  misc_feature (432)..(815): Homolog of NCBI NO: 15241180 NR Description: putative protein; protein id: At5g56310.1 thaliana] >gi|10177829|dbj|BAB11258.1|
  misc_feature (186)..(348): Homolog of NCBI NO: 25402524 NR Description: hypothetical protein [imported] - Arabidopsis >gi|3249102|gb|AAC24085.1| Similar to exopolyphosphatase
  misc_feature (437)..(815): Homolog of NCBI NO: 15225375 NR Description: unknown protein; protein id: At2g20540.1
  misc_feature (421)..(815): Homolog of NCBI NO: 9279687 NR Description: gb|AAC35225.1~gene_id:MWI23.6~strong similarity
  misc_feature (421)..(815): Homolog of NCBI NO: 15228829 NR Description: hypothetical protein; protein id: At3g22690.1
  misc_feature (421)..(818): Homolog of NCBI NO: 15229345 NR Description: hypothetical protein; protein id: At3g04750.1 thaliana] >gi|6175175|gb|AAF04901.1|AC011437_16 hypothetical
  misc_feature (421)..(820): Homolog of NCBI NO: 15241651 NR Description: putative protein; protein id: At5g08510.1 thaliana] >gi|9759345|dbj|BAB10000.1|
  misc_feature (460)..(818): Homolog of NCBI NO: 34902972 NR Description: unnamed protein product [Oryza sativa (japonica group)] >gi|9558518|dbj|BAB03436.1| unnamed protein product
MFMKNGIGLKEMRDYIRHAIDESRLAEKLNESDGFEVVVGSSGTIRAIENAVFSGYGADLCDFNLEGYKRDWRFGTRELSSVVAKLCSEGDEELIRREGFFKRRSEFIVAGAVLLEEIFKALGIEDMEVSEYALAEGVIADSLAKAFDGSYDLNANARWRSVMRLATRFSGKKRMTHAIHCAKIAKVILDDKDLEYLEAACFLHNIGIITGKKGYHKQSYHIIKNGDHLHSYTAEEIELIAMLVRYQRKKFPKLDRAPLKGFTGEAKRKFIILCLITRLSVTLQRNENMDLQEVEFIESSEIFKLVLKRQHQEPVEVGCQDQVNKNSDESQLEKEVEHFKRRVVGFFPGVFRCPICEVENVSFKPETDGKTMIVRRLNWCNEKRFDSMLTFPTGCVHLGYKQMLKRLPSNQGHLHMTAGPKSLSFFSSMKSRGIWADEYTYAPLLKSCSSLSDLRFGKCVHGELIRTGFHRLGKIRIGVVELYTSGGRMGDAQKVFDEMSERNVVVWNLMIRGFCDSGDVERGLHLFKQMSERSIVSWNSMISSLSKCGRDREALELFCEMIDQGFDPDEATVVTVLPISASLGVLDTGKWIHSTAESSGLFKDFITVGNALVDFYCKSGDLEAATAIFRKMQRRNVVSWNTLISGSAVNGKGEFGIDLFDAMIEEGKVAPNEATFLGVLACCSYTGQVERGEELFGLMMERFKLEARTEHYGAMVDLMSRSGRITEAFKFLKNMPVNANAAMWGSLLSACRSHGDVKLAEVAAMELVKIEPGNSGNYVLLSNLYAEEGRWQDVEKVRTLMKKNRLRKSTGQSTICDVSV

SEQ ID NO: 73843 - protein, 818 aa, Arabidopsis thaliana
  peptide (1)..(818): Ceres Seq. ID no. 4982949
  misc_feature (1)..(144): Pfam Name: Ppx/GppA phosphatase family Pfam Description: Ppx/GppA phosphatase family
  misc_feature (1)..(247): Homolog of NCBI NO: 25402524 NR Description: hypothetical protein [imported] - Arabidopsis >gi|3249102|gb|AAC24085.1| Similar to exopolyphosphatase
  misc_feature (417)..(818): Homolog of NCBI NO: 25402522 NR Description: hypothetical protein [imported] - Arabidopsis
  misc_feature (430)..(813): Homolog of NCBI NO: 15241180 NR Description: putative protein; protein id: At5g56310.1 thaliana] >gi|10177829|dbj|BAB11258.1|
  misc_feature (184)..(346): Homolog of NCBI NO: 25402524 NR Description: hypothetical protein [imported] - Arabidopsis >gi|3249102|gb|AAC24085.1| Similar to exopolyphosphatase
  misc_feature (435)..(813): Homolog of NCBI NO: 15225375 NR Description: unknown protein; protein id: At2g20540.1
  misc_feature (419)..(813): Homolog of NCBI NO: 9279687 NR Description: gb|AAC35225.1~gene_id:MWI23.6~strong similarity
  misc_feature (419)..(813): Homolog of NCBI NO: 15228829 NR Description: hypothetical protein; protein id: At3g22690.1
  misc_feature (419)..(816): Homolog of NCBI NO: 15229345 NR Description: hypothetical protein; protein id: At3g04750.1 thaliana] >gi|6175175|gb|AAF04901.1|AC011437_16 hypothetical
  misc_feature (419)..(818): Homolog of NCBI NO: 15241651 NR Description: putative protein; protein id: At5g08510.1 thaliana] >gi|9759345|dbj|BAB10000.1|
  misc_feature (458)..(816): Homolog of NCBI NO: 34902972 NR Description: unnamed protein product [Oryza sativa (japonica group)] >gi|9558518|dbj|BAB03436.1| unnamed protein product
MKNGIGLKEMRDYIRHAIDESRLAEKLNESDGFEVVVGSSGTIRAIENAVFSGYGADLCDFNLEGYKRDWRFGTRELSSVVAKLCSEGDEELIRREGFFKRRSEFIVAGAVLLEEIFKALGIEDMEVSEYALAEGVIADSLAKAFDGSYDLNANARWRSVMRLATRFSGKKRMTHAIHCAKIAKVILDDKDLEYLEAACFLHNIGIITGKKGYHKQSYHIIKNGDHLHSYTAEEIELIAMLVRYQRKKFPKLDRAPLKGFTGEAKRKFIILCLITRLSVTLQRNENMDLQEVEFIESSEIFKLVLKRQHQEPVEVGCQDQVNKNSDESQLEKEVEHFKRRVVGFFPGVFRCPICEVENVSFKPETDGKTMIVRRLNWCNEKRFDSMLTFPTGCVHLGYKQMLKRLPSNQGHLHMTAGPKSLSFFSSMKSRGIWADEYTYAPLLKSCSSLSDLRFGKCVHGELIRTGFHRLGKIRIGVVELYTSGGRMGDAQKVFDEMSERNVVVWNLMIRGFCDSGDVERGLHLFKQMSERSIVSWNSMISSLSKCGRDREALELFCEMIDQGFDPDEATVVTVLPISASLGVLDTGKWIHSTAESSGLFKDFITVGNALVDFYCKSGDLEAATAIFRKMQRRNVVSWNTLISGSAVNGKGEFGIDLFDAMIEEGKVAPNEATFLGVLACCSYTGQVERGEELFGLMMERFKLEARTEHYGAMVDLMSRSGRITEAFKFLKNMPVNANAAMWGSLLSACRSHGDVKLAEVAAMELVKIEPGNSGNYVLLSNLYAEEGRWQDVEKVRTLMKKNRLRKSTGQSTICDVSV

SEQ ID NO: 73844 - DNA, 648 bp, Arabidopsis thaliana
  misc_feature (1)..(648): Ceres Seq. ID no. 4983157
  misc_feature: MA Experiment ID: 20000171 Result: Up-regulated in Transcription
  misc_feature: MA Experiment 20000171 PARAMETER Experiment Name: At_42deg_Heat_P Parameter: Age (day) Value: 14
  misc_feature: MA Experiment 20000171 PARAMETER Experiment Name: At_42deg_Heat_P Parameter: Organism Value: A. thaliana
  misc_feature: MA Experiment 20000171 PARAMETER Experiment Name: At_42deg_Heat_P Parameter: Plant Line Value: WS
  misc_feature: MA Experiment 20000171 PARAMETER Experiment Name: At_42deg_Heat_P Parameter: Temperature (deg C) Value: 42 vs. 22
  misc_feature: MA Experiment 20000171 PARAMETER Experiment Name: At_42deg_Heat_P Parameter: Timepoint (hr) Value: 1
  misc_feature: MA Experiment 20000171 PARAMETER Experiment Name: At_42deg_Heat_P Parameter: Tissue Value: Aerial
  misc_feature: MA Experiment ID: 20000185 Result: Up-regulated in Transcription
  misc_feature: MA Experiment 20000185 PARAMETER Experiment Name: At_Roots__P Parameter: Age (day) Value: 7 vs. 21
  misc_feature: MA Experiment 20000185 PARAMETER Experiment Name: At_Roots__P Parameter: Organism Value: A. thaliana
  misc_feature: MA Experiment 20000185 PARAMETER Experiment Name: At_Roots__P Parameter: Tissue Value: Roots vs. Whole Plant
  misc_feature: MA Experiment ID: 20000234 Result: Up-regulated in Transcription
  misc_feature: MA Experiment 20000234 PARAMETER Experiment Name: At_Siliques_P Parameter: Age (day) Value: 21
  misc_feature: MA Experiment 20000234 PARAMETER Experiment Name: At_Siliques_P Parameter: Organism Value: A. thaliana
  misc_feature: MA Experiment 20000234 PARAMETER Experiment Name: At_Siliques_P Parameter: Plant Line Value: WS
  misc_feature: MA Experiment 20000234 PARAMETER Experiment Name: At_Siliques_P Parameter: Tissue Value: Less Than 5mm Siliques vs. Whole Plant
  misc_feature: MA Experiment ID: 20000235 Result: Up-regulated in Transcription
  misc_feature: MA Experiment 20000235 PARAMETER Experiment Name: At_Siliques_P Parameter: Age (day) Value: 21
  misc_feature: MA Experiment 20000235 PARAMETER Experiment Name: At_Siliques_P Parameter: Organism Value: A. thaliana
  misc_feature: MA Experiment 20000235 PARAMETER Experiment Name: At_Siliques_P Parameter: Plant Line Value: WS
  misc_feature: MA Experiment 20000235 PARAMETER Experiment Name: At_Siliques_P Parameter: Tissue Value: 5-10mm Siliques vs. Whole Plant
  misc_feature: MA Experiment ID: 20000439 Result: Up-regulated in Transcription
  misc_feature: MA Experiment 20000439 PARAMETER Experiment Name: At_Roots__P Parameter: Age (day) Value: 14 vs. 21
  misc_feature: MA Experiment 20000439 PARAMETER Experiment Name: At_Roots__P Parameter: Organism Value: A. thaliana
  misc_feature: MA Experiment 20000439 PARAMETER Experiment Name: At_Roots__P Parameter: Tissue Value: Roots vs. Whole Plant
  misc_feature: MA Experiment ID: 20000441 Result: Down-regulated in Transcription
  misc_feature: MA Experiment 20000441 PARAMETER Experiment Name: At_1uM_BR-BRZ__P Parameter: Tissue Value: Shoot Apices
  misc_feature: MA Experiment 20000441 PARAMETER Experiment Name: At_1uM_BR-BRZ__P Parameter: Treatment Value: 1uM BR vs. No Treatment
atgccggaaaagatcgattacgtgttcaaggtggtggtcattggagattctgctgtcgggaaaacgcagctcctctcacgttttacacacaacgagttctgttatgattcaaaatcaaccattggtgtcgagtttcagacacggaccatcactcttcggggcaaactcgtcaaagctcagatctgggacaccgccggtcaagagagagcggtgactagcgcctactacagaggtgcgttaggtgcgatggtggtttacgacattaccaaacgcctctcattcgaccacgttgcacgttgggtcgaggaattacgtgctcacgccgatgattccgccgtgatcatgctcgtcggaaacaaagccgatctctccgttggtaaacgtgccgttcctacggaggatgcagtcgaattcgccgagactcaacggctttttttctcggaagtctcggctctaagcggcggaaacgtcgacgaagcttttttccgtttactcgaggagattttcagccgcgttgttgtttcgagaaaagctatggaatccgacggtggagccaccgtgaaacttgacggttcgagaattgatgtcatctctggttcggatcttgagactagtaatatcaaggaacaagcttcgtgctcgtgttga

SEQ ID NO: 73845 - protein, 215 aa, Arabidopsis thaliana
  peptide (1)..(215): Ceres Seq. ID no. 4983158
  misc_feature (10)..(170): Pfam Name: Ras family Pfam Description: Ras family
  misc_feature (1)..(215): Homolog of NCBI NO: 30677910 NR Description: GTP-binding protein, putative [Arabidopsis
  misc_feature (1)..(215): Homolog of NCBI NO: 7438429 NR Description: GTP-binding protein - garden pea (fragment)
  misc_feature (1)..(215): Homolog of NCBI NO: 5926718 NR Description: PRA2 [Pisum sativum]
  misc_feature (3)..(215): Homolog of NCBI NO: 1370144 NR Description: RAB11B [Lotus japonicus]
  misc_feature (3)..(198): Homolog of NCBI NO: 12322015 NR Description: ras-related GTP-binding protein, putative;
  misc_feature (3)..(204): Homolog of NCBI NO: 15238852 NR Description: Ras-related GTP-binding protein, putative; id: At5g47960.1, supported by cDNA: gi_12004622 [Arabidopsis
  misc_feature (3)..(198): Homolog of NCBI NO: 15230422 NR Description: ras-related GTP-binding protein, putative;
  misc_feature (3)..(214): Homolog of NCBI NO: 15238392 NR Description: GTP-binding protein, putative; protein id: supported by cDNA: 30437., supported by cDNA: gi_15028288,
  misc_feature (4)..(199): Homolog of NCBI NO: 3024500 NR Description: RAS-RELATED PROTEIN RAB11A
  misc_feature (3)..(182): Homolog of NCBI NO: 30584069 NR Description: Homo sapiens RAB11A, member RAS oncogene family
MPEKIDYVFKVVVIGDSAVGKTQLLSRFTHNEFCYDSKSTIGVEFQTRTITLRGKLVKAQIWDTAGQERAVTSAYYRGALGAMVVYDITKRLSFDHVARWVEELRAHADDSAVIMLVGNKADLSVGKRAVPTEDAVEFAETQRLFFSEVSALSGGNVDEAFFRLLEEIFSRVVVSRKAMESDGGATVKLDGSRIDVISGSDLETSNIKEQASCSC

SEQ ID NO: 73846 - protein, 133 aa, Arabidopsis thaliana
  peptide (1)..(133): Ceres Seq. ID no. 4983159
  misc_feature (1)..(88): Pfam Name: Ras family Pfam Description: Ras family
  misc_feature (1)..(133): Homolog of NCBI NO: 30677910 NR Description: GTP-binding protein, putative [Arabidopsis
  misc_feature (1)..(133): Homolog of NCBI NO: 7438429 NR Description: GTP-binding protein - garden pea (fragment)
  misc_feature (1)..(133): Homolog of NCBI NO: 5926718 NR Description: PRA2 [Pisum sativum]
  misc_feature (1)..(133): Homolog of NCBI NO: 1370144 NR Description: RAB11B [Lotus japonicus]
  misc_feature (1)..(116): Homolog of NCBI NO: 12322015 NR Description: ras-related GTP-binding protein, putative;
  misc_feature (1)..(122): Homolog of NCBI NO: 15238852 NR Description: Ras-related GTP-binding protein, putative; id: At5g47960.1, supported by cDNA: gi_12004622 [Arabidopsis
  misc_feature (1)..(116): Homolog of NCBI NO: 15230422 NR Description: ras-related GTP-binding protein, putative;
  misc_feature (1)..(132): Homolog of NCBI NO: 15238392 NR Description: GTP-binding protein, putative; protein id: supported by cDNA: 30437., supported by cDNA: gi_15028288,
  misc_feature (1)..(117): Homolog of NCBI NO: 3024500 NR Description: RAS-RELATED PROTEIN RAB11A
  misc_feature (1)..(100): Homolog of NCBI NO: 30584069 NR Description: Homo sapiens RAB11A, member RAS oncogene family
MVVYDITKRLSFDHVARWVEELRAHADDSAVIMLVGNKADLSVGKRAVPTEDAVEFAETQRLFFSEVSALSGGNVDEAFFRLLEEIFSRVVVSRKAMESDGGATVKLDGSRIDVISGSDLETSNIKEQASCSC

SEQ ID NO: 73847 - DNA, 885 bp, Arabidopsis thaliana
  misc_feature (1)..(885): Ceres Seq. ID no. 4983181
  misc_feature: MA Experiment ID: 20000185 Result: Down-regulated in Transcription
  misc_feature: MA Experiment 20000185 PARAMETER Experiment Name: At_Roots__P Parameter: Age (day) Value: 7 vs. 21
  misc_feature: MA Experiment 20000185 PARAMETER Experiment Name: At_Roots__P Parameter: Organism Value: A. thaliana
  misc_feature: MA Experiment 20000185 PARAMETER Experiment Name: At_Roots__P Parameter: Tissue Value: Roots vs. Whole Plant
  misc_feature: MA Experiment ID: 20000234 Result: Up-regulated in Transcription
  misc_feature: MA Experiment 20000234 PARAMETER Experiment Name: At_Siliques_P Parameter: Age (day) Value: 21
  misc_feature: MA Experiment 20000234 PARAMETER Experiment Name: At_Siliques_P Parameter: Organism Value: A. thaliana
  misc_feature: MA Experiment 20000234 PARAMETER Experiment Name: At_Siliques_P Parameter: Plant Line Value: WS
  misc_feature: MA Experiment 20000234 PARAMETER Experiment Name: At_Siliques_P Parameter: Tissue Value: Less Than 5mm Siliques vs. Whole Plant
  misc_feature: MA Experiment ID: 20000264 Result: Up-regulated in Transcription
  misc_feature: MA Experiment 20000264 PARAMETER Experiment Name: At_Open_Flower_P Parameter: Age (day) Value: 21
  misc_feature: MA Experiment 20000264 PARAMETER Experiment Name: At_Open_Flower_P Parameter: Plant Line Value: WS
  misc_feature: MA Experiment 20000264 PARAMETER Experiment Name: At_Open_Flower_P Parameter: Tissue Value: Open Flower vs. Whole Plant
  misc_feature: MA Experiment ID: 20000265 Result: Up-regulated in Transcription
  misc_feature: MA Experiment 20000265 PARAMETER Experiment Name: At_Open_Flower_P Parameter: Age (day) Value: 21
  misc_feature: MA Experiment 20000265 PARAMETER Experiment Name: At_Open_Flower_P Parameter: Plant Line Value: WS
  misc_feature: MA Experiment 20000265 PARAMETER Experiment Name: At_Open_Flower_P Parameter: Tissue Value: Closed Flower vs. Whole Plant
  misc_feature: MA Experiment ID: 20000286 Result: Up-regulated in Transcription
  misc_feature: MA Experiment 20000286 PARAMETER Experiment Name: At_Open_Flower_P Parameter: Age (day) Value: 21
  misc_feature: MA Experiment 20000286 PARAMETER Experiment Name: At_Open_Flower_P Parameter: Plant Line Value: WS
  misc_feature: MA Experiment 20000286 PARAMETER Experiment Name: At_Open_Flower_P Parameter: Tissue Value: Half Open vs. Whole Plant
  misc_feature: MA Experiment ID: 20000438 Result: Down-regulated in Transcription
  misc_feature: MA Experiment 20000438 PARAMETER Experiment Name: At_Shoots__P Parameter: Age (day) Value: 14
  misc_feature: MA Experiment 20000438 PARAMETER Experiment Name: At_Shoots__P Parameter: Tissue Value: Shoots vs. Whole Plant
  misc_feature: MA Experiment ID: 20000439 Result: Down-regulated in Transcription
  misc_feature: MA Experiment 20000439 PARAMETER Experiment Name: At_Roots__P Parameter: Age (day) Value: 14 vs. 21
  misc_feature: MA Experiment 20000439 PARAMETER Experiment Name: At_Roots__P Parameter: Organism Value: A. thaliana
  misc_feature: MA Experiment 20000439 PARAMETER Experiment Name: At_Roots__P Parameter: Tissue Value: Roots vs. Whole Plant
  misc_feature: MA Experiment ID: 20000794 Result: Up-regulated in Transcription
  misc_feature: MA Experiment 20000794 PARAMETER Experiment Name: At_Petals_P Parameter: Age (day) Value: 23-25 days
  misc_feature: MA Experiment 20000794 PARAMETER Experiment Name: At_Petals_P Parameter: Plant Line Value: WS
  misc_feature: MA Experiment 20000794 PARAMETER Experiment Name: At_Petals_P Parameter: Tissue Value: Petals vs. Whole plant
  misc_feature: MA Experiment ID: 20001910 Result: Up-regulated in Transcription
  misc_feature: MA Experiment 20001910 PARAMETER Experiment Name: At_Drought_Reproduction_P Parameter: Age (day) Value: 37
  misc_feature: MA Experiment 20001910 PARAMETER Experiment Name: At_Drought_Reproduction_P Parameter: Organism Value: A. thaliana
  misc_feature: MA Experiment 20001910 PARAMETER Experiment Name: At_Drought_Reproduction_P Parameter: Plant Line Value: WS
  misc_feature: MA Experiment 20001910 PARAMETER Experiment Name: At_Drought_Reproduction_P Parameter: Timepoint (day) Value: 7
  misc_feature: MA Experiment 20001910 PARAMETER Experiment Name: At_Drought_Reproduction_P Parameter: Tissue Value: Flowers
  misc_feature: MA Experiment 20001910 PARAMETER Experiment Name: At_Drought_Reproduction_P Parameter: Treatment Value: Drought vs. No Drought
atgggaaagccaagaagcgtgtctccgaccatcttcctcctagtcatcctcttggtgaccgccggagagaagacggaggcgaagccatggtggaagaaagtcggagattccatcgggaatatagccggaggaataagaaatgcggttgggaattataaaccagtggagatgggattgtcgttaaaaggaggattttgtgtgagaaagcttctgtctttgaatacgaatgtgttcagtgaatggtgtatagctcttaatgatccaagagctcctatgtacatgaagattgagaatataccaagtgcgacgagtactcggcttctgttgtcaccaccttcgttcaccggaaaccgattctcgttcaggttcaggtggaggagaatacgacgtcgtaacagagtcaacagagcgagcagagagtttttaatcgcacataacctcgtaagagcgcgcgtgggagaaccaccgtttcaatgggacggaagattagcggcgtacgcgcgcacgtgggcgaatcagcgcgtgggtgattgtaggcttgttcactctaacgggccgtatggagaaaacatattttgggccggaaagaataactggagccccagagatattgttaatgtgtgggccgatgaggataaattctacgacgtgaaaggtaacacgtgtgagccgcaacacatgtgtgggcactacacgcagatcgtgtggagagatagtaccaaggtcggatgcgcaagtgtggattgttcgaacggcggcgtttatgcgatttgtgtttataacccaccgggaaattacgaaggtgaaaatccgtttggaagttatgatgatcagattggtcttgcccgggatgatccaccggcggtgatcggaggaatggcttga

SEQ ID NO: 73848 - protein, 294 aa, Arabidopsis thaliana
  peptide (1)..(294): Ceres Seq. ID no. 4983182
  misc_feature (142)..(259): Pfam Name: SCP-like extracellular protein Pfam Description: SCP-like extracellular protein
  misc_feature (1)..(294): Homolog of NCBI NO: 15223370 NR Description: pathogenesis related protein, putative; protein
  misc_feature (1)..(294): Homolog of NCBI NO: 25518458 NR Description: hypothetical protein F6F3.11 - Arabidopsis
  misc_feature (132)..(272): Homolog of NCBI NO: 15232719 NR Description: putative pathogenesis-related protein; protein At3g09590.1 [Arabidopsis thaliana]
  misc_feature (138)..(272): Homolog of NCBI NO: 15235992 NR Description: putative pathogenesis-related protein; protein id:
  misc_feature (127)..(272): Homolog of NCBI NO: 15241922 NR Description: pathogenesis related protein - like; protein id:
  misc_feature (138)..(272): Homolog of NCBI NO: 22327916 NR Description: similar to putative pathogenesis-related protein; id: At5g57625.1 [Arabidopsis thaliana]
  misc_feature (139)..(272): Homolog of NCBI NO: 100907 NR Description: pathogenesis-related protein 1 - maize
  misc_feature (139)..(272): Homolog of NCBI NO: 7442179 NR Description: pathogenesis related protein-1 - maize
  misc_feature (139)..(272): Homolog of NCBI NO: 3702665 NR Description: pathogenisis-related protein 1.2 [Triticum
  misc_feature (141)..(278): Homolog of NCBI NO: 17221641 NR Description: PR-1 [Solanum torvum]
MGKPRSVSPTIFLLVILLVTAGEKTEAKPWWKKVGDSIGNIAGGIRNAVGNYKPVEMGLSLKGGFCVRKLLSLNTNVFSEWCIALNDPRAPMYMKIENIPSATSTRLLLSPPSFTGNRFSFRFRWRRIRRRNRVNRASREFLIAHNLVRARVGEPPFQWDGRLAAYARTWANQRVGDCRLVHSNGPYGENIFWAGKNNWSPRDIVNVWADEDKFYDVKGNTCEPQHMCGHYTQIVWRDSTKVGCASVDCSNGGVYAICVYNPPGNYEGENPFGSYDDQIGLARDDPPAVIGGMA

SEQ ID NO: 73849 - protein, 238 aa, Arabidopsis thaliana
  peptide (1)..(238): Ceres Seq. ID no. 4983183
  misc_feature (86)..(203): Pfam Name: SCP-like extracellular protein Pfam Description: SCP-like extracellular protein
  misc_feature (1)..(238): Homolog of NCBI NO: 15223370 NR Description: pathogenesis related protein, putative; protein
  misc_feature (1)..(238): Homolog of NCBI NO: 25518458 NR Description: hypothetical protein F6F3.11 - Arabidopsis
  misc_feature (76)..(216): Homolog of NCBI NO: 15232719 NR Description: putative pathogenesis-related protein; protein At3g09590.1 [Arabidopsis thaliana]
  misc_feature (82)..(216): Homolog of NCBI NO: 15235992 NR Description: putative pathogenesis-related protein; protein id:
  misc_feature (71)..(216): Homolog of NCBI NO: 15241922 NR Description: pathogenesis related protein - like; protein id:
  misc_feature (82)..(216): Homolog of NCBI NO: 22327916 NR Description: similar to putative pathogenesis-related protein; id: At5g57625.1 [Arabidopsis thaliana]
  misc_feature (83)..(216): Homolog of NCBI NO: 100907 NR Description: pathogenesis-related protein 1 - maize
  misc_feature (83)..(216): Homolog of NCBI NO: 7442179 NR Description: pathogenesis related protein-1 - maize
  misc_feature (83)..(216): Homolog of NCBI NO: 3702665 NR Description: pathogenisis-related protein 1.2 [Triticum
  misc_feature (85)..(222): Homolog of NCBI NO: 17221641 NR Description: PR-1 [Solanum torvum]
MGLSLKGGFCVRKLLSLNTNVFSEWCIALNDPRAPMYMKIENIPSATSTRLLLSPPSFTGNRFSFRFRWRRIRRRNRVNRASREFLIAHNLVRARVGEPPFQWDGRLAAYARTWANQRVGDCRLVHSNGPYGENIFWAGKNNWSPRDIVNVWADEDKFYDVKGNTCEPQHMCGHYTQIVWRDSTKVGCASVDCSNGGVYAICVYNPPGNYEGENPFGSYDDQIGLARDDPPAVIGGMA

SEQ ID NO: 73850 - protein, 203 aa, Arabidopsis thaliana
  peptide (1)..(203): Ceres Seq. ID no. 4983184
  misc_feature (51)..(168): Pfam Name: SCP-like extracellular protein Pfam Description: SCP-like extracellular protein
  misc_feature (1)..(203): Homolog of NCBI NO: 15223370 NR Description: pathogenesis related protein, putative; protein
  misc_feature (1)..(203): Homolog of NCBI NO: 25518458 NR Description: hypothetical protein F6F3.11 - Arabidopsis
  misc_feature (41)..(181): Homolog of NCBI NO: 15232719 NR Description: putative pathogenesis-related protein; protein At3g09590.1 [Arabidopsis thaliana]
  misc_feature (47)..(181): Homolog of NCBI NO: 15235992 NR Description: putative pathogenesis-related protein; protein id:
  misc_feature (36)..(181): Homolog of NCBI NO: 15241922 NR Description: pathogenesis related protein - like; protein id:
  misc_feature (47)..(181): Homolog of NCBI NO: 22327916 NR Description: similar to putative pathogenesis-related protein; id: At5g57625.1 [Arabidopsis thaliana]
  misc_feature (48)..(181): Homolog of NCBI NO: 100907 NR Description: pathogenesis-related protein 1 - maize
  misc_feature (48)..(181): Homolog of NCBI NO: 7442179 NR Description: pathogenesis related protein-1 - maize
  misc_feature (48)..(181): Homolog of NCBI NO: 3702665 NR Description: pathogenisis-related protein 1.2 [Triticum
  misc_feature (50)..(187): Homolog of NCBI NO: 17221641 NR Description: PR-1 [Solanum torvum]
MYMKIENIPSATSTRLLLSPPSFTGNRFSFRFRWRRIRRRNRVNRASREFLIAHNLVRARVGEPPFQWDGRLAAYARTWANQRVGDCRLVHSNGPYGENIFWAGKNNWSPRDIVNVWADEDKFYDVKGNTCEPQHMCGHYTQIVWRDSTKVGCASVDCSNGGVYAICVYNPPGNYEGENPFGSYDDQIGLARDDPPAVIGGMA

SEQ ID NO: 73851 - DNA, 1680 bp, Arabidopsis thaliana
  misc_feature (1)..(1680): Ceres Seq. ID no. 4983267
  misc_feature: MA Experiment ID: 20000179 Result: Down-regulated in Transcription
  misc_feature: MA Experiment 20000179 PARAMETER Experiment Name: At_Germinating_Seeds_P Parameter: Age (hr) Value: 6 vs. 0
  misc_feature: MA Experiment 20000179 PARAMETER Experiment Name: At_Germinating_Seeds_P Parameter: Tissue Value: Germinating Seeds
  misc_feature: MA Experiment ID: 20000180 Result: Down-regulated in Transcription
  misc_feature: MA Experiment 20000180 PARAMETER Experiment Name: At_Germinating_Seeds_P Parameter: Age (hr) Value: 24 vs. 0
  misc_feature: MA Experiment 20000180 PARAMETER Experiment Name: At_Germinating_Seeds_P Parameter: Tissue Value: Germinating Seeds
  misc_feature: MA Experiment ID: 20000437 Result: Up-regulated in Transcription
  misc_feature: MA Experiment 20000437 PARAMETER Experiment Name: At_Drought_P Parameter: Age (day) Value: 8
  misc_feature: MA Experiment 20000437 PARAMETER Experiment Name: At_Drought_P Parameter: Organism Value: A. thaliana
  misc_feature: MA Experiment 20000437 PARAMETER Experiment Name: At_Drought_P Parameter: Plant Line Value: WS
  misc_feature: MA Experiment 20000437 PARAMETER Experiment Name: At_Drought_P Parameter: Timepoint (hr) Value: 24
  misc_feature: MA Experiment 20000437 PARAMETER Experiment Name: At_Drought_P Parameter: Tissue Value: Whole Plant
  misc_feature: MA Experiment 20000437 PARAMETER Experiment Name: At_Drought_P Parameter: Treatment Value: Drought vs. No Drought
  misc_feature: MA Experiment ID: 20000495 Result: Up-regulated in Transcription
  misc_feature: MA Experiment 20000495 PARAMETER Experiment Name: At_Guard_Cells_P Parameter: Harvest Date Value: 8/2/2002
  misc_feature: MA Experiment 20000495 PARAMETER Experiment Name: At_Guard_Cells_P Parameter: Organism Value: A. thaliana
  misc_feature: MA Experiment 20000495 PARAMETER Experiment Name: At_Guard_Cells_P Parameter: Tissue Value: Guard Cells vs. Leaves
atggaacaaaaggaaagacctctagatgaagggatcatcgagactgcaaaagaagatgagatgaccatcaagcaacgtatgatcaacaaaggcctcaaagtcacagaagacagagaaagggacacttacaagatcgagtgtgatgcagtggtagtgggttctggctgtggcggaggggttgcagctgcaattctagcaaagtcgggccttagggtggtagttatcgagaaggggaactactttgcccccagagactactcagctctcgagggcccttccatgtttgagctgtttgagtccaatagcttgatgatgactcatgatggcaggttccggttcatggcaggatcaacagtcggtggtggctctgtggtaaactgggcagcgtccttaaaaacacctgatgctatcatcgaagaatggtcagtacatcgagggatttcaatatattctagtgagaaatataaggcggcgatgggtattgtctgcaagaggttaggtgtcactgagaaaatcatcagagaagggtttcagaaccagattctgcggaaaggttgcgagaagcttggtttggatgtgacaatagtgccaaggaattcaacagagaaacattattgcggtagttgctcgtatggatgcccaaccggagagaagagagggacagattcaacctggctggttgatgcagttaacaacaatgctgtgatcctaacacagtgcaaggctgagaaactaatcttggcggataacgatgctaacaaaagagaggagagcggacgaagaaaaagatgtttgggagtcgcagcctctctatcccaccaaaccagaaagaagcttcagatcaatgccaaagtgacaattgtggcttgcggctcgcttaagacaccaggattgttggcttcaagcgggttgaagaattcaaacatcagtcgcggtctccatatccaccctatcatgatggcttggggctacttcccagaaaagaattcagaattggaaggagcggctcatgagggagagatcgtcacttcattgcattatgtgcatccaatggactccactacacctaacatcacactggagactcctgctataggaccaggtacgttcgcagctctgaccccgtgggtctctgggtcagacatgaaagaaagaatggccaaatacgcaagaacagctcatatttttgccatggtgagagatgaaggagttggagaggtgaaaggagacattgtcaaatacagattaaccaaagcggacgaagagaatctgacaattgggttaaagcaagcactgaggatcctagtagcagcaggagcagcggaggtaggcacatacaggagcgacgggcagagaatgaagtgtgatggaatcaaacagaaagatctagaggcatttttagataccgtaaacgcgccacctggagttgtgtccatgagtaagcattggactcaatcctttacagcgcatcaaataggatgttgccgtatgggtgccacagaaaaggaaggagccattgatggaaaaggagagagctgggaggcagaagatttgtatgtctgtgatgcaagtgttctgcctacagctcttggtgttaatcccatgatcaccgttcagtccactgcttactgcatatccaacagaatagccgagttaatgaagaagaggaagaaagactga

SEQ ID NO: 73852 - protein, 559 aa, Arabidopsis thaliana
  peptide (1)..(559): Ceres Seq. ID no. 4983268
  misc_feature (48)..(325): Pfam Name: GMC oxidoreductase Pfam Description: GMC oxidoreductase
  misc_feature (1)..(559): Homolog of NCBI NO: 15219612 NR Description: unknown protein; protein id: At1g03990.1
  misc_feature (1)..(559): Homolog of NCBI NO: 25367436 NR Description: hypothetical protein [imported] - Arabidopsis
  misc_feature (2)..(558): Homolog of NCBI NO: 21554016 NR Description: unknown [Arabidopsis thaliana]
  misc_feature (2)..(558): Homolog of NCBI NO: 14532706 NR Description: unknown protein [Arabidopsis thaliana]
  misc_feature (2)..(558): Homolog of NCBI NO: 15235348 NR Description: putative protein; protein id: At4g28570.1, by cDNA: 19314., supported by cDNA: gi_14532705 [Arabidopsis
  misc_feature (5)..(553): Homolog of NCBI NO: 18403753 NR Description: expressed protein; protein id: At3g23410.1, by cDNA: gi_13605691 [Arabidopsis thaliana] contains similarity to long chain fatty alcohol
  misc_feature (5)..(553): Homolog of NCBI NO: 22798796 NR Description: alcohol oxidase [Arabidopsis thaliana]
  misc_feature (6)..(558): Homolog of NCBI NO: 16905151 NR Description: putative alcohol oxidase [Oryza sativa]
  misc_feature (6)..(558): Homolog of NCBI NO: 37535334 NR Description: putative oxidase [Oryza sativa (japonica
  misc_feature (6)..(553): Homolog of NCBI NO: 37535330 NR Description: putative alcohol oxidase [Oryza sativa (japonica group)] >gi|16905157|gb|AAL31027.1| putative alcohol oxidase sativa] >gi|31432646|gb|AAP54254.1| putative alcohol oxidase
MEQKERPLDEGIIETAKEDEMTIKQRMINKGLKVTEDRERDTYKIECDAVVVGSGCGGGVAAAILAKSGLRVVVIEKGNYFAPRDYSALEGPSMFELFESNSLMMTHDGRFRFMAGSTVGGGSVVNWAASLKTPDAIIEEWSVHRGISIYSSEKYKAAMGIVCKRLGVTEKIIREGFQNQILRKGCEKLGLDVTIVPRNSTEKHYCGSCSYGCPTGEKRGTDSTWLVDAVNNNAVILTQCKAEKLILADNDANKREESGRRKRCLGVAASLSHQTRKKLQINAKVTIVACGSLKTPGLLASSGLKNSNISRGLHIHPIMMAWGYFPEKNSELEGAAHEGEIVTSLHYVHPMDSTTPNITLETPAIGPGTFAALTPWVSGSDMKERMAKYARTAHIFAMVRDEGVGEVKGDIVKYRLTKADEENLTIGLKQALRILVAAGAAEVGTYRSDGQRMKCDGIKQKDLEAFLDTVNAPPGVVSMSKHWTQSFTAHQIGCCRMGATEKEGAIDGKGESWEAEDLYVCDASVLPTALGVNPMITVQSTAYCISNRIAELMKKRKKD

SEQ ID NO: 73853 - protein, 539 aa, Arabidopsis thaliana
  peptide (1)..(539): Ceres Seq. ID no. 4983269
  misc_feature (28)..(305): Pfam Name: GMC oxidoreductase Pfam Description: GMC oxidoreductase
  misc_feature (1)..(539): Homolog of NCBI NO: 15219612 NR Description: unknown protein; protein id: At1g03990.1
  misc_feature (1)..(539): Homolog of NCBI NO: 25367436 NR Description: hypothetical protein [imported] - Arabidopsis
  misc_feature (1)..(538): Homolog of NCBI NO: 21554016 NR Description: unknown [Arabidopsis thaliana]
  misc_feature (1)..(538): Homolog of NCBI NO: 14532706 NR Description: unknown protein [Arabidopsis thaliana]
  misc_feature (1)..(538): Homolog of NCBI NO: 15235348 NR Description: putative protein; protein id: At4g28570.1, by cDNA: 19314., supported by cDNA: gi_14532705 [Arabidopsis
  misc_feature (1)..(533): Homolog of NCBI NO: 18403753 NR Description: expressed protein; protein id: At3g23410.1, by cDNA: gi_13605691 [Arabidopsis thaliana] contains similarity to long chain fatty alcohol
  misc_feature (1)..(533): Homolog of NCBI NO: 22798796 NR Description: alcohol oxidase [Arabidopsis thaliana]
  misc_feature (1)..(538): Homolog of NCBI NO: 16905151 NR Description: putative alcohol oxidase [Oryza sativa]
  misc_feature (1)..(538): Homolog of NCBI NO: 37535334 NR Description: putative oxidase [Oryza sativa (japonica
  misc_feature (1)..(533): Homolog of NCBI NO: 37535330 NR Description: putative alcohol oxidase [Oryza sativa (japonica group)] >gi|16905157|gb|AAL31027.1| putative alcohol oxidase sativa] >gi|31432646|gb|AAP54254.1| putative alcohol oxidase
MTIKQRMINKGLKVTEDRERDTYKIECDAVVVGSGCGGGVAAAILAKSGLRVVVIEKGNYFAPRDYSALEGPSMFELFESNSLMMTHDGRFRFMAGSTVGGGSVVNWAASLKTPDAIIEEWSVHRGISIYSSEKYKAAMGIVCKRLGVTEKIIREGFQNQILRKGCEKLGLDVTIVPRNSTEKHYCGSCSYGCPTGEKRGTDSTWLVDAVNNNAVILTQCKAEKLILADNDANKREESGRRKRCLGVAASLSHQTRKKLQINAKVTIVACGSLKTPGLLASSGLKNSNISRGLHIHPIMMAWGYFPEKNSELEGAAHEGEIVTSLHYVHPMDSTTPNITLETPAIGPGTFAALTPWVSGSDMKERMAKYARTAHIFAMVRDEGVGEVKGDIVKYRLTKADEENLTIGLKQALRILVAAGAAEVGTYRSDGQRMKCDGIKQKDLEAFLDTVNAPPGVVSMSKHWTQSFTAHQIGCCRMGATEKEGAIDGKGESWEAEDLYVCDASVLPTALGVNPMITVQSTAYCISNRIAELMKKRKKD

SEQ ID NO: 73854 - protein, 533 aa, Arabidopsis thaliana
  peptide (1)..(533): Ceres Seq. ID no. 4983270
  misc_feature (22)..(299): Pfam Name: GMC oxidoreductase Pfam Description: GMC oxidoreductase
  misc_feature (1)..(533): Homolog of NCBI NO: 15219612 NR Description: unknown protein; protein id: At1g03990.1
  misc_feature (1)..(533): Homolog of NCBI NO: 25367436 NR Description: hypothetical protein [imported] - Arabidopsis
  misc_feature (1)..(532): Homolog of NCBI NO: 21554016 NR Description: unknown [Arabidopsis thaliana]
  misc_feature (1)..(532): Homolog of NCBI NO: 14532706 NR Description: unknown protein [Arabidopsis thaliana]
  misc_feature (1)..(532): Homolog of NCBI NO: 15235348 NR Description: putative protein; protein id: At4g28570.1, by cDNA: 19314., supported by cDNA: gi_14532705 [Arabidopsis
  misc_feature (1)..(527): Homolog of NCBI NO: 18403753 NR Description: expressed protein; protein id: At3g23410.1, by cDNA: gi_13605691 [Arabidopsis thaliana] contains similarity to long chain fatty alcohol
  misc_feature (1)..(527): Homolog of NCBI NO: 22798796 NR Description: alcohol oxidase [Arabidopsis thaliana]
  misc_feature (1)..(532): Homolog of NCBI NO: 16905151 NR Description: putative alcohol oxidase [Oryza sativa]
  misc_feature (1)..(532): Homolog of NCBI NO: 37535334 NR Description: putative oxidase [Oryza sativa (japonica
  misc_feature (1)..(527): Homolog of NCBI NO: 37535330 NR Description: putative alcohol oxidase [Oryza sativa (japonica group)] >gi|16905157|gb|AAL31027.1| putative alcohol oxidase sativa] >gi|31432646|gb|AAP54254.1| putative alcohol oxidase
MINKGLKVTEDRERDTYKIECDAVVVGSGCGGGVAAAILAKSGLRVVVIEKGNYFAPRDYSALEGPSMFELFESNSLMMTHDGRFRFMAGSTVGGGSVVNWAASLKTPDAIIEEWSVHRGISIYSSEKYKAAMGIVCKRLGVTEKIIREGFQNQILRKGCEKLGLDVTIVPRNSTEKHYCGSCSYGCPTGEKRGTDSTWLVDAVNNNAVILTQCKAEKLILADNDANKREESGRRKRCLGVAASLSHQTRKKLQINAKVTIVACGSLKTPGLLASSGLKNSNISRGLHIHPIMMAWGYFPEKNSELEGAAHEGEIVTSLHYVHPMDSTTPNITLETPAIGPGTFAALTPWVSGSDMKERMAKYARTAHIFAMVRDEGVGEVKGDIVKYRLTKADEENLTIGLKQALRILVAAGAAEVGTYRSDGQRMKCDGIKQKDLEAFLDTVNAPPGVVSMSKHWTQSFTAHQIGCCRMGATEKEGAIDGKGESWEAEDLYVCDASVLPTALGVNPMITVQSTAYCISNRIAELMKKRKKD

SEQ ID NO: 73855 - DNA, 1677 bp, Arabidopsis thaliana
  misc_feature (1)..(1677): Ceres Seq. ID no. 4983275
  misc_feature: MA Experiment ID: 20000180 Result: Down-regulated in Transcription
  misc_feature: MA Experiment 20000180 PARAMETER Experiment Name: At_Germinating_Seeds_P Parameter: Age (hr) Value: 24 vs. 0
  misc_feature: MA Experiment 20000180 PARAMETER Experiment Name: At_Germinating_Seeds_P Parameter: Tissue Value: Germinating Seeds
  misc_feature: MA Experiment ID: 20000227 Result: Up-regulated in Transcription
  misc_feature: MA Experiment 20000227 PARAMETER Experiment Name: At_Root-Tips-vs-Tops_P Parameter: Tissue Value: Root Tips vs. Root Tops
atggctcgtgtttacatggagacgatgatacaaaaatgcgtcagcttctcccaaatcaaacaactccaatctcacttcctcaccgccggccatttccaatcttcctttctccgttctcgtcttctcgaacgctgcgcaatctcaccattcggagacctttccttcgccgtacaaattttccggtacatccctaaacctttaaccaatgattggaacgcaatcatccgcggattcgccggaagttctcatccttcacttgcgttttcatggtatcgttccatgttgcagcaatcttcgtcatcgtcggctatatgtagagtcgatgctttgacttgttcttttactcttaaagcttgtgcacgtgcgctttgttcttccgctatggatcaacttcattgtcagattaaccgtcggggattatccgctgattcgcttctttgtactacgttgcttgatgcttactctaaaaacggagatttaattagtgcgtataagttgttcgatgaaatgcctgtgagagatgttgcgtcgtggaacgcgttgatcgcggggttagtgtctggtaatcgagcgagtgaggcgatggagttgtataagagaatggaaacggaaggaattagaagaagtgaagtaactgttgttgctgctttaggagcttgttctcatttgggtgatgttaaggaaggtgaaaatatcttccatggatacagtaacgataatgtgattgttagtaacgcggctattgatatgtattcgaaatgcgggtttgttgataaagcttatcaagtgtttgaacaattcactggtaagaagagtgttgttacatggaacactatgattacagggtttgcagtgcatggagaagcacatagagcgttggagatttttgacaagttggaggataatggtattaagcctgatgatgtctcgtacttagctgctttaactgcgtgtagacatgcggggttagtggagtatggtttgtctgtattcaataatatggcttgtaagggcgttgagcgtaacatgaagcactatggttgtgtggttgatctgttaagccgtgcaggaaggttgagagaagctcacgatatcatatgttcaatgtcgatgattccggatcctgttttgtggcagagccttcttggagcttcggagatttatagtgatgttgaaatggctgagattgcttctagggaaataaaggaaatgggagttaacaatgatggtgattttgtgttgctatcgaatgtttatgctgcgcagggacggtggaaagatgtaggacgagtgagagatgatatggaaagcaaacaagtgaagaaaattccaggtcttagctacatagaagccaaaggaacgattcatgaattctacaacagtgacaagagccatgaacagtggagagagatttatgagaagatcgatgagatcaggttcaagataagagaggatggttacgtggcgcagacaggacttgtgttgcacgacataggagaggaagagaaagagaacgctttgtgctatcacagcgagaaattggcggtggcctacggactgatgatgatggatggtgcggacgaggagagtccgttcggtttcataggttcaaagatggttcttgctcttgcagagatttttggtaacgttacaaaattaagagggtggcaattttaa

SEQ ID NO: 73856 - protein, 558 aa, Arabidopsis thaliana
  peptide (1)..(558): Ceres Seq. ID no. 4983276
  misc_feature (344)..(378): Pfam Name: PPR repeat Pfam Description: PPR repeat
  misc_feature (1)..(558): Homolog of NCBI NO: 15218513 NR Description: putative protein; protein id: At1g34160.1
  misc_feature (1)..(531): Homolog of NCBI NO: 25346337 NR Description: F12G12.2 protein - Arabidopsis thaliana
  misc_feature (10)..(521): Homolog of NCBI NO: 9279668 NR Description: selenium-binding protein-like [Arabidopsis
  misc_feature (10)..(521): Homolog of NCBI NO: 15231617 NR Description: unknown protein; protein id: At3g26780.1
  misc_feature (2)..(521): Homolog of NCBI NO: 15228954 NR Description: putative protein; protein id: At3g56550.1
  misc_feature (51)..(523): Homolog of NCBI NO: 34906110 NR Description: P0020E09.15 [Oryza sativa (japonica
  misc_feature (56)..(521): Homolog of NCBI NO: 34394298 NR Description: putative pentatricopeptide (PPR)
  misc_feature (9)..(521): Homolog of NCBI NO: 15222513 NR Description: PPR-repeat protein, putative; protein id:
  misc_feature (19)..(522): Homolog of NCBI NO: 15232821 NR Description: putative protein; protein id: At3g47530.1
  misc_feature (18)..(521): Homolog of NCBI NO: 15226299 NR Description: hypothetical protein; protein id: At2g01510.1
MARVYMETMIQKCVSFSQIKQLQSHFLTAGHFQSSFLRSRLLERCAISPFGDLSFAVQIFRYIPKPLTNDWNAIIRGFAGSSHPSLAFSWYRSMLQQSSSSSAICRVDALTCSFTLKACARALCSSAMDQLHCQINRRGLSADSLLCTTLLDAYSKNGDLISAYKLFDEMPVRDVASWNALIAGLVSGNRASEAMELYKRMETEGIRRSEVTVVAALGACSHLGDVKEGENIFHGYSNDNVIVSNAAIDMYSKCGFVDKAYQVFEQFTGKKSVVTWNTMITGFAVHGEAHRALEIFDKLEDNGIKPDDVSYLAALTACRHAGLVEYGLSVFNNMACKGVERNMKHYGCVVDLLSRAGRLREAHDIICSMSMIPDPVLWQSLLGASEIYSDVEMAEIASREIKEMGVNNDGDFVLLSNVYAAQGRWKDVGRVRDDMESKQVKKIPGLSYIEAKGTIHEFYNSDKSHEQWREIYEKIDEIRFKIREDGYVAQTGLVLHDIGEEEKENALCYHSEKLAVAYGLMMMDGADEESPFGFIGSKMVLALAEIFGNVTKLRGWQF

SEQ ID NO: 73857 - protein, 553 aa, Arabidopsis thaliana
  peptide (1)..(553): Ceres Seq. ID no. 4983277
  misc_feature (339)..(373): Pfam Name: PPR repeat Pfam Description: PPR repeat
  misc_feature (1)..(553): Homolog of NCBI NO: 15218513 NR Description: putative protein; protein id: At1g34160.1
  misc_feature (1)..(526): Homolog of NCBI NO: 25346337 NR Description: F12G12.2 protein - Arabidopsis thaliana
  misc_feature (5)..(516): Homolog of NCBI NO: 9279668 NR Description: selenium-binding protein-like [Arabidopsis
  misc_feature (5)..(516): Homolog of NCBI NO: 15231617 NR Description: unknown protein; protein id: At3g26780.1
  misc_feature (1)..(516): Homolog of NCBI NO: 15228954 NR Description: putative protein; protein id: At3g56550.1
  misc_feature (46)..(518): Homolog of NCBI NO: 34906110 NR Description: P0020E09.15 [Oryza sativa (japonica
  misc_feature (51)..(516): Homolog of NCBI NO: 34394298 NR Description: putative pentatricopeptide (PPR)
  misc_feature (4)..(516): Homolog of NCBI NO: 15222513 NR Description: PPR-repeat protein, putative; protein id:
  misc_feature (14)..(517): Homolog of NCBI NO: 15232821 NR Description: putative protein; protein id: At3g47530.1
  misc_feature (13)..(516): Homolog of NCBI NO: 15226299 NR Description: hypothetical protein; protein id: At2g01510.1
METMIQKCVSFSQIKQLQSHFLTAGHFQSSFLRSRLLERCAISPFGDLSFAVQIFRYIPKPLTNDWNAIIRGFAGSSHPSLAFSWYRSMLQQSSSSSAICRVDALTCSFTLKACARALCSSAMDQLHCQINRRGLSADSLLCTTLLDAYSKNGDLISAYKLFDEMPVRDVASWNALIAGLVSGNRASEAMELYKRMETEGIRRSEVTVVAALGACSHLGDVKEGENIFHGYSNDNVIVSNAAIDMYSKCGFVDKAYQVFEQFTGKKSVVTWNTMITGFAVHGEAHRALEIFDKLEDNGIKPDDVSYLAALTACRHAGLVEYGLSVFNNMACKGVERNMKHYGCVVDLLSRAGRLREAHDIICSMSMIPDPVLWQSLLGASEIYSDVEMAEIASREIKEMGVNNDGDFVLLSNVYAAQGRWKDVGRVRDDMESKQVKKIPGLSYIEAKGTIHEFYNSDKSHEQWREIYEKIDEIRFKIREDGYVAQTGLVLHDIGEEEKENALCYHSEKLAVAYGLMMMDGADEESPFGFIGSKMVLALAEIFGNVTKLRGWQF

SEQ ID NO: 73858 - protein, 550 aa, Arabidopsis thaliana
  peptide (1)..(550): Ceres Seq. ID no. 4983278
  misc_feature (336)..(370): Pfam Name: PPR repeat Pfam Description: PPR repeat
  misc_feature (1)..(550): Homolog of NCBI NO: 15218513 NR Description: putative protein; protein id: At1g34160.1
  misc_feature (1)..(523): Homolog of NCBI NO: 25346337 NR Description: F12G12.2 protein - Arabidopsis thaliana
  misc_feature (2)..(513): Homolog of NCBI NO: 9279668 NR Description: selenium-binding protein-like [Arabidopsis
  misc_feature (2)..(513): Homolog of NCBI NO: 15231617 NR Description: unknown protein; protein id: At3g26780.1
  misc_feature (1)..(513): Homolog of NCBI NO: 15228954 NR Description: putative protein; protein id: At3g56550.1
  misc_feature (43)..(515): Homolog of NCBI NO: 34906110 NR Description: P0020E09.15 [Oryza sativa (japonica
  misc_feature (48)..(513): Homolog of NCBI NO: 34394298 NR Description: putative pentatricopeptide (PPR)
  misc_feature (1)..(513): Homolog of NCBI NO: 15222513 NR Description: PPR-repeat protein, putative; protein id:
  misc_feature (11)..(514): Homolog of NCBI NO: 15232821 NR Description: putative protein; protein id: At3g47530.1
  misc_feature (10)..(513): Homolog of NCBI NO: 15226299 NR Description: hypothetical protein; protein id: At2g01510.1
MIQKCVSFSQIKQLQSHFLTAGHFQSSFLRSRLLERCAISPFGDLSFAVQIFRYIPKPLTNDWNAIIRGFAGSSHPSLAFSWYRSMLQQSSSSSAICRVDALTCSFTLKACARALCSSAMDQLHCQINRRGLSADSLLCTTLLDAYSKNGDLISAYKLFDEMPVRDVASWNALIAGLVSGNRASEAMELYKRMETEGIRRSEVTVVAALGACSHLGDVKEGENIFHGYSNDNVIVSNAAIDMYSKCGFVDKAYQVFEQFTGKKSVVTWNTMITGFAVHGEAHRALEIFDKLEDNGIKPDDVSYLAALTACRHAGLVEYGLSVFNNMACKGVERNMKHYGCVVDLLSRAGRLREAHDIICSMSMIPDPVLWQSLLGASEIYSDVEMAEIASREIKEMGVNNDGDFVLLSNVYAAQGRWKDVGRVRDDMESKQVKKIPGLSYIEAKGTIHEFYNSDKSHEQWREIYEKIDEIRFKIREDGYVAQTGLVLHDIGEEEKENALCYHSEKLAVAYGLMMMDGADEESPFGFIGSKMVLALAEIFGNVTKLRGWQF

SEQ ID NO: 73859 - DNA, 3129 bp, Arabidopsis thaliana
  misc_feature (1)..(3129): Ceres Seq. ID no. 4983442
  misc_feature: MA Experiment ID: 20000227 Result: Up-regulated in Transcription
  misc_feature: MA Experiment 20000227 PARAMETER Experiment Name: At_Root-Tips-vs-Tops_P Parameter: Tissue Value: Root Tips vs. Root Tops
  misc_feature: MA Experiment ID: 20000235 Result: Up-regulated in Transcription
  misc_feature: MA Experiment 20000235 PARAMETER Experiment Name: At_Siliques_P Parameter: Age (day) Value: 21
  misc_feature: MA Experiment 20000235 PARAMETER Experiment Name: At_Siliques_P Parameter: Organism Value: A. thaliana
  misc_feature: MA Experiment 20000235 PARAMETER Experiment Name: At_Siliques_P Parameter: Plant Line Value: WS
  misc_feature: MA Experiment 20000235 PARAMETER Experiment Name: At_Siliques_P Parameter: Tissue Value: 5-10mm Siliques vs. Whole Plant
  misc_feature: MA Experiment ID: 20000264 Result: Up-regulated in Transcription
  misc_feature: MA Experiment 20000264 PARAMETER Experiment Name: At_Open_Flower_P Parameter: Age (day) Value: 21
  misc_feature: MA Experiment 20000264 PARAMETER Experiment Name: At_Open_Flower_P Parameter: Plant Line Value: WS
  misc_feature: MA Experiment 20000264 PARAMETER Experiment Name: At_Open_Flower_P Parameter: Tissue Value: Open Flower vs. Whole Plant
  misc_feature: MA Experiment ID: 20000286 Result: Up-regulated in Transcription
  misc_feature: MA Experiment 20000286 PARAMETER Experiment Name: At_Open_Flower_P Parameter: Age (day) Value: 21
  misc_feature: MA Experiment 20000286 PARAMETER Experiment Name: At_Open_Flower_P Parameter: Plant Line Value: WS
  misc_feature: MA Experiment 20000286 PARAMETER Experiment Name: At_Open_Flower_P Parameter: Tissue Value: Half Open vs. Whole Plant
  misc_feature: MA Experiment ID: 20000439 Result: Up-regulated in Transcription
  misc_feature: MA Experiment 20000439 PARAMETER Experiment Name: At_Roots__P Parameter: Age (day) Value: 14 vs. 21
  misc_feature: MA Experiment 20000439 PARAMETER Experiment Name: At_Roots__P Parameter: Organism Value: A. thaliana
  misc_feature: MA Experiment 20000439 PARAMETER Experiment Name: At_Roots__P Parameter: Tissue Value: Roots vs. Whole Plant
  misc_feature: MA Experiment ID: 20001757 Result: Down-regulated in Transcription
  misc_feature: MA Experiment 20001757 PARAMETER Experiment Name: At_50mM_NH4NO3_L-to-H_P Parameter: Timepoint (hr) Value: 6
  misc_feature: MA Experiment 20001757 PARAMETER Experiment Name: At_50mM_NH4NO3_L-to-H_P Parameter: Tissue Value: Leaf
  misc_feature: MA Experiment 20001757 PARAMETER Experiment Name: At_50mM_NH4NO3_L-to-H_P Parameter: Treatment Value: 50mM NH4NO3 vs 100mM Mannitol
  misc_feature: MA Experiment ID: 20001910 Result: Up-regulated in Transcription
  misc_feature: MA Experiment 20001910 PARAMETER Experiment Name: At_Drought_Reproduction_P Parameter: Age (day) Value: 37
  misc_feature: MA Experiment 20001910 PARAMETER Experiment Name: At_Drought_Reproduction_P Parameter: Organism Value: A. thaliana
  misc_feature: MA Experiment 20001910 PARAMETER Experiment Name: At_Drought_Reproduction_P Parameter: Plant Line Value: WS
  misc_feature: MA Experiment 20001910 PARAMETER Experiment Name: At_Drought_Reproduction_P Parameter: Timepoint (day) Value: 7
  misc_feature: MA Experiment 20001910 PARAMETER Experiment Name: At_Drought_Reproduction_P Parameter: Tissue Value: Flowers
  misc_feature: MA Experiment 20001910 PARAMETER Experiment Name: At_Drought_Reproduction_P Parameter: Treatment Value: Drought vs. No Drought
atgagaatggagtttcctggcagctccaatcagcatttaggtagggataggttcaatggagaagttggttgcggtaataactgttctcagacaggagaggaattttcaaatgagtttttgagggattttggtgctcaacgaagactacaacatggtggtgttaacagaaatgttgagggtaattataataatcgccatcttgtttacgaggatttcaacagaattcttggccttcaaagagttgattccaacatgtcagaaggtattaattcctcgaatggttactttgctgagtcaaatgttgcagactcacctcggaagatgtttcaaactgcaatatcagatgtttatttgcctgaagtattgaagcttctttgtagcttcgggggaaggatcttacagcggcctggtgatggcaagcttagatacattggaggggagactcggattatctcaatacgcaaacatgttggattaaacgaattgatgcacaagacttatgctttgtgcaaccatccgcatacaatcaagtatcaattaccaggagaagatcttgatgcccttatatcggtttgctcagatgaggatcttcttcatatgattgaagagtatcaagaagctgaaacaaaggctggatcccagaggattagggtctttcttgtaccttccacagaatcatcagagagtcctaaaattttccatgaaaggaatatgaacataaaccgaaacacgaaccagcagacggatatagatcattatcagtatgtttcagctcttaatggtattgtagatgtgagtcctcaaaagagttccagcggccaaagtggaacaagtcagaccacacaatttgggaatgcttcagaatttagccctacatttcatcttcgagactcgcctacttctgttcatacatgggaacacaaagacagcaacagtccaaccttcatgaaaccatatgggaacacgaatgctgttcattttatgccgaaaatgcagattcccaggaactcgtttggtcaacaatctcctccaacatctcctttttcagtccacaagagagcaaacaccgacgttccttattttgccgatcaaaatggtttctttgacccttacttggctgctccaaacttcccacagcaaaataggttcttttttgagactactacacaaaagcagaagcatccagaagtgaatcttcatgaccggaggccaagcgatgatatttacccccatggccaagcttatatcggagccgagaaaatgacgcttaagaaaaacgctctttctgatccgcagctgcatgatgagagccaaatcaacaatgggttagaagcatttaccaaacaaccatggaaaatattgagaaagaatctacgtgttgtggctacatcaaagtgggaagatagtgatgatatctatttcaataatccagaaggcaagagatgcaaggagcttgaactcaccaaggaagttcctaatagttggatcaatcgcgataataatcccgattcttttgatcaggcaacaaagaaacaggatggtagtaacagtaatagctccttcagtccgaattatttcagtccgaatcatcaaccagctgctcagattacttcaagtgattcacaagattcaggaagctcagtgttctctttatcagttaacaccaacgaaaattatcttgattgttcgagggaaaaatttaatggtttccagcatgacatgtcactagatattctcatcagaagccacacttcagctacagatcaactatgtagtacaaccaagtcaagtgataaagcagattactcctcacccaatacaaatttccccgtggtatttctgagacaggaacctatgattccgagacatgatttggagacaaatagcgatgattcagatactcaaaaatctcttcctagagaagagagtattcactatagtggattgccacttaggaaggtgggaagtagagaaactacttttatgcacacgcaggggtcagatgatttcttcaaaagcaagctgcttggtccacagttgatagttgaggatgtgacgaacgaagtaatttcagataatctcttatcagctactattgtccctcaagtaaatagggagtccgatgatgatcacaaatcctacacaagggagaaagagattacaaatgcggatcatgaatcagaaatggaggaaaagtacaagaaaagcagaaacaccgatgattcattcagcgaagctgcaatggttgaaatcgaagctggaatatatggcttacagataattaaaaacactgatcttgaagacttacacgagcttggatctggtacatttggaactgtttactatgggaagtggagaggaactgatgttgctatcaagaggataaagaatagttgtttctctggtggatcatccgagcaagcacggcagactaaagatttctggagagaagctcggatattggcgaatcttcaccatcctaacgtagtggccttttatggagttgtaccagatggacctggtggaacaatggcaacagtgactgagtatatggtgaacggatctttgaggcatgtcttgcagagaaaagacagattacttgataggcgcaaaaaactgatgataactcttgattctgcatttggcatggagtatctacatatgaaaaatattgttcattttgatcttaaatgcgataacttgcttgtaaacttgagggatccacaacgacccatttgcaaggttggagatttcggattgtcgagaataaaacgaaacacgcttgtctctggtggagtaagaggaacccttccatggatggcaccagagctgctaaacggaagcagcaatcgggtctcagagaaagtcgatgttttctcatttggtatcgtgatgtgggagatcttgacaggcgaagaaccctatgcgaatctgcattgcggtgccatcattggtggaattgtgaacaatacgttaagacctccggtgcctgaacggtgtgaagctgagtggaggaagttgatggagcaatgctggtcattcgatccaggagtacggccatcgtttacggagattgttgaacgacttcgatcaatgactgttgccttgcaacccaagcgaagaacctaa

SEQ ID NO: 73860 - protein, 1042 aa, Arabidopsis thaliana
  peptide (1)..(1042): Ceres Seq. ID no. 4983443
  misc_feature (766)..(1029): Pfam Name: Protein kinase domain Pfam Description: Protein kinase domain
  misc_feature (652)..(1035): Homolog of NCBI NO: 15219417 NR Description: hypothetical protein; protein id: At1g79570.1
  misc_feature (122)..(272): Homolog of NCBI NO: 15219417 NR Description: hypothetical protein; protein id: At1g79570.1
  misc_feature (122)..(444): Homolog of NCBI NO: 15219183 NR Description: putative Ser/Thr protein kinase; protein id:
  misc_feature (726)..(1035): Homolog of NCBI NO: 15219183 NR Description: putative Ser/Thr protein kinase; protein id:
  misc_feature (691)..(1033): Homolog of NCBI NO: 15226883 NR Description: putative protein kinase; protein id: At2g35050.1
  misc_feature (82)..(275): Homolog of NCBI NO: 15226883 NR Description: putative protein kinase; protein id: At2g35050.1
  misc_feature (717)..(1039): Homolog of NCBI NO: 15242791 NR Description: putative protein; protein id: At5g57610.1 thaliana] >gi|9758322|dbj|BAB08796.1| contains similarity to
  misc_feature (119)..(264): Homolog of NCBI NO: 15242791 NR Description: putative protein; protein id: At5g57610.1 thaliana] >gi|9758322|dbj|BAB08796.1| contains similarity to
  misc_feature (710)..(1041): Homolog of NCBI NO: 15232679 NR Description: protein kinase - like protein; protein id:
  misc_feature (71)..(275): Homolog of NCBI NO: 15232679 NR Description: protein kinase - like protein; protein id:
MRMEFPGSSNQHLGRDRFNGEVGCGNNCSQTGEEFSNEFLRDFGAQRRLQHGGVNRNVEGNYNNRHLVYEDFNRILGLQRVDSNMSEGINSSNGYFAESNVADSPRKMFQTAISDVYLPEVLKLLCSFGGRILQRPGDGKLRYIGGETRIISIRKHVGLNELMHKTYALCNHPHTIKYQLPGEDLDALISVCSDEDLLHMIEEYQEAETKAGSQRIRVFLVPSTESSESPKIFHERNMNINRNTNQQTDIDHYQYVSALNGIVDVSPQKSSSGQSGTSQTTQFGNASEFSPTFHLRDSPTSVHTWEHKDSNSPTFMKPYGNTNAVHFMPKMQIPRNSFGQQSPPTSPFSVHKRANTDVPYFADQNGFFDPYLAAPNFPQQNRFFFETTTQKQKHPEVNLHDRRPSDDIYPHGQAYIGAEKMTLKKNALSDPQLHDESQINNGLEAFTKQPWKILRKNLRVVATSKWEDSDDIYFNNPEGKRCKELELTKEVPNSWINRDNNPDSFDQATKKQDGSNSNSSFSPNYFSPNHQPAAQITSSDSQDSGSSVFSLSVNTNENYLDCSREKFNGFQHDMSLDILIRSHTSATDQLCSTTKSSDKADYSSPNTNFPVVFLRQEPMIPRHDLETNSDDSDTQKSLPREESIHYSGLPLRKVGSRETTFMHTQGSDDFFKSKLLGPQLIVEDVTNEVISDNLLSATIVPQVNRESDDDHKSYTREKEITNADHESEMEEKYKKSRNTDDSFSEAAMVEIEAGIYGLQIIKNTDLEDLHELGSGTFGTVYYGKWRGTDVAIKRIKNSCFSGGSSEQARQTKDFWREARILANLHHPNVVAFYGVVPDGPGGTMATVTEYMVNGSLRHVLQRKDRLLDRRKKLMITLDSAFGMEYLHMKNIVHFDLKCDNLLVNLRDPQRPICKVGDFGLSRIKRNTLVSGGVRGTLPWMAPELLNGSSNRVSEKVDVFSFGIVMWEILTGEEPYANLHCGAIIGGIVNNTLRPPVPERCEAEWRKLMEQCWSFDPGVRPSFTEIVERLRSMTVALQPKRRT

SEQ ID NO: 73861 - protein, 1040 aa, Arabidopsis thaliana
  peptide (1)..(1040): Ceres Seq. ID no. 4983444
  misc_feature (764)..(1027): Pfam Name: Protein kinase domain Pfam Description: Protein kinase domain
  misc_feature (650)..(1033): Homolog of NCBI NO: 15219417 NR Description: hypothetical protein; protein id: At1g79570.1
  misc_feature (120)..(270): Homolog of NCBI NO: 15219417 NR Description: hypothetical protein; protein id: At1g79570.1
  misc_feature (120)..(442): Homolog of NCBI NO: 15219183 NR Description: putative Ser/Thr protein kinase; protein id:
  misc_feature (724)..(1033): Homolog of NCBI NO: 15219183 NR Description: putative Ser/Thr protein kinase; protein id:
  misc_feature (689)..(1031): Homolog of NCBI NO: 15226883 NR Description: putative protein kinase; protein id: At2g35050.1
  misc_feature (80)..(273): Homolog of NCBI NO: 15226883 NR Description: putative protein kinase; protein id: At2g35050.1
  misc_feature (715)..(1037): Homolog of NCBI NO: 15242791 NR Description: putative protein; protein id: At5g57610.1 thaliana] >gi|9758322|dbj|BAB08796.1| contains similarity to
  misc_feature (117)..(262): Homolog of NCBI NO: 15242791 NR Description: putative protein; protein id: At5g57610.1 thaliana] >gi|9758322|dbj|BAB08796.1| contains similarity to
  misc_feature (708)..(1039): Homolog of NCBI NO: 15232679 NR Description: protein kinase - like protein; protein id:
  misc_feature (69)..(273): Homolog of NCBI NO: 15232679 NR Description: protein kinase - like protein; protein id:
MEFPGSSNQHLGRDRFNGEVGCGNNCSQTGEEFSNEFLRDFGAQRRLQHGGVNRNVEGNYNNRHLVYEDFNRILGLQRVDSNMSEGINSSNGYFAESNVADSPRKMFQTAISDVYLPEVLKLLCSFGGRILQRPGDGKLRYIGGETRIISIRKHVGLNELMHKTYALCNHPHTIKYQLPGEDLDALISVCSDEDLLHMIEEYQEAETKAGSQRIRVFLVPSTESSESPKIFHERNMNINRNTNQQTDIDHYQYVSALNGIVDVSPQKSSSGQSGTSQTTQFGNASEFSPTFHLRDSPTSVHTWEHKDSNSPTFMKPYGNTNAVHFMPKMQIPRNSFGQQSPPTSPFSVHKRANTDVPYFADQNGFFDPYLAAPNFPQQNRFFFETTTQKQKHPEVNLHDRRPSDDIYPHGQAYIGAEKMTLKKNALSDPQLHDESQINNGLEAFTKQPWKILRKNLRVVATSKWEDSDDIYFNNPEGKRCKELELTKEVPNSWINRDNNPDSFDQATKKQDGSNSNSSFSPNYFSPNHQPAAQITSSDSQDSGSSVFSLSVNTNENYLDCSREKFNGFQHDMSLDILIRSHTSATDQLCSTTKSSDKADYSSPNTNFPVVFLRQEPMIPRHDLETNSDDSDTQKSLPREESIHYSGLPLRKVGSRETTFMHTQGSDDFFKSKLLGPQLIVEDVTNEVISDNLLSATIVPQVNRESDDDHKSYTREKEITNADHESEMEEKYKKSRNTDDSFSEAAMVEIEAGIYGLQIIKNTDLEDLHELGSGTFGTVYYGKWRGTDVAIKRIKNSCFSGGSSEQARQTKDFWREARILANLHHPNVVAFYGVVPDGPGGTMATVTEYMVNGSLRHVLQRKDRLLDRRKKLMITLDSAFGMEYLHMKNIVHFDLKCDNLLVNLRDPQRPICKVGDFGLSRIKRNTLVSGGVRGTLPWMAPELLNGSSNRVSEKVDVFSFGIVMWEILTGEEPYANLHCGAIIGGIVNNTLRPPVPERCEAEWRKLMEQCWSFDPGVRPSFTEIVERLRSMTVALQPKRRT

SEQ ID NO: 73862 - protein, 958 aa, Arabidopsis thaliana
  peptide (1)..(958): Ceres Seq. ID no. 4983445
  misc_feature (682)..(945): Pfam Name: Protein kinase domain Pfam Description: Protein kinase domain
  misc_feature (568)..(951): Homolog of NCBI NO: 15219417 NR Description: hypothetical protein; protein id: At1g79570.1
  misc_feature (38)..(188): Homolog of NCBI NO: 15219417 NR Description: hypothetical protein; protein id: At1g79570.1
  misc_feature (38)..(360): Homolog of NCBI NO: 15219183 NR Description: putative Ser/Thr protein kinase; protein id:
  misc_feature (642)..(951): Homolog of NCBI NO: 15219183 NR Description: putative Ser/Thr protein kinase; protein id:
  misc_feature (607)..(949): Homolog of NCBI NO: 15226883 NR Description: putative protein kinase; protein id: At2g35050.1
  misc_feature (1)..(191): Homolog of NCBI NO: 15226883 NR Description: putative protein kinase; protein id: At2g35050.1
  misc_feature (633)..(955): Homolog of NCBI NO: 15242791 NR Description: putative protein; protein id: At5g57610.1 thaliana] >gi|9758322|dbj|BAB08796.1| contains similarity to
  misc_feature (35)..(180): Homolog of NCBI NO: 15242791 NR Description: putative protein; protein id: At5g57610.1 thaliana] >gi|9758322|dbj|BAB08796.1| contains similarity to
  misc_feature (626)..(957): Homolog of NCBI NO: 15232679 NR Description: protein kinase - like protein; protein id:
  misc_feature (1)..(191): Homolog of NCBI NO: 15232679 NR Description: protein kinase - like protein; protein id:
MSEGINSSNGYFAESNVADSPRKMFQTAISDVYLPEVLKLLCSFGGRILQRPGDGKLRYIGGETRIISIRKHVGLNELMHKTYALCNHPHTIKYQLPGEDLDALISVCSDEDLLHMIEEYQEAETKAGSQRIRVFLVPSTESSESPKIFHERNMNINRNTNQQTDIDHYQYVSALNGIVDVSPQKSSSGQSGTSQTTQFGNASEFSPTFHLRDSPTSVHTWEHKDSNSPTFMKPYGNTNAVHFMPKMQIPRNSFGQQSPPTSPFSVHKRANTDVPYFADQNGFFDPYLAAPNFPQQNRFFFETTTQKQKHPEVNLHDRRPSDDIYPHGQAYIGAEKMTLKKNALSDPQLHDESQINNGLEAFTKQPWKILRKNLRVVATSKWEDSDDIYFNNPEGKRCKELELTKEVPNSWINRDNNPDSFDQATKKQDGSNSNSSFSPNYFSPNHQPAAQITSSDSQDSGSSVFSLSVNTNENYLDCSREKFNGFQHDMSLDILIRSHTSATDQLCSTTKSSDKADYSSPNTNFPVVFLRQEPMIPRHDLETNSDDSDTQKSLPREESIHYSGLPLRKVGSRETTFMHTQGSDDFFKSKLLGPQLIVEDVTNEVISDNLLSATIVPQVNRESDDDHKSYTREKEITNADHESEMEEKYKKSRNTDDSFSEAAMVEIEAGIYGLQIIKNTDLEDLHELGSGTFGTVYYGKWRGTDVAIKRIKNSCFSGGSSEQARQTKDFWREARILANLHHPNVVAFYGVVPDGPGGTMATVTEYMVNGSLRHVLQRKDRLLDRRKKLMITLDSAFGMEYLHMKNIVHFDLKCDNLLVNLRDPQRPICKVGDFGLSRIKRNTLVSGGVRGTLPWMAPELLNGSSNRVSEKVDVFSFGIVMWEILTGEEPYANLHCGAIIGGIVNNTLRPPVPERCEAEWRKLMEQCWSFDPGVRPSFTEIVERLRSMTVALQPKRRT

SEQ ID NO: 73863 - DNA, 708 bp, Arabidopsis thaliana
  misc_feature (1)..(708): Ceres Seq. ID no. 4983454
  misc_feature: MA Experiment ID: 108463 Result: Down-regulated in Transcription
  misc_feature: MA Experiment 108463 PARAMETER Experiment Name: At_Germinating_Seeds_cDNA_P Parameter: Age (day) Value: 3 vs. 0
  misc_feature: MA Experiment 108463 PARAMETER Experiment Name: At_Germinating_Seeds_cDNA_P Parameter: Tissue Value: Germinating Seeds
  misc_feature: MA Experiment ID: 108488 Result: Up-regulated in Transcription
  misc_feature: MA Experiment ID: 108573 Result: Down-regulated in Transcription
  misc_feature: MA Experiment 108573 PARAMETER Experiment Name: At_Drought_cDNA_P Parameter: Timepoint (hr) Value: 6
  misc_feature: MA Experiment 108573 PARAMETER Experiment Name: At_Drought_cDNA_P Parameter: Tissue Value: Aerial
  misc_feature: MA Experiment 108573 PARAMETER Experiment Name: At_Drought_cDNA_P Parameter: Treatment Value: Drought vs. No Drought
  misc_feature: MA Experiment ID: 108577 Result: Down-regulated in Transcription
  misc_feature: MA Experiment 108577 PARAMETER Experiment Name: At_42deg_Heat_cDNA_P Parameter: Temperature (deg C) Value: 42 vs. 22
  misc_feature: MA Experiment 108577 PARAMETER Experiment Name: At_42deg_Heat_cDNA_P Parameter: Timepoint (hr) Value: 6
  misc_feature: MA Experiment 108577 PARAMETER Experiment Name: At_42deg_Heat_cDNA_P Parameter: Tissue Value: Aerial
  misc_feature: MA Experiment ID: 108585 Result: Down-regulated in Transcription
  misc_feature: MA Experiment 108585 PARAMETER Experiment Name: At_5mM_NaNP_cDNA_P Parameter: Timepoint (hr) Value: 6
  misc_feature: MA Experiment 108585 PARAMETER Experiment Name: At_5mM_NaNP_cDNA_P Parameter: Tissue Value: Aerial
  misc_feature: MA Experiment 108585 PARAMETER Experiment Name: At_5mM_NaNP_cDNA_P Parameter: Treatment Value: null
  misc_feature: MA Experiment ID: 108595 Result: Down-regulated in Transcription
  misc_feature: MA Experiment 108595 PARAMETER Experiment Name: At_Ler-pi_Ovule_cDNA_P Parameter: Plant Line Value: null
  misc_feature: MA Experiment ID: 20000117 Result: Down-regulated in Transcription
  misc_feature: MA Experiment 20000117 PARAMETER Experiment Name: At_100uM_ABA_Mutants_cDNA_P Parameter: Plant Line Value: Columbia
  misc_feature: MA Experiment 20000117 PARAMETER Experiment Name: At_100uM_ABA_Mutants_cDNA_P Parameter: Timepoint (hr) Value: 6
  misc_feature: MA Experiment 20000117 PARAMETER Experiment Name: At_100uM_ABA_Mutants_cDNA_P Parameter: Tissue Value: Aerial
  misc_feature: MA Experiment 20000117 PARAMETER Experiment Name: At_100uM_ABA_Mutants_cDNA_P Parameter: Treatment Value: 100uM ABA vs. No Treatment
atgagatcccctagaaccttggaggtttggaagctaggcactgtcaactatttgaaatcccttaaactgcaggagaaattagtttcagagagaaaagctcatcagattccagataccctcctctcgcttcagcatccaccaacttatacgctcggaaagcgtagaaccgatcacaatctacttatccctgaatctgaacttacaaaaatcggagctgaacttcattatactcaaagaggaggagacatcaccttccatggccctcatcaagccatcttatatcccatcatttccttacgcagcattggttttggtgctaggaactacgtggagacattggagcggtcaatgatcgagtttgcttcgatttatggcgtgaaagctcgagcaggaaacaaatgtgagactggggtttgggttggggataggaagatcggtgctattggggttaggatatcttctggaatcactagtcatggtttggccttaaatatagatcctgatatgaagtactttgagcacattgtgccttgtgggattgctgataaagaagttacatctttgcgaagagagacggatactctgcttccttcagaagaagtgattcatgaacagttggtttcttgtttagccaaagcgttttcttatgatgatgttgtctggaaggaagatccttcactcattttggacacccaagataaagaataa

SEQ ID NO: 73864 - protein, 235 aa, Arabidopsis thaliana
  peptide (1)..(235): Ceres Seq. ID no. 4983455
  misc_feature (1)..(235): Homolog of NCBI NO: 3122357 NR Description: Probable lipoate-protein ligase (Lipoate protein) (Lipoyl ligase) >gi|25406801|pir||B86179 hypothetical
  misc_feature (1)..(235): Homolog of NCBI NO: 15219770 NR Description: lipoyltransferase; protein id: At1g04640.1, by cDNA: gi_16226270, supported by cDNA: gi_4996285 [Arabidopsis >gi|4996286|dbj|BAA78386.1| lipoyltransferase [Arabidopsis
  misc_feature (5)..(217): Homolog of NCBI NO: 22971103 NR Description: hypothetical protein [Chloroflexus aurantiacus]
  misc_feature (9)..(214): Homolog of NCBI NO: 21355483 NR Description: CG9804-PA [Drosophila melanogaster]
  misc_feature (6)..(219): Homolog of NCBI NO: 6685619 NR Description: Lipoate-protein ligase B (Lipoate biosynthesis
  misc_feature (7)..(214): Homolog of NCBI NO: 31203215 NR Description: ENSANGP00000017330 [Anopheles gambiae]
  misc_feature (1)..(192): Homolog of NCBI NO: 32565879 NR Description: LiPoate Ligase (27.4 kD) (lpl-1) [Caenorhabditis
  misc_feature (40)..(209): Homolog of NCBI NO: 29346499 NR Description: lipoate-protein ligase B [Bacteroides
  misc_feature (7)..(215): Homolog of NCBI NO: 25028655 NR Description: putative lipoate-protein ligase B
  misc_feature (7)..(215): Homolog of NCBI NO: 29336718 NR Description: Lipoate-protein ligase B (Lipoate biosynthesis
MRSPRTLEVWKLGTVNYLKSLKLQEKLVSERKAHQIPDTLLSLQHPPTYTLGKRRTDHNLLIPESELTKIGAELHYTQRGGDITFHGPHQAILYPIISLRSIGFGARNYVETLERSMIEFASIYGVKARAGNKCETGVWVGDRKIGAIGVRISSGITSHGLALNIDPDMKYFEHIVPCGIADKEVTSLRRETDTLLPSEEVIHEQLVSCLAKAFSYDDVVWKEDPSLILDTQDKE

SEQ ID NO: 73865 - protein, 119 aa, Arabidopsis thaliana
  peptide (1)..(119): Ceres Seq. ID no. 4983456
  misc_feature (1)..(119): Homolog of NCBI NO: 3122357 NR Description: Probable lipoate-protein ligase (Lipoate protein) (Lipoyl ligase) >gi|25406801|pir||B86179 hypothetical
  misc_feature (1)..(119): Homolog of NCBI NO: 15219770 NR Description: lipoyltransferase; protein id: At1g04640.1, by cDNA: gi_16226270, supported by cDNA: gi_4996285 [Arabidopsis >gi|4996286|dbj|BAA78386.1| lipoyltransferase [Arabidopsis
  misc_feature (1)..(101): Homolog of NCBI NO: 22971103 NR Description: hypothetical protein [Chloroflexus aurantiacus]
  misc_feature (1)..(98): Homolog of NCBI NO: 21355483 NR Description: CG9804-PA [Drosophila melanogaster]
  misc_feature (1)..(103): Homolog of NCBI NO: 6685619 NR Description: Lipoate-protein ligase B (Lipoate biosynthesis
  misc_feature (1)..(98): Homolog of NCBI NO: 31203215 NR Description: ENSANGP00000017330 [Anopheles gambiae]
  misc_feature (1)..(76): Homolog of NCBI NO: 32565879 NR Description: LiPoate Ligase (27.4 kD) (lpl-1) [Caenorhabditis
  misc_feature (1)..(93): Homolog of NCBI NO: 29346499 NR Description: lipoate-protein ligase B [Bacteroides
  misc_feature (1)..(99): Homolog of NCBI NO: 25028655 NR Description: putative lipoate-protein ligase B
  misc_feature (1)..(99): Homolog of NCBI NO: 29336718 NR Description: Lipoate-protein ligase B (Lipoate biosynthesis
MIEFASIYGVKARAGNKCETGVWVGDRKIGAIGVRISSGITSHGLALNIDPDMKYFEHIVPCGIADKEVTSLRRETDTLLPSEEVIHEQLVSCLAKAFSYDDVVWKEDPSLILDTQDKE

SEQ ID NO: 73866 - DNA, 1698 bp, Arabidopsis thaliana
  misc_feature (1)..(1698): Ceres Seq. ID no. 4983563
  misc_feature: MA Experiment ID: 20000227 Result: Up-regulated in Transcription
  misc_feature: MA Experiment 20000227 PARAMETER Experiment Name: At_Root-Tips-vs-Tops_P Parameter: Tissue Value: Root Tips vs. Root Tops
  misc_feature: MA Experiment ID: 20000439 Result: Up-regulated in Transcription
  misc_feature: MA Experiment 20000439 PARAMETER Experiment Name: At_Roots__P Parameter: Age (day) Value: 14 vs. 21
  misc_feature: MA Experiment 20000439 PARAMETER Experiment Name: At_Roots__P Parameter: Organism Value: A. thaliana
  misc_feature: MA Experiment 20000439 PARAMETER Experiment Name: At_Roots__P Parameter: Tissue Value: Roots vs. Whole Plant
atgaattctaacaactggctcgcgttccctctatcaccaactcactcttctttgccgcctcacattcactcttcacaaaattctcatttcaatctaggtttggtcaacgacaatatcgacaacccttttcaaaaccaaggatggaatatgatcaatccacatggtggaggcggcgaaggtggagaggttccaaaagtggctgatttcttaggagtgagcaaatcgggggatcatcacaccgatcacaacctcgtaccttataacgacattcatcaaaccaacgcctccgactactactttcaaaccaatagcttgttacctacagtcgtcacttgtgcctctaatgctcctaataattatgagcttcaagagagtgcacacaatttgcaatctctcactctctctatgggaagtactggagctgccgctgcagaagtcgccactgtgaaagcctcgccggctgagactagtgccgataatagtagcagcactaccaacacaagtggaggagccatcgttgaggctacaccgagacggactttggaaacttttggacaacgaacctctatctatcgtggagttacaagacatagatggaccggtagatatgaagctcatctttgggataatagctgtagaagagaaggacaatcaaggaaaggaagacaaggtgggtatgacaaagaagagaaagcagccagagcatatgatctagctgcacttaaatattggggtccctctactactaccaactttccgataactaactacgagaaggaagtagaggagatgaaaaacatgacgagacaagagtttgtggcttctataagaaggaaaagtagcggattctcgcgtggtgcatccatgtatcgtggagtaacaaggcatcatcaacatggaagatggcaagcaaggatcggccgagttgctggaaacaaagatctctacttgggaacattcagcacggaggaagaagcagcagaagcttatgacatagctgcgataaagtttcgaggtctaaacgcggttacaaactttgagataaatcggtatgatgtgaaagccatcctggagagcaacacacttcctataggaggtggtgcggctaaacggctcaaagaagctcaagctctagaatcatcaagaaaacgagaggaaatgatagccctcggatcaaatttccatcaatatggtgcagcgagcggctcgagctctgttgcttccagctctaggcttcagcttcaaccttaccctctaagcattcaacaaccttttgagcatcttcatcatcatcagcctttacttactctacagaacaacaacgatatctctcagtatcatgattcctttagttacattcagacgcagcttcatcttcaccaacaacaaaccaacaattacttgcagtcttctagtcacacttcacagctctacaatgcttatcttcagagtaaccctggtctgcttcatggatttgtctctgataataacaacacttcagggtttcttggaaacaatgggattggtattgggtcaagctctaccgttggatcatcggctgaggaagagtttccagccgtgaaagtcgattacgatatgcctccttccggtggagctacagggtatggaggatggaatagtggagagtctgctcaaggatcgaatccaggaggtgttttcacgatgtggaatgaataa

SEQ ID NO: 73867 - protein, 565 aa, Arabidopsis thaliana; identical to SEQ ID NO: 70121
  peptide (1)..(565): Ceres Seq. ID no. 4983564
  misc_feature (188)..(258): Pfam Name: AP2 domain Pfam Description: AP2 domain
  misc_feature (1)..(565): Homolog of NCBI NO: 15223777 NR Description: ovule development protein, putative; protein id:
  misc_feature (50)..(565): Homolog of NCBI NO: 25405447 NR Description: hypothetical protein F11M15.6 [imported] - thaliana >gi|4836931|gb|AAD30633.1|AC006085_6 Hypothetical
  misc_feature (39)..(565): Homolog of NCBI NO: 9294411 NR Description: contains similarity to unknown
  misc_feature (50)..(565): Homolog of NCBI NO: 15232375 NR Description: ovule development protein, putative; protein id:
  misc_feature (4)..(563): Homolog of NCBI NO: 21304227 NR Description: ovule development aintegumenta-like protein BNM3
  misc_feature (125)..(424): Homolog of NCBI NO: 32490266 NR Description: OSJNBb0116K07.8 [Oryza sativa (japonica
  misc_feature (117)..(563): Homolog of NCBI NO: 34907686 NR Description: putative ovule development protein
  misc_feature (22)..(432): Homolog of NCBI NO: 21069051 NR Description: AP2/EREBP transcription factor BABY BOOM1 napus] >gi|21069055|gb|AAM33802.1| AP2/EREBP transcription factor
  misc_feature (22)..(407): Homolog of NCBI NO: 21069053 NR Description: AP2/EREBP transcription factor BABY BOOM2
  misc_feature (22)..(374): Homolog of NCBI NO: 15237965 NR Description: ovule development protein, putative; protein id: [Arabidopsis thaliana] >gi|11358596|pir||T51580 ovule development

SEQ ID NO: 73868 - protein, 516 aa, Arabidopsis thaliana
  peptide (1)..(516): Ceres Seq. ID no. 4983565
  misc_feature (139)..(209): Pfam Name: AP2 domain Pfam Description: AP2 domain
  misc_feature (1)..(516): Homolog of NCBI NO: 15223777 NR Description: ovule development protein, putative; protein id:
  misc_feature (1)..(516): Homolog of NCBI NO: 25405447 NR Description: hypothetical protein F11M15.6 [imported] - thaliana >gi|4836931|gb|AAD30633.1|AC006085_6 Hypothetical
  misc_feature (1)..(516): Homolog of NCBI NO: 9294411 NR Description: contains similarity to unknown
  misc_feature (1)..(516): Homolog of NCBI NO: 15232375 NR Description: ovule development protein, putative; protein id:
  misc_feature (1)..(514): Homolog of NCBI NO: 21304227 NR Description: ovule development aintegumenta-like protein BNM3
  misc_feature (76)..(375): Homolog of NCBI NO: 32490266 NR Description: OSJNBb0116K07.8 [Oryza sativa (japonica
  misc_feature (68)..(514): Homolog of NCBI NO: 34907686 NR Description: putative ovule development protein
  misc_feature (1)..(383): Homolog of NCBI NO: 21069051 NR Description: AP2/EREBP transcription factor BABY BOOM1 napus] >gi|21069055|gb|AAM33802.1| AP2/EREBP transcription factor
  misc_feature (1)..(358): Homolog of NCBI NO: 21069053 NR Description: AP2/EREBP transcription factor BABY BOOM2
  misc_feature (1)..(325): Homolog of NCBI NO: 15237965 NR Description: ovule development protein, putative; protein id: [Arabidopsis thaliana] >gi|11358596|pir||T51580 ovule development
MINPHGGGGEGGEVPKVADFLGVSKSGDHHTDHNLVPYNDIHQTNASDYYFQTNSLLPTVVTCASNAPNNYELQESAHNLQSLTLSMGSTGAAAAEVATVKASPAETSADNSSSTTNTSGGAIVEATPRRTLETFGQRTSIYRGVTRHRWTGRYEAHLWDNSCRREGQSRKGRQGGYDKEEKAARAYDLAALKYWGPSTTTNFPITNYEKEVEEMKNMTRQEFVASIRRKSSGFSRGASMYRGVTRHHQHGRWQARIGRVAGNKDLYLGTFSTEEEAAEAYDIAAIKFRGLNAVTNFEINRYDVKAILESNTLPIGGGAAKRLKEAQALESSRKREEMIALGSNFHQYGAASGSSSVASSSRLQLQPYPLSIQQPFEHLHHHQPLLTLQNNNDISQYHDSFSYIQTQLHLHQQQTNNYLQSSSHTSQLYNAYLQSNPGLLHGFVSDNNNTSGFLGNNGIGIGSSSTVGSSAEEEFPAVKVDYDMPPSGGATGYGGWNSGESAQGSNPGGVFTMWNE

SEQ ID NO: 73869 - protein, 430 aa, Arabidopsis thaliana
  peptide (1)..(430): Ceres Seq. ID no. 4983566
  misc_feature (53)..(123): Pfam Name: AP2 domain Pfam Description: AP2 domain
  misc_feature (1)..(430): Homolog of NCBI NO: 15223777 NR Description: ovule development protein, putative; protein id:
  misc_feature (1)..(430): Homolog of NCBI NO: 25405447 NR Description: hypothetical protein F11M15.6 [imported] - thaliana >gi|4836931|gb|AAD30633.1|AC006085_6 Hypothetical
  misc_feature (1)..(430): Homolog of NCBI NO: 9294411 NR Description: contains similarity to unknown
  misc_feature (1)..(430): Homolog of NCBI NO: 15232375 NR Description: ovule development protein, putative; protein id:
  misc_feature (1)..(428): Homolog of NCBI NO: 21304227 NR Description: ovule development aintegumenta-like protein BNM3
  misc_feature (1)..(289): Homolog of NCBI NO: 32490266 NR Description: OSJNBb0116K07.8 [Oryza sativa (japonica
  misc_feature (1)..(428): Homolog of NCBI NO: 34907686 NR Description: putative ovule development protein
  misc_feature (1)..(297): Homolog of NCBI NO: 21069051 NR Description: AP2/EREBP transcription factor BABY BOOM1 napus] >gi|21069055|gb|AAM33802.1| AP2/EREBP transcription factor
  misc_feature (1)..(272): Homolog of NCBI NO: 21069053 NR Description: AP2/EREBP transcription factor BABY BOOM2
  misc_feature (1)..(239): Homolog of NCBI NO: 15237965 NR Description: ovule development protein, putative; protein id: [Arabidopsis thaliana] >gi|11358596|pir||T51580 ovule development
MGSTGAAAAEVATVKASPAETSADNSSSTTNTSGGAIVEATPRRTLETFGQRTSIYRGVTRHRWTGRYEAHLWDNSCRREGQSRKGRQGGYDKEEKAARAYDLAALKYWGPSTTTNFPITNYEKEVEEMKNMTRQEFVASIRRKSSGFSRGASMYRGVTRHHQHGRWQARIGRVAGNKDLYLGTFSTEEEAAEAYDIAAIKFRGLNAVTNFEINRYDVKAILESNTLPIGGGAAKRLKEAQALESSRKREEMIALGSNFHQYGAASGSSSVASSSRLQLQPYPLSIQQPFEHLHHHQPLLTLQNNNDISQYHDSFSYIQTQLHLHQQQTNNYLQSSSHTSQLYNAYLQSNPGLLHGFVSDNNNTSGFLGNNGIGIGSSSTVGSSAEEEFPAVKVDYDMPPSGGATGYGGWNSGESAQGSNPGGVFTMWNE

SEQ ID NO: 73870 - DNA, 1269 bp, Arabidopsis thaliana
  misc_feature (1)..(1269): Ceres Seq. ID no. 4983857
  misc_feature: MA Experiment ID: 20000184 Result: Down-regulated in Transcription
  misc_feature: MA Experiment 20000184 PARAMETER Experiment Name: At_Shoots__P Parameter: Age (day) Value: 7
  misc_feature: MA Experiment 20000184 PARAMETER Experiment Name: At_Shoots__P Parameter: Tissue Value: Shoots vs. Whole Plant
  misc_feature: MA Experiment ID: 20000185 Result: Down-regulated in Transcription
  misc_feature: MA Experiment 20000185 PARAMETER Experiment Name: At_Roots__P Parameter: Age (day) Value: 7 vs. 21
  misc_feature: MA Experiment 20000185 PARAMETER Experiment Name: At_Roots__P Parameter: Organism Value: A. thaliana
  misc_feature: MA Experiment 20000185 PARAMETER Experiment Name: At_Roots__P Parameter: Tissue Value: Roots vs. Whole Plant
  misc_feature: MA Experiment ID: 20000234 Result: Down-regulated in Transcription
  misc_feature: MA Experiment 20000234 PARAMETER Experiment Name: At_Siliques_P Parameter: Age (day) Value: 21
  misc_feature: MA Experiment 20000234 PARAMETER Experiment Name: At_Siliques_P Parameter: Organism Value: A. thaliana
  misc_feature: MA Experiment 20000234 PARAMETER Experiment Name: At_Siliques_P Parameter: Plant Line Value: WS
  misc_feature: MA Experiment 20000234 PARAMETER Experiment Name: At_Siliques_P Parameter: Tissue Value: Less Than 5mm Siliques vs. Whole Plant
  misc_feature: MA Experiment ID: 20000235 Result: Down-regulated in Transcription
  misc_feature: MA Experiment 20000235 PARAMETER Experiment Name: At_Siliques_P Parameter: Age (day) Value: 21
  misc_feature: MA Experiment 20000235 PARAMETER Experiment Name: At_Siliques_P Parameter: Organism Value: A. thaliana
  misc_feature: MA Experiment 20000235 PARAMETER Experiment Name: At_Siliques_P Parameter: Plant Line Value: WS
  misc_feature: MA Experiment 20000235 PARAMETER Experiment Name: At_Siliques_P Parameter: Tissue Value: 5-10mm Siliques vs. Whole Plant
  misc_feature: MA Experiment ID: 20000264 Result: Down-regulated in Transcription
  misc_feature: MA Experiment 20000264 PARAMETER Experiment Name: At_Open_Flower_P Parameter: Age (day) Value: 21
  misc_feature: MA Experiment 20000264 PARAMETER Experiment Name: At_Open_Flower_P Parameter: Plant Line Value: WS
  misc_feature: MA Experiment 20000264 PARAMETER Experiment Name: At_Open_Flower_P Parameter: Tissue Value: Open Flower vs. Whole Plant
  misc_feature: MA Experiment ID: 20000286 Result: Down-regulated in Transcription
  misc_feature: MA Experiment 20000286 PARAMETER Experiment Name: At_Open_Flower_P Parameter: Age (day) Value: 21
  misc_feature: MA Experiment 20000286 PARAMETER Experiment Name: At_Open_Flower_P Parameter: Plant Line Value: WS
  misc_feature: MA Experiment 20000286 PARAMETER Experiment Name: At_Open_Flower_P Parameter: Tissue Value: Half Open vs. Whole Plant
  misc_feature: MA Experiment ID: 20000437 Result: Up-regulated in Transcription
  misc_feature: MA Experiment 20000437 PARAMETER Experiment Name: At_Drought_P Parameter: Age (day) Value: 8
  misc_feature: MA Experiment 20000437 PARAMETER Experiment Name: At_Drought_P Parameter: Organism Value: A. thaliana
  misc_feature: MA Experiment 20000437 PARAMETER Experiment Name: At_Drought_P Parameter: Plant Line Value: WS
  misc_feature: MA Experiment 20000437 PARAMETER Experiment Name: At_Drought_P Parameter: Timepoint (hr) Value: 24
  misc_feature: MA Experiment 20000437 PARAMETER Experiment Name: At_Drought_P Parameter: Tissue Value: Whole Plant
  misc_feature: MA Experiment 20000437 PARAMETER Experiment Name: At_Drought_P Parameter: Treatment Value: Drought vs. No Drought
  misc_feature: MA Experiment ID: 20000438 Result: Down-regulated in Transcription
  misc_feature: MA Experiment 20000438 PARAMETER Experiment Name: At_Shoots__P Parameter: Age (day) Value: 14
  misc_feature: MA Experiment 20000438 PARAMETER Experiment Name: At_Shoots__P Parameter: Tissue Value: Shoots vs. Whole Plant
  misc_feature: MA Experiment ID: 20000439 Result: Down-regulated in Transcription
  misc_feature: MA Experiment 20000439 PARAMETER Experiment Name: At_Roots__P Parameter: Age (day) Value: 14 vs. 21
  misc_feature: MA Experiment 20000439 PARAMETER Experiment Name: At_Roots__P Parameter: Organism Value: A. thaliana
  misc_feature: MA Experiment 20000439 PARAMETER Experiment Name: At_Roots__P Parameter: Tissue Value: Roots vs. Whole Plant
  misc_feature: MA Experiment ID: 20000453 Result: Up-regulated in Transcription
  misc_feature: MA Experiment 20000453 PARAMETER Experiment Name: At_100uM_ABA_P Parameter: Age (day) Value: 15
  misc_feature: MA Experiment 20000453 PARAMETER Experiment Name: At_100uM_ABA_P Parameter: Organism Value: A. thaliana
  misc_feature: MA Experiment 20000453 PARAMETER Experiment Name: At_100uM_ABA_P Parameter: Plant Line Value: WS
  misc_feature: MA Experiment 20000453 PARAMETER Experiment Name: At_100uM_ABA_P Parameter: Timepoint (hr) Value: 24
  misc_feature: MA Experiment 20000453 PARAMETER Experiment Name: At_100uM_ABA_P Parameter: Tissue Value: Aerial
  misc_feature: MA Experiment 20000453 PARAMETER Experiment Name: At_100uM_ABA_P Parameter: Treatment Value: 100uM ABA vs. No Treatment
  misc_feature: MA Experiment ID: 20001554 Result: Up-regulated in Transcription
  misc_feature: MA Experiment 20001554 PARAMETER Experiment Name: At_Drought_Soil_Dry_P Parameter: Age (day) Value: 21
  misc_feature: MA Experiment 20001554 PARAMETER Experiment Name: At_Drought_Soil_Dry_P Parameter: Organism Value: A. thaliana
  misc_feature: MA Experiment 20001554 PARAMETER Experiment Name: At_Drought_Soil_Dry_P Parameter: Plant Line Value: WS
  misc_feature: MA Experiment 20001554 PARAMETER Experiment Name: At_Drought_Soil_Dry_P Parameter: Post Timepoint (hr) Value: None
  misc_feature: MA Experiment 20001554 PARAMETER Experiment Name: At_Drought_Soil_Dry_P Parameter: Post-Treatment Value: None
  misc_feature: MA Experiment 20001554 PARAMETER Experiment Name: At_Drought_Soil_Dry_P Parameter: Timepoint (day) Value: 7
  misc_feature: MA Experiment 20001554 PARAMETER Experiment Name: At_Drought_Soil_Dry_P Parameter: Treatment Value: Drought vs. No Drought
  misc_feature: MA Experiment ID: 20001555 Result: Up-regulated in Transcription
  misc_feature: MA Experiment 20001555 PARAMETER Experiment Name: At_Drought_Soil_Dry_P Parameter: Age (day) Value: 24
  misc_feature: MA Experiment 20001555 PARAMETER Experiment Name: At_Drought_Soil_Dry_P Parameter: Organism Value: A. thaliana
  misc_feature: MA Experiment 20001555 PARAMETER Experiment Name: At_Drought_Soil_Dry_P Parameter: Plant Line Value: WS
  misc_feature: MA Experiment 20001555 PARAMETER Experiment Name: At_Drought_Soil_Dry_P Parameter: Post Timepoint (hr) Value: None
  misc_feature: MA Experiment 20001555 PARAMETER Experiment Name: At_Drought_Soil_Dry_P Parameter: Post-Treatment Value: None
  misc_feature: MA Experiment 20001555 PARAMETER Experiment Name: At_Drought_Soil_Dry_P Parameter: Timepoint (day) Value: 10
  misc_feature: MA Experiment 20001555 PARAMETER Experiment Name: At_Drought_Soil_Dry_P Parameter: Treatment Value: Drought vs. No Drought
atgggtggagaagagagatcaggagatggagaaaaaagaggggaagaagtagttgatgctggttctctcttcgtccttaaatccaaaggatgggctgccgggatatcttgtctggtcggaggagcagccgttactttctactcgtacactcttctttctcttactctcgaacaccacgcttctctcggcaaccgttacctccgcttccgtgacatggctcatcacatcctcagtccgaaatggggaaggtactacgttggaccaatacaaatggcggtgtgctatggtgtggttattgccaatgcgctcttgggagggcaatgcctaaaggcaatgtacttggtagtgcagccaaatggggaaatgaaactctttgagtttgtgattatttttggatgcttacttttggttttggcacaattcccatcctttcactctctacgatacatcaactcactgtctctcctcctctgcctcctctacagtgcttctgccgctgctgcatccatctacattggaaaagaaccaaatgcaccagagaaggactatactatagttggtgatccagaaactagagtgtttggaatctttaatgctatggctattattgctactacatacggcaatggcattatacctgaaattcaggcaacaatatcggcaccagtgaaaggaaaaatgatgaaagggttgtgtatgtgttaccttgtagtaataatgacatttttcacagtagccatcacaggatattgggcattcggtaaaaaagccaatggacttatcttcaccaatttcttaaatgccgagacaaaccattactttgtccctacttggtttatttttctcgtcaatctcttcactgtccttcaactttcggccgttgctgtggtatacctacaacctataaacgatattttggaaagtgtgatcagcgatccaacaaagaaagaattctctatccgcaatgtcatccctcgactagttgtgcgttccctcttcgtcgtgatggctacaatcgttgcggcaatgcttccattttttggagatgtaaactccttgttaggcgctttcggttttatacctctagacttcgttcttcctgtagttttcttcaactttactttcaagccgtctaaaaaaagtttcattttttggatcaacactgtgatcgccgtggttttttcgtgtttaggggtgattgctatggtagcggcggttagacagattataatagatgccaatacgtataagttgtttgcggatgtataa

SEQ ID NO: 73871 - protein, 422 aa, Arabidopsis thaliana
  peptide (1)..(422): Ceres Seq. ID no. 4983858
  misc_feature (1)..(422): Homolog of NCBI NO: 6579208 NR Description: T23G18.9 [Arabidopsis thaliana]
  misc_feature (91)..(422): Homolog of NCBI NO: 30680565 NR Description: amino acid transporter family [Arabidopsis
  misc_feature (24)..(422): Homolog of NCBI NO: 34908432 NR Description: OJ1402_H07.15 [Oryza sativa (japonica
  misc_feature (19)..(420): Homolog of NCBI NO: 10177364 NR Description: amino acid permease-like protein; proline
  misc_feature (24)..(420): Homolog of NCBI NO: 18422139 NR Description: amino acid permease-like protein; proline protein; protein id: At5g41800.1, supported by cDNA: 20725., by cDNA: gi_20466437 [Arabidopsis thaliana]
  misc_feature (24)..(420): Homolog of NCBI NO: 21554158 NR Description: amino acid permease-like protein [Arabidopsis
  misc_feature (81)..(421): Homolog of NCBI NO: 34912776 NR Description: P0407B12.25 [Oryza sativa (japonica
  misc_feature (24)..(77): Homolog of NCBI NO: 34912776 NR Description: P0407B12.25 [Oryza sativa (japonica
  misc_feature (19)..(422): Homolog of NCBI NO: 37534336 NR Description: putative proline transporter 1 [Oryza sativa
  misc_feature (17)..(420): Homolog of NCBI NO: 30409136 NR Description: histidine amino acid transporter [Oryza sativa
MGGEERSGDGEKRGEEVVDAGSLFVLKSKGWAAGISCLVGGAAVTFYSYTLLSLTLEHHASLGNRYLRFRDMAHHILSPKWGRYYVGPIQMAVCYGVVIANALLGGQCLKAMYLVVQPNGEMKLFEFVIIFGCLLLVLAQFPSFHSLRYINSLSLLLCLLYSASAAAASIYIGKEPNAPEKDYTIVGDPETRVFGIFNAMAIIATTYGNGIIPEIQATISAPVKGKMMKGLCMCYLVVIMTFFTVAITGYWAFGKKANGLIFTNFLNAETNHYFVPTWFIFLVNLFTVLQLSAVAVVYLQPINDILESVISDPTKKEFSIRNVIPRLVVRSLFVVMATIVAAMLPFFGDVNSLLGAFGFIPLDFVLPVVFFNFTFKPSKKSFIFWINTVIAVVFSCLGVIAMVAAVRQIIIDANTYKLFADV

SEQ ID NO: 73872 - protein, 351 aa, Arabidopsis thaliana; identical to SEQ ID NO: 71004
  peptide (1)..(351): Ceres Seq. ID no. 4983859
  misc_feature (1)..(351): Homolog of NCBI NO: 6579208 NR Description: T23G18.9 [Arabidopsis thaliana]
  misc_feature (20)..(351): Homolog of NCBI NO: 30680565 NR Description: amino acid transporter family [Arabidopsis
  misc_feature (1)..(351): Homolog of NCBI NO: 34908432 NR Description: OJ1402_H07.15 [Oryza sativa (japonica
  misc_feature (1)..(349): Homolog of NCBI NO: 10177364 NR Description: amino acid permease-like protein; proline
  misc_feature (1)..(349): Homolog of NCBI NO: 18422139 NR Description: amino acid permease-like protein; proline protein; protein id: At5g41800.1, supported by cDNA: 20725., by cDNA: gi_20466437 [Arabidopsis thaliana]
  misc_feature (1)..(349): Homolog of NCBI NO: 21554158 NR Description: amino acid permease-like protein [Arabidopsis
  misc_feature (10)..(350): Homolog of NCBI NO: 34912776 NR Description: P0407B12.25 [Oryza sativa (japonica
  misc_feature (1)..(351): Homolog of NCBI NO: 37534336 NR Description: putative proline transporter 1 [Oryza sativa
  misc_feature (1)..(349): Homolog of NCBI NO: 30409136 NR Description: histidine amino acid transporter [Oryza sativa
  misc_feature (1)..(351): Homolog of NCBI NO: 16215723 NR Description: proline transporter [Hordeum vulgare subsp.

SEQ ID NO: 73873 - protein, 332 aa, Arabidopsis thaliana; identical to SEQ ID NO: 71005
  peptide (1)..(332): Ceres Seq. ID no. 4983860
  misc_feature (1)..(332): Homolog of NCBI NO: 6579208 NR Description: T23G18.9 [Arabidopsis thaliana]
  misc_feature (1)..(332): Homolog of NCBI NO: 30680565 NR Description: amino acid transporter family [Arabidopsis
  misc_feature (1)..(332): Homolog of NCBI NO: 34908432 NR Description: OJ1402_H07.15 [Oryza sativa (japonica
  misc_feature (1)..(330): Homolog of NCBI NO: 10177364 NR Description: amino acid permease-like protein; proline
  misc_feature (1)..(330): Homolog of NCBI NO: 18422139 NR Description: amino acid permease-like protein; proline protein; protein id: At5g41800.1, supported by cDNA: 20725., by cDNA: gi_20466437 [Arabidopsis thaliana]
  misc_feature (1)..(330): Homolog of NCBI NO: 21554158 NR Description: amino acid permease-like protein [Arabidopsis
  misc_feature (1)..(331): Homolog of NCBI NO: 34912776 NR Description: P0407B12.25 [Oryza sativa (japonica
  misc_feature (1)..(332): Homolog of NCBI NO: 37534336 NR Description: putative proline transporter 1 [Oryza sativa
  misc_feature (1)..(330): Homolog of NCBI NO: 30409136 NR Description: histidine amino acid transporter [Oryza sativa
  misc_feature (1)..(332): Homolog of NCBI NO: 16215723 NR Description: proline transporter [Hordeum vulgare subsp.

SEQ ID NO: 73874 - DNA, 879 bp, Arabidopsis thaliana
  misc_feature (1)..(879): Ceres Seq. ID no. 4983871
  misc_feature: MA Experiment ID: 20000234 Result: Down-regulated in Transcription
  misc_feature: MA Experiment 20000234 PARAMETER Experiment Name: At_Siliques_P Parameter: Age (day) Value: 21
  misc_feature: MA Experiment 20000234 PARAMETER Experiment Name: At_Siliques_P Parameter: Organism Value: A. thaliana
  misc_feature: MA Experiment 20000234 PARAMETER Experiment Name: At_Siliques_P Parameter: Plant Line Value: WS
  misc_feature: MA Experiment 20000234 PARAMETER Experiment Name: At_Siliques_P Parameter: Tissue Value: Less Than 5mm Siliques vs. Whole Plant
  misc_feature: MA Experiment ID: 20000235 Result: Down-regulated in Transcription
  misc_feature: MA Experiment 20000235 PARAMETER Experiment Name: At_Siliques_P Parameter: Age (day) Value: 21
  misc_feature: MA Experiment 20000235 PARAMETER Experiment Name: At_Siliques_P Parameter: Organism Value: A. thaliana
  misc_feature: MA Experiment 20000235 PARAMETER Experiment Name: At_Siliques_P Parameter: Plant Line Value: WS
  misc_feature: MA Experiment 20000235 PARAMETER Experiment Name: At_Siliques_P Parameter: Tissue Value: 5-10mm Siliques vs. Whole Plant
  misc_feature: MA Experiment ID: 20000265 Result: Down-regulated in Transcription
  misc_feature: MA Experiment 20000265 PARAMETER Experiment Name: At_Open_Flower_P Parameter: Age (day) Value: 21
  misc_feature: MA Experiment 20000265 PARAMETER Experiment Name: At_Open_Flower_P Parameter: Plant Line Value: WS
  misc_feature: MA Experiment 20000265 PARAMETER Experiment Name: At_Open_Flower_P Parameter: Tissue Value: Closed Flower vs. Whole Plant
  misc_feature: MA Experiment ID: 20000286 Result: Down-regulated in Transcription
  misc_feature: MA Experiment 20000286 PARAMETER Experiment Name: At_Open_Flower_P Parameter: Age (day) Value: 21
  misc_feature: MA Experiment 20000286 PARAMETER Experiment Name: At_Open_Flower_P Parameter: Plant Line Value: WS
  misc_feature: MA Experiment 20000286 PARAMETER Experiment Name: At_Open_Flower_P Parameter: Tissue Value: Half Open vs. Whole Plant
  misc_feature: MA Experiment ID: 20000438 Result: Down-regulated in Transcription
  misc_feature: MA Experiment 20000438 PARAMETER Experiment Name: At_Shoots__P Parameter: Age (day) Value: 14
  misc_feature: MA Experiment 20000438 PARAMETER Experiment Name: At_Shoots__P Parameter: Tissue Value: Shoots vs. Whole Plant
  misc_feature: MA Experiment ID: 20000453 Result: Down-regulated in Transcription
  misc_feature: MA Experiment 20000453 PARAMETER Experiment Name: At_100uM_ABA_P Parameter: Age (day) Value: 15
  misc_feature: MA Experiment 20000453 PARAMETER Experiment Name: At_100uM_ABA_P Parameter: Organism Value: A. thaliana
  misc_feature: MA Experiment 20000453 PARAMETER Experiment Name: At_100uM_ABA_P Parameter: Plant Line Value: WS
  misc_feature: MA Experiment 20000453 PARAMETER Experiment Name: At_100uM_ABA_P Parameter: Timepoint (hr) Value: 24
  misc_feature: MA Experiment 20000453 PARAMETER Experiment Name: At_100uM_ABA_P Parameter: Tissue Value: Aerial
  misc_feature: MA Experiment 20000453 PARAMETER Experiment Name: At_100uM_ABA_P Parameter: Treatment Value: 100uM ABA vs. No Treatment
  misc_feature: MA Experiment ID: 20000527 Result: Down-regulated in Transcription
  misc_feature: MA Experiment 20000527 PARAMETER Experiment Name: At_10percent_PEG_P Parameter: Age (day) Value: 20
  misc_feature: MA Experiment 20000527 PARAMETER Experiment Name: At_10percent_PEG_P Parameter: Organism Value: A. thaliana
  misc_feature: MA Experiment 20000527 PARAMETER Experiment Name: At_10percent_PEG_P Parameter: Plant Line Value: WS
  misc_feature: MA Experiment 20000527 PARAMETER Experiment Name: At_10percent_PEG_P Parameter: Timepoint (day) Value: 20
  misc_feature: MA Experiment 20000527 PARAMETER Experiment Name: At_10percent_PEG_P Parameter: Tissue Value: Whole Plant
  misc_feature: MA Experiment 20000527 PARAMETER Experiment Name: At_10percent_PEG_P Parameter: Treatment Value: 10percent PEG vs. No Treatment
  misc_feature: MA Experiment ID: 20000573 Result: Down-regulated in Transcription
  misc_feature: MA Experiment 20000573 PARAMETER Experiment Name: At_100uM_ABA_Mutants__P Parameter: Organism Value: A. thaliana
  misc_feature: MA Experiment 20000573 PARAMETER Experiment Name: At_100uM_ABA_Mutants__P Parameter: Plant Line Value: CS22 vs. Ler wt
  misc_feature: MA Experiment 20000573 PARAMETER Experiment Name: At_100uM_ABA_Mutants__P Parameter: Timepoint (hr) Value: N/A
  misc_feature: MA Experiment 20000573 PARAMETER Experiment Name: At_100uM_ABA_Mutants__P Parameter: Tissue Value: Whole Plant
  misc_feature: MA Experiment 20000573 PARAMETER Experiment Name: At_100uM_ABA_Mutants__P Parameter: Treatment Value: None
  misc_feature: MA Experiment ID: 20000574 Result: Down-regulated in Transcription
  misc_feature: MA Experiment 20000574 PARAMETER Experiment Name: At_100uM_ABA_Mutants__P Parameter: Organism Value: A. thaliana
  misc_feature: MA Experiment 20000574 PARAMETER Experiment Name: At_100uM_ABA_Mutants__P Parameter: Plant Line Value: CS23 vs. Ler wt
  misc_feature: MA Experiment 20000574 PARAMETER Experiment Name: At_100uM_ABA_Mutants__P Parameter: Timepoint (hr) Value: N/A
  misc_feature: MA Experiment 20000574 PARAMETER Experiment Name: At_100uM_ABA_Mutants__P Parameter: Tissue Value: Whole Plant
  misc_feature: MA Experiment 20000574 PARAMETER Experiment Name: At_100uM_ABA_Mutants__P Parameter: Treatment Value: None
  misc_feature: MA Experiment ID: 20001451 Result: Up-regulated in Transcription
  misc_feature: MA Experiment 20001451 PARAMETER Experiment Name: At_Far-red-induction_P Parameter: Age (day) Value: 7
  misc_feature: MA Experiment 20001451 PARAMETER Experiment Name: At_Far-red-induction_P Parameter: Light Value: Far-red vs. White
  misc_feature: MA Experiment 20001451 PARAMETER Experiment Name: At_Far-red-induction_P Parameter: Organism Value: A. thaliana
  misc_feature: MA Experiment 20001451 PARAMETER Experiment Name: At_Far-red-induction_P Parameter: Plant Line Value: Columbia
  misc_feature: MA Experiment 20001451 PARAMETER Experiment Name: At_Far-red-induction_P Parameter: Timepoint (hr) Value: 24
  misc_feature: MA Experiment 20001451 PARAMETER Experiment Name: At_Far-red-induction_P Parameter: Tissue Value: Whole Plant
  misc_feature: MA Experiment ID: 20001555 Result: Up-regulated in Transcription
  misc_feature: MA Experiment 20001555 PARAMETER Experiment Name: At_Drought_Soil_Dry_P Parameter: Age (day) Value: 24
  misc_feature: MA Experiment 20001555 PARAMETER Experiment Name: At_Drought_Soil_Dry_P Parameter: Organism Value: A. thaliana
  misc_feature: MA Experiment 20001555 PARAMETER Experiment Name: At_Drought_Soil_Dry_P Parameter: Plant Line Value: WS
  misc_feature: MA Experiment 20001555 PARAMETER Experiment Name: At_Drought_Soil_Dry_P Parameter: Post Timepoint (hr) Value: None
  misc_feature: MA Experiment 20001555 PARAMETER Experiment Name: At_Drought_Soil_Dry_P Parameter: Post-Treatment Value: None
  misc_feature: MA Experiment 20001555 PARAMETER Experiment Name: At_Drought_Soil_Dry_P Parameter: Timepoint (day) Value: 10
  misc_feature: MA Experiment 20001555 PARAMETER Experiment Name: At_Drought_Soil_Dry_P Parameter: Treatment Value: Drought vs. No Drought
  misc_feature: MA Experiment ID: 20001556 Result: Up-regulated in Transcription
  misc_feature: MA Experiment 20001556 PARAMETER Experiment Name: At_Drought_Soil_Dry_P Parameter: Age (day) Value: 26
  misc_feature: MA Experiment 20001556 PARAMETER Experiment Name: At_Drought_Soil_Dry_P Parameter: Organism Value: A. thaliana
  misc_feature: MA Experiment 20001556 PARAMETER Experiment Name: At_Drought_Soil_Dry_P Parameter: Plant Line Value: WS
  misc_feature: MA Experiment 20001556 PARAMETER Experiment Name: At_Drought_Soil_Dry_P Parameter: Post Timepoint (hr) Value: None
  misc_feature: MA Experiment 20001556 PARAMETER Experiment Name: At_Drought_Soil_Dry_P Parameter: Post-Treatment Value: None
  misc_feature: MA Experiment 20001556 PARAMETER Experiment Name: At_Drought_Soil_Dry_P Parameter: Timepoint (day) Value: 12
  misc_feature: MA Experiment 20001556 PARAMETER Experiment Name: At_Drought_Soil_Dry_P Parameter: Treatment Value: Drought vs. No Drought
  misc_feature: MA Experiment ID: 20001559 Result: Up-regulated in Transcription
  misc_feature: MA Experiment 20001559 PARAMETER Experiment Name: At_Drought_Soil_Dry_P Parameter: Age (day) Value: 28
  misc_feature: MA Experiment 20001559 PARAMETER Experiment Name: At_Drought_Soil_Dry_P Parameter: Organism Value: A. thaliana
  misc_feature: MA Experiment 20001559 PARAMETER Experiment Name: At_Drought_Soil_Dry_P Parameter: Plant Line Value: WS
  misc_feature: MA Experiment 20001559 PARAMETER Experiment Name: At_Drought_Soil_Dry_P Parameter: Post Timepoint (hr) Value: 29
  misc_feature: MA Experiment 20001559 PARAMETER Experiment Name: At_Drought_Soil_Dry_P Parameter: Post-Treatment Value: Re-Water vs. No Drought
  misc_feature: MA Experiment 20001559 PARAMETER Experiment Name: At_Drought_Soil_Dry_P Parameter: Timepoint (day) Value: 14
  misc_feature: MA Experiment 20001559 PARAMETER Experiment Name: At_Drought_Soil_Dry_P Parameter: Treatment Value: Drought vs. No Drought
  misc_feature: MA Experiment ID: 20001761 Result: Down-regulated in Transcription
  misc_feature: MA Experiment 20001761 PARAMETER Experiment Name: At_50mM_NH4NO3_L-to-H_P Parameter: Timepoint (hr) Value: 4
  misc_feature: MA Experiment 20001761 PARAMETER Experiment Name: At_50mM_NH4NO3_L-to-H_P Parameter: Tissue Value: Siliques
  misc_feature: MA Experiment 20001761 PARAMETER Experiment Name: At_50mM_NH4NO3_L-to-H_P Parameter: Treatment Value: 50mM NH4NO3 vs 100mM Mannitol
  misc_feature: MA Experiment ID: 20001904 Result: Up-regulated in Transcription
  misc_feature: MA Experiment 20001904 PARAMETER Experiment Name: At_Drought_Reproduction_P Parameter: Age (day) Value: 37
  misc_feature: MA Experiment 20001904 PARAMETER Experiment Name: At_Drought_Reproduction_P Parameter: Organism Value: A. thaliana
  misc_feature: MA Experiment 20001904 PARAMETER Experiment Name: At_Drought_Reproduction_P Parameter: Plant Line Value: WS
  misc_feature: MA Experiment 20001904 PARAMETER Experiment Name: At_Drought_Reproduction_P Parameter: Timepoint (day) Value: 7
  misc_feature: MA Experiment 20001904 PARAMETER Experiment Name: At_Drought_Reproduction_P Parameter: Tissue Value: Rosettes
  misc_feature: MA Experiment 20001904 PARAMETER Experiment Name: At_Drought_Reproduction_P Parameter: Treatment Value: Drought vs. No Drought
  misc_feature: MA Experiment ID: 20001905 Result: Up-regulated in Transcription
  misc_feature: MA Experiment 20001905 PARAMETER Experiment Name: At_Drought_Reproduction_P Parameter: Age (day) Value: 40
  misc_feature: MA Experiment 20001905 PARAMETER Experiment Name: At_Drought_Reproduction_P Parameter: Organism Value: A. thaliana
  misc_feature: MA Experiment 20001905 PARAMETER Experiment Name: At_Drought_Reproduction_P Parameter: Plant Line Value: WS
  misc_feature: MA Experiment 20001905 PARAMETER Experiment Name: At_Drought_Reproduction_P Parameter: Timepoint (day) Value: 10
  misc_feature: MA Experiment 20001905 PARAMETER Experiment Name: At_Drought_Reproduction_P Parameter: Tissue Value: Rosettes
  misc_feature: MA Experiment 20001905 PARAMETER Experiment Name: At_Drought_Reproduction_P Parameter: Treatment Value: Drought vs. No Drought
atgggggattctcctgctagttcaaatagagttaagcttcgggatgggagattcttagcttataaagaaagaggagttccaaaggaaaaggccaaatacaagatcattcttgttcatggctttggaagctccaaagatatgaacttctctgcctcaaaagagcttatagaagaacttgaggtgtacttgctattctacgaccgttctggatatggagcatcagattcaaacacaaaacgttcgttggaaagcgaagttgaagacatagcagaacttgcagatcagctggagttaggacctaagttatccggcgtggcttttgttgctccggtggttaattatcgatggccttcacttccgaagaagctaatcaaaaaagattataggacaggtattatcaaatggggtttgaggatatcaaaatatgcacctggactgttacattggtggatcattcaaaagctcttcgcttcaactagttcggtccttgaaagcaatccggtctacttcaacagccacgacatagaagtgctcaagcgaaaaactggttttcccatgcttactaaggaaaagctacgggaaagaaatgttttcgatactctaagggacgattttatggtttgtttcgggcaatgggacttcgaacccgcggatctaagcatcagtacaaagagctatattcacatctggcatggtaaggaagacaaagttgttccatttcaacttcaaagatgcattctgcagaaacaacctttgatcaactaccacgaaatcccccaaggcggacatctgatcgtacactacgatggcatttgcgatacgattctacgtgcactattgctcaaggaagaacaacaaaagctgtataaaataaattga

SEQ ID NO: 73875 - protein, 292 aa, Arabidopsis thaliana
  peptide (1)..(292): Ceres Seq. ID no. 4983872
  misc_feature (101)..(284): Pfam Name: alpha/beta hydrolase fold Pfam Description: alpha/beta hydrolase fold
  misc_feature (1)..(292): Homolog of NCBI NO: 15223177 NR Description: unknown protein; protein id: At1g08310.1
  misc_feature (1)..(288): Homolog of NCBI NO: 25407040 NR Description: protein T23G18.18 [imported] - Arabidopsis >gi|6579201|gb|AAF18244.1|AC011438_6 T23G18.18 [Arabidopsis
  misc_feature (12)..(167): Homolog of NCBI NO: 6664302 NR Description: T27G7.1 [Arabidopsis thaliana]
  misc_feature (190)..(292): Homolog of NCBI NO: 6664302 NR Description: T27G7.1 [Arabidopsis thaliana]
  misc_feature (108)..(290): Homolog of NCBI NO: 15229984 NR Description: putative protein; protein id: At3g44510.1
  misc_feature (101)..(281): Homolog of NCBI NO: 15242253 NR Description: putative protein; protein id: At5g22460.1, by cDNA: gi_15292740, supported by cDNA: gi_20465594 [Arabidopsis
  misc_feature (5)..(101): Homolog of NCBI NO: 15242253 NR Description: putative protein; protein id: At5g22460.1, by cDNA: gi_15292740, supported by cDNA: gi_20465594 [Arabidopsis
  misc_feature (101)..(288): Homolog of NCBI NO: 34908462 NR Description: P0683F02.22 [Oryza sativa (japonica
  misc_feature (2)..(101): Homolog of NCBI NO: 34908462 NR Description: P0683F02.22 [Oryza sativa (japonica
  misc_feature (101)..(279): Homolog of NCBI NO: 22122901 NR Description: hypothetical protein [Oryza sativa (japonica
MGDSPASSNRVKLRDGRFLAYKERGVPKEKAKYKIILVHGFGSSKDMNFSASKELIEELEVYLLFYDRSGYGASDSNTKRSLESEVEDIAELADQLELGPKLSGVAFVAPVVNYRWPSLPKKLIKKDYRTGIIKWGLRISKYAPGLLHWWIIQKLFASTSSVLESNPVYFNSHDIEVLKRKTGFPMLTKEKLRERNVFDTLRDDFMVCFGQWDFEPADLSISTKSYIHIWHGKEDKVVPFQLQRCILQKQPLINYHEIPQGGHLIVHYDGICDTILRALLLKEEQQKLYKIN

SEQ ID NO: 73876 - protein, 246 aa, Arabidopsis thaliana
  peptide (1)..(246): Ceres Seq. ID no. 4983873
  misc_feature (55)..(238): Pfam Name: alpha/beta hydrolase fold Pfam Description: alpha/beta hydrolase fold
  misc_feature (1)..(246): Homolog of NCBI NO: 15223177 NR Description: unknown protein; protein id: At1g08310.1
  misc_feature (1)..(242): Homolog of NCBI NO: 25407040 NR Description: protein T23G18.18 [imported] - Arabidopsis >gi|6579201|gb|AAF18244.1|AC011438_6 T23G18.18 [Arabidopsis
  misc_feature (1)..(121): Homolog of NCBI NO: 6664302 NR Description: T27G7.1 [Arabidopsis thaliana]
  misc_feature (144)..(246): Homolog of NCBI NO: 6664302 NR Description: T27G7.1 [Arabidopsis thaliana]
  misc_feature (62)..(244): Homolog of NCBI NO: 15229984 NR Description: putative protein; protein id: At3g44510.1
  misc_feature (55)..(235): Homolog of NCBI NO: 15242253 NR Description: putative protein; protein id: At5g22460.1, by cDNA: gi_15292740, supported by cDNA: gi_20465594 [Arabidopsis
  misc_feature (1)..(55): Homolog of NCBI NO: 15242253 NR Description: putative protein; protein id: At5g22460.1, by cDNA: gi_15292740, supported by cDNA: gi_20465594 [Arabidopsis
  misc_feature (55)..(242): Homolog of NCBI NO: 34908462 NR Description: P0683F02.22 [Oryza sativa (japonica
  misc_feature (1)..(55): Homolog of NCBI NO: 34908462 NR Description: P0683F02.22 [Oryza sativa (japonica
  misc_feature (55)..(233): Homolog of NCBI NO: 22122901 NR Description: hypothetical protein [Oryza sativa (japonica
MNFSASKELIEELEVYLLFYDRSGYGASDSNTKRSLESEVEDIAELADQLELGPKLSGVAFVAPVVNYRWPSLPKKLIKKDYRTGIIKWGLRISKYAPGLLHWWIIQKLFASTSSVLESNPVYFNSHDIEVLKRKTGFPMLTKEKLRERNVFDTLRDDFMVCFGQWDFEPADLSISTKSYIHIWHGKEDKVVPFQLQRCILQKQPLINYHEIPQGGHLIVHYDGICDTILRALLLKEEQQKLYKIN

SEQ ID NO: 73877 - DNA, 2184 bp, Arabidopsis thaliana
  misc_feature (1)..(2184): Ceres Seq. ID no. 4983896
  misc_feature: MA Experiment ID: 20000307 Result: Down-regulated in Transcription
  misc_feature: MA Experiment 20000307 PARAMETER Experiment Name: At_Germinating_Seeds_Sub_P Parameter: Age (hr) Value: 24 vs. 0
  misc_feature: MA Experiment 20000307 PARAMETER Experiment Name: At_Germinating_Seeds_Sub_P Parameter: Organism Value: A. thaliana
  misc_feature: MA Experiment 20000307 PARAMETER Experiment Name: At_Germinating_Seeds_Sub_P Parameter: Plant Line Value: WS
  misc_feature: MA Experiment 20000307 PARAMETER Experiment Name: At_Germinating_Seeds_Sub_P Parameter: Tissue Value: Germinating Seeds
  misc_feature: MA Experiment ID: 20000328 Result: Down-regulated in Transcription
  misc_feature: MA Experiment 20000328 PARAMETER Experiment Name: At_42deg_Heat_Sub_P Parameter: Age (day) Value: 14
  misc_feature: MA Experiment 20000328 PARAMETER Experiment Name: At_42deg_Heat_Sub_P Parameter: Organism Value: A. thaliana
  misc_feature: MA Experiment 20000328 PARAMETER Experiment Name: At_42deg_Heat_Sub_P Parameter: Plant Line Value: WS
  misc_feature: MA Experiment 20000328 PARAMETER Experiment Name: At_42deg_Heat_Sub_P Parameter: Temperature (deg C) Value: 42 vs. 22
  misc_feature: MA Experiment 20000328 PARAMETER Experiment Name: At_42deg_Heat_Sub_P Parameter: Timepoint (hr) Value: 6
  misc_feature: MA Experiment 20000328 PARAMETER Experiment Name: At_42deg_Heat_Sub_P Parameter: Tissue Value: Aerial
atgcatccaagtacctttcaaacagaactcaacccgcatacttccacgttattaaaaaaactgactcatcattcacagcaaaggaacctcgtggctggacgtgcagttcatggacagatcatcagaacgggagcatcaacctgcatccaacatgccaatgtccttgtcaacttttatgcaaaatgtggaaaattggccaaagcccactccatctttaacgccataatctgcaaggatgttgtgtcctggaacagtctcatcactggctattctcagaacggcggtatctccagctcctacactgttatgcagctgtttcgtgagatgagagcgcaagatatactgccaaatgcttatacccttgctgggatttttaaggccgagtcgagtcttcaaagttctacagttgggaggcaggctcacgcgctagtggtcaaaatgtcaagttttggggatatatatgttgatacttcgttggtgggcatgtactgtaaagcgggcttggtcgaggatggacttaaagtgttcgcctatatgcctgaaagaaatacttatacatggtctactatggtttctggttatgctacaagaggacgcgttgaagaggcaattaaagtcttcaatttgtttcttagagagaaggaggaaggaagtgatagtgactatgtcttcaccgcggttctcagctcgctggctgcaaccatatacgtaggactaggcaggcaaatccattgcatcacaattaaaaatgggttgcttgggtttgtagctttgagtaatgcgcttgttacaatgtattcaaagtgtgagagcttgaatgaggcatgcaagatgtttgactcgtctggtgacagaaattcgattacatggtcagcaatggtcactggttattctcagaatggggaatcacttgaagcagtaaagcttttctctagaatgttttctgctggaatcaagcccagtgaatacacgattgttggggttcttaatgcatgcagtgacatttgctatctagaagaagggaagcaacttcattctttcttgttaaagttgggatttgaaagacatttatttgcaactactgctttggttgacatgtatgcaaaagccggttgtctagcagatgccagaaaaggttttgactgcctacaagaacgtgatgtggcgctttggacatcgcttattagcgggtatgttcaaaactcagataacgaagaggctttgattctgtaccgcagaatgaaaacagcaggtattatcccaaacgacccaaccatggcaagtgttctaaaagcttgctcttctctagctaccttggagctcggaaagcaagtacacggccacacaatcaagcatgggtttgggcttgaagttccaataggaagcgcactttctacaatgtactcaaagtgtgggagtttagaagatgggaacctcgtctttagaagaactcccaataaagatgttgtgtcttggaacgctatgatctcaggcttgtcccataatggacaaggagatgaggctttggaactgtttgaggagatgttagcagaaggaatggaaccagatgatgtcactttcgtgaacattatatcagcgtgtagccacaaaggttttgtagagagaggctggttttatttcaatatgatgtcagatcagatcgggcttgatccaaaagttgaccactatgcttgtatggttgatctgctgagccgtgcaggacagctcaaagaggcaaaagagttcatcgaatcagctaatattgatcacggtttatgcctttggcggatactattaagcgcatgtaagaaccatgggaaatgtgagctaggagtttacgcaggagagaagctcatggcccttggatcgagagaatcatcaacttatgtgcaattgtcaggcatttacacggctttagggcggatgagagatgtggaacgggtttggaaacacatgagagcaaacggggtgagcaaagaagtgggttgcagttggatcgagctgaagaatcagtaccatgtttttgttgtgggagatacaatgcatccgatgattgaagagacgaaggatttggtttgtttggttagtagacagatgatagaagaaggattcgtaactgtgttggattcgtcttttgtcgaagaagaagaaggaacacaattatctacttctttcataatataa

SEQ ID NO: 73878 - protein, 727 aa, Arabidopsis thaliana
  peptide (1)..(727): Ceres Seq. ID no. 4983897
  misc_feature (525)..(558): Pfam Name: PPR repeat Pfam Description: PPR repeat
  misc_feature (33)..(715): Homolog of NCBI NO: 34914806 NR Description: B1045D11.13 [Oryza sativa (japonica
  misc_feature (12)..(686): Homolog of NCBI NO: 38423978 NR Description: PPR-repeat protein-like [Oryza sativa (japonica
  misc_feature (260)..(721): Homolog of NCBI NO: 15237421 NR Description: putative protein; protein id: At5g16860.1
  misc_feature (34)..(319): Homolog of NCBI NO: 15237421 NR Description: putative protein; protein id: At5g16860.1
  misc_feature (9)..(717): Homolog of NCBI NO: 15234006 NR Description: putative protein; protein id: At4g18750.1
  misc_feature (40)..(682): Homolog of NCBI NO: 15235115 NR Description: putative protein; protein id: At4g39530.1
  misc_feature (10)..(719): Homolog of NCBI NO: 37536800 NR Description: putative PPR-repeat protein [Oryza sativa
  misc_feature (15)..(703): Homolog of NCBI NO: 15232006 NR Description: hypothetical protein; protein id: At3g09040.1 thaliana] >gi|5923669|gb|AAD56320.1|AC009326_7 hypothetical
  misc_feature (9)..(720): Homolog of NCBI NO: 15232885 NR Description: hypothetical protein; protein id: At3g02330.1
  misc_feature (33)..(716): Homolog of NCBI NO: 15226200 NR Description: putative selenium-binding protein; protein id:
MHPSTFQTELNPHTSTLLKKLTHHSQQRNLVAGRAVHGQIIRTGASTCIQHANVLVNFYAKCGKLAKAHSIFNAIICKDVVSWNSLITGYSQNGGISSSYTVMQLFREMRAQDILPNAYTLAGIFKAESSLQSSTVGRQAHALVVKMSSFGDIYVDTSLVGMYCKAGLVEDGLKVFAYMPERNTYTWSTMVSGYATRGRVEEAIKVFNLFLREKEEGSDSDYVFTAVLSSLAATIYVGLGRQIHCITIKNGLLGFVALSNALVTMYSKCESLNEACKMFDSSGDRNSITWSAMVTGYSQNGESLEAVKLFSRMFSAGIKPSEYTIVGVLNACSDICYLEEGKQLHSFLLKLGFERHLFATTALVDMYAKAGCLADARKGFDCLQERDVALWTSLISGYVQNSDNEEALILYRRMKTAGIIPNDPTMASVLKACSSLATLELGKQVHGHTIKHGFGLEVPIGSALSTMYSKCGSLEDGNLVFRRTPNKDVVSWNAMISGLSHNGQGDEALELFEEMLAEGMEPDDVTFVNIISACSHKGFVERGWFYFNMMSDQIGLDPKVDHYACMVDLLSRAGQLKEAKEFIESANIDHGLCLWRILLSACKNHGKCELGVYAGEKLMALGSRESSTYVQLSGIYTALGRMRDVERVWKHMRANGVSKEVGCSWIELKNQYHVFVVGDTMHPMIEETKDLVCLVSRQMIEEGFVTVLDSSFVEEEEGTQLSTSFII

SEQ ID NO: 73879 - protein, 625 aa, Arabidopsis thaliana
  peptide (1)..(625): Ceres Seq. ID no. 4983898
  misc_feature (423)..(456): Pfam Name: PPR repeat Pfam Description: PPR repeat
  misc_feature (1)..(613): Homolog of NCBI NO: 34914806 NR Description: B1045D11.13 [Oryza sativa (japonica
  misc_feature (1)..(584): Homolog of NCBI NO: 38423978 NR Description: PPR-repeat protein-like [Oryza sativa (japonica
  misc_feature (158)..(619): Homolog of NCBI NO: 15237421 NR Description: putative protein; protein id: At5g16860.1
  misc_feature (1)..(217): Homolog of NCBI NO: 15237421 NR Description: putative protein; protein id: At5g16860.1
  misc_feature (1)..(615): Homolog of NCBI NO: 15234006 NR Description: putative protein; protein id: At4g18750.1
  misc_feature (1)..(580): Homolog of NCBI NO: 15235115 NR Description: putative protein; protein id: At4g39530.1
  misc_feature (1)..(617): Homolog of NCBI NO: 37536800 NR Description: putative PPR-repeat protein [Oryza sativa
  misc_feature (1)..(601): Homolog of NCBI NO: 15232006 NR Description: hypothetical protein; protein id: At3g09040.1 thaliana] >gi|5923669|gb|AAD56320.1|AC009326_7 hypothetical
  misc_feature (1)..(618): Homolog of NCBI NO: 15232885 NR Description: hypothetical protein; protein id: At3g02330.1
  misc_feature (1)..(614): Homolog of NCBI NO: 15226200 NR Description: putative selenium-binding protein; protein id:
MQLFREMRAQDILPNAYTLAGIFKAESSLQSSTVGRQAHALVVKMSSFGDIYVDTSLVGMYCKAGLVEDGLKVFAYMPERNTYTWSTMVSGYATRGRVEEAIKVFNLFLREKEEGSDSDYVFTAVLSSLAATIYVGLGRQIHCITIKNGLLGFVALSNALVTMYSKCESLNEACKMFDSSGDRNSITWSAMVTGYSQNGESLEAVKLFSRMFSAGIKPSEYTIVGVLNACSDICYLEEGKQLHSFLLKLGFERHLFATTALVDMYAKAGCLADARKGFDCLQERDVALWTSLISGYVQNSDNEEALILYRRMKTAGIIPNDPTMASVLKACSSLATLELGKQVHGHTIKHGFGLEVPIGSALSTMYSKCGSLEDGNLVFRRTPNKDVVSWNAMISGLSHNGQGDEALELFEEMLAEGMEPDDVTFVNIISACSHKGFVERGWFYFNMMSDQIGLDPKVDHYACMVDLLSRAGQLKEAKEFIESANIDHGLCLWRILLSACKNHGKCELGVYAGEKLMALGSRESSTYVQLSGIYTALGRMRDVERVWKHMRANGVSKEVGCSWIELKNQYHVFVVGDTMHPMIEETKDLVCLVSRQMIEEGFVTVLDSSFVEEEEGTQLSTSFII

SEQ ID NO: 73880 - protein, 619 aa, Arabidopsis thaliana
  peptide (1)..(619): Ceres Seq. ID no. 4983899
  misc_feature (417)..(450): Pfam Name: PPR repeat Pfam Description: PPR repeat
  misc_feature (1)..(607): Homolog of NCBI NO: 34914806 NR Description: B1045D11.13 [Oryza sativa (japonica
  misc_feature (1)..(578): Homolog of NCBI NO: 38423978 NR Description: PPR-repeat protein-like [Oryza sativa (japonica
  misc_feature (152)..(613): Homolog of NCBI NO: 15237421 NR Description: putative protein; protein id: At5g16860.1
  misc_feature (1)..(211): Homolog of NCBI NO: 15237421 NR Description: putative protein; protein id: At5g16860.1
  misc_feature (1)..(609): Homolog of NCBI NO: 15234006 NR Description: putative protein; protein id: At4g18750.1
  misc_feature (1)..(574): Homolog of NCBI NO: 15235115 NR Description: putative protein; protein id: At4g39530.1
  misc_feature (1)..(611): Homolog of NCBI NO: 37536800 NR Description: putative PPR-repeat protein [Oryza sativa
  misc_feature (1)..(595): Homolog of NCBI NO: 15232006 NR Description: hypothetical protein; protein id: At3g09040.1 thaliana] >gi|5923669|gb|AAD56320.1|AC009326_7 hypothetical
  misc_feature (1)..(612): Homolog of NCBI NO: 15232885 NR Description: hypothetical protein; protein id: At3g02330.1
  misc_feature (1)..(608): Homolog of NCBI NO: 15226200 NR Description: putative selenium-binding protein; protein id:
MRAQDILPNAYTLAGIFKAESSLQSSTVGRQAHALVVKMSSFGDIYVDTSLVGMYCKAGLVEDGLKVFAYMPERNTYTWSTMVSGYATRGRVEEAIKVFNLFLREKEEGSDSDYVFTAVLSSLAATIYVGLGRQIHCITIKNGLLGFVALSNALVTMYSKCESLNEACKMFDSSGDRNSITWSAMVTGYSQNGESLEAVKLFSRMFSAGIKPSEYTIVGVLNACSDICYLEEGKQLHSFLLKLGFERHLFATTALVDMYAKAGCLADARKGFDCLQERDVALWTSLISGYVQNSDNEEALILYRRMKTAGIIPNDPTMASVLKACSSLATLELGKQVHGHTIKHGFGLEVPIGSALSTMYSKCGSLEDGNLVFRRTPNKDVVSWNAMISGLSHNGQGDEALELFEEMLAEGMEPDDVTFVNIISACSHKGFVERGWFYFNMMSDQIGLDPKVDHYACMVDLLSRAGQLKEAKEFIESANIDHGLCLWRILLSACKNHGKCELGVYAGEKLMALGSRESSTYVQLSGIYTALGRMRDVERVWKHMRANGVSKEVGCSWIELKNQYHVFVVGDTMHPMIEETKDLVCLVSRQMIEEGFVTVLDSSFVEEEEGTQLSTSFII

SEQ ID NO: 73881 - DNA, 552 bp, Arabidopsis thaliana
  misc_feature (1)..(552): Ceres Seq. ID no. 4983933
  misc_feature: MA Experiment ID: 20000180 Result: Up-regulated in Transcription
  misc_feature: MA Experiment 20000180 PARAMETER Experiment Name: At_Germinating_Seeds_P Parameter: Age (hr) Value: 24 vs. 0
  misc_feature: MA Experiment 20000180 PARAMETER Experiment Name: At_Germinating_Seeds_P Parameter: Tissue Value: Germinating Seeds
atgtggaagaatcgacgcggagggtttcttctacttggatcaacgacattgttatggttcctctttgagaaatgtggatacagtttcttcccctttgttgttaatactcagcttctctccgtcgttatactcttcctctgggccaaatctgctattctcttcaataggcctatgcctcaactacctaatcttgaaatcactgaggaatttgtgtttatggtggctgatgctatacgagtctggattaataccgtgctcgctgttgctcgtgagatttacgtgggaagaaatgcaaagcaactctttcgggtgagtgttgtgttgtggacagtatcatttgttggaaatttcttaaacttcctcacaatactctatcttggtgttgttctgagtctgttgattccctttttgtacgagagataccaggatcttattgacgagaagctatctttaactcatcgagtcattcagacacagtacaggaagatcgatgaaagattactacagaagattattgctaagcccacaaataagataaagaagatgcaatag

SEQ ID NO: 73882 - protein, 183 aa, Arabidopsis thaliana; identical to SEQ ID NO: 70871
  peptide (1)..(183): Ceres Seq. ID no. 4983934
  misc_feature (1)..(183): Homolog of NCBI NO: 25411624 NR Description: hypothetical protein At2g15280 [imported] - thaliana >gi|4662633|gb|AAD26905.1| hypothetical protein
  misc_feature (1)..(183): Homolog of NCBI NO: 30679374 NR Description: expressed protein [Arabidopsis thaliana]
  misc_feature (1)..(162): Homolog of NCBI NO: 18402246 NR Description: expressed protein; protein id: At3g19460.1, by cDNA: 37065. [Arabidopsis thaliana] gb|AAD26905.1~gene_id:MLD14.20~similar to unknown protein
  misc_feature (1)..(162): Homolog of NCBI NO: 21593206 NR Description: unknown [Arabidopsis thaliana]
  misc_feature (1)..(156): Homolog of NCBI NO: 38345298 NR Description: OSJNBa0043A12.26 [Oryza sativa (japonica
  misc_feature (1)..(180): Homolog of NCBI NO: 18406991 NR Description: expressed protein; protein id: At2g46170.1, by cDNA: gi_15450758, supported by cDNA: gi_18491130 [Arabidopsis >gi|25408969|pir||E84899 hypothetical protein At2g46170
  misc_feature (1)..(181): Homolog of NCBI NO: 15238125 NR Description: putative protein; protein id: At5g41600.1, by cDNA: gi_14334529, supported by cDNA: gi_16323068 [Arabidopsis >gi|10178014|dbj|BAB11466.1| contains similarity to 24 kDa seed
  misc_feature (1)..(174): Homolog of NCBI NO: 15222616 NR Description: hypothetical protein; protein id: At1g64090.1, by cDNA: gi_17381217 [Arabidopsis thaliana] F22C12.15 [Arabidopsis thaliana] >gi|17381218|gb|AAL36421.1|
  misc_feature (1)..(181): Homolog of NCBI NO: 15236556 NR Description: putative protein; protein id: At4g23630.1, by cDNA: 39185., supported by cDNA: gi_15215585 [Arabidopsis
  misc_feature (1)..(181): Homolog of NCBI NO: 34904202 NR Description: P0492F05.25 [Oryza sativa (japonica

SEQ ID NO: 73883 - protein, 126 aa, Arabidopsis thaliana; identical to SEQ ID NO: 70872
  peptide (1)..(126): Ceres Seq. ID no. 4983935
  misc_feature (1)..(126): Homolog of NCBI NO: 25411624 NR Description: hypothetical protein At2g15280 [imported] - thaliana >gi|4662633|gb|AAD26905.1| hypothetical protein
  misc_feature (1)..(126): Homolog of NCBI NO: 30679374 NR Description: expressed protein [Arabidopsis thaliana]
  misc_feature (1)..(105): Homolog of NCBI NO: 18402246 NR Description: expressed protein; protein id: At3g19460.1, by cDNA: 37065. [Arabidopsis thaliana] gb|AAD26905.1~gene_id:MLD14.20~similar to unknown protein
  misc_feature (1)..(105): Homolog of NCBI NO: 21593206 NR Description: unknown [Arabidopsis thaliana]
  misc_feature (1)..(99): Homolog of NCBI NO: 38345298 NR Description: OSJNBa0043A12.26 [Oryza sativa (japonica
  misc_feature (1)..(123): Homolog of NCBI NO: 18406991 NR Description: expressed protein; protein id: At2g46170.1, by cDNA: gi_15450758, supported by cDNA: gi_18491130 [Arabidopsis >gi|25408969|pir||E84899 hypothetical protein At2g46170
  misc_feature (1)..(124): Homolog of NCBI NO: 15238125 NR Description: putative protein; protein id: At5g41600.1, by cDNA: gi_14334529, supported by cDNA: gi_16323068 [Arabidopsis >gi|10178014|dbj|BAB11466.1| contains similarity to 24 kDa seed
  misc_feature (1)..(117): Homolog of NCBI NO: 15222616 NR Description: hypothetical protein; protein id: At1g64090.1, by cDNA: gi_17381217 [Arabidopsis thaliana] F22C12.15 [Arabidopsis thaliana] >gi|17381218|gb|AAL36421.1|
  misc_feature (1)..(124): Homolog of NCBI NO: 15236556 NR Description: putative protein; protein id: At4g23630.1, by cDNA: 39185., supported by cDNA: gi_15215585 [Arabidopsis
  misc_feature (1)..(124): Homolog of NCBI NO: 34904202 NR Description: P0492F05.25 [Oryza sativa (japonica

SEQ ID NO: 73884 - protein, 111 aa, Arabidopsis thaliana
  peptide (1)..(111): Ceres Seq. ID no. 4983936
  misc_feature (1)..(111): Homolog of NCBI NO: 25411624 NR Description: hypothetical protein At2g15280 [imported] - thaliana >gi|4662633|gb|AAD26905.1| hypothetical protein
  misc_feature (1)..(111): Homolog of NCBI NO: 30679374 NR Description: expressed protein [Arabidopsis thaliana]
  misc_feature (1)..(90): Homolog of NCBI NO: 18402246 NR Description: expressed protein; protein id: At3g19460.1, by cDNA: 37065. [Arabidopsis thaliana] gb|AAD26905.1~gene_id:MLD14.20~similar to unknown protein
  misc_feature (1)..(90): Homolog of NCBI NO: 21593206 NR Description: unknown [Arabidopsis thaliana]
  misc_feature (1)..(84): Homolog of NCBI NO: 38345298 NR Description: OSJNBa0043A12.26 [Oryza sativa (japonica
  misc_feature (1)..(108): Homolog of NCBI NO: 18406991 NR Description: expressed protein; protein id: At2g46170.1, by cDNA: gi_15450758, supported by cDNA: gi_18491130 [Arabidopsis >gi|25408969|pir||E84899 hypothetical protein At2g46170
  misc_feature (1)..(109): Homolog of NCBI NO: 15238125 NR Description: putative protein; protein id: At5g41600.1, by cDNA: gi_14334529, supported by cDNA: gi_16323068 [Arabidopsis >gi|10178014|dbj|BAB11466.1| contains similarity to 24 kDa seed
  misc_feature (1)..(102): Homolog of NCBI NO: 15222616 NR Description: hypothetical protein; protein id: At1g64090.1, by cDNA: gi_17381217 [Arabidopsis thaliana] F22C12.15 [Arabidopsis thaliana] >gi|17381218|gb|AAL36421.1|
  misc_feature (1)..(109): Homolog of NCBI NO: 15236556 NR Description: putative protein; protein id: At4g23630.1, by cDNA: 39185., supported by cDNA: gi_15215585 [Arabidopsis
  misc_feature (1)..(109): Homolog of NCBI NO: 34904202 NR Description: P0492F05.25 [Oryza sativa (japonica
MVADAIRVWINTVLAVAREIYVGRNAKQLFRVSVVLWTVSFVGNFLNFLTILYLGVVLSLLIPFLYERYQDLIDEKLSLTHRVIQTQYRKIDERLLQKIIAKPTNKIKKMQ

SEQ ID NO: 73885 - DNA, 1502 bp, Arabidopsis thaliana
  misc_feature (1)..(1502): Ceres Seq. ID no. 4983988
  misc_feature: MA Experiment ID: 108573 Result: Up-regulated in Transcription
  misc_feature: MA Experiment 108573 PARAMETER Experiment Name: At_Drought_cDNA_P Parameter: Timepoint (hr) Value: 6
  misc_feature: MA Experiment 108573 PARAMETER Experiment Name: At_Drought_cDNA_P Parameter: Tissue Value: Aerial
  misc_feature: MA Experiment 108573 PARAMETER Experiment Name: At_Drought_cDNA_P Parameter: Treatment Value: Drought vs. No Drought
  misc_feature: MA Experiment ID: 20000224 Result: Down-regulated in Transcription
gattagcaaatattcgtgatattttagctgtatggttttggttccgatcacaaagagcatcgaatcgagctacttcctccgccggctttgctgtgtgtgtgatcgttcgtttactaaatctgaaacaagtatctaacgccttgccggagatgtcgagctcaggccaaactcagttccgttatacacagacgccgtcgaaggtggttcatctgcggaatcttccatgggaatgcgtcgaagaggagctcatcgacctttgcaaacgattcggcaagatcgtcaataccaagagcaatgtcggcgccaatcgcaatcaagctttcgtcgaatttgctgacttgaatcaagctatatcaatggtttcgtattatgcttcatcttcagagcccgcacagattcgtgggaaaactgtctatattcagtactctaatcgccatgagattgttaacaatcagagtcctggagatgtccctggaaatgtcctcttggttacctttgaaggagtggaatctcacgaagtcagcatcgatgttatccatctggtattttctgcttttggatttgtgcataaaattgccacatttgagaaagctgctggtttccaggcactagttcaatttactgatgtggagactgcatccgcggcaaggagtgcgttggatggcagaagtatacccaggtatctgctttccgcacatgttggttcgtgcagtttgcgaatgtcttattcagctcatactgatctcaacatcaagtttcagtcccaccggagcagagattacacaaatccataccttccagtgaatcagaccgcaatggatgggtctatgcagcctgctttaggtgctgacggcaagaaagttgaatctcagagcaacgtccttctcggtttgattgagaatatgcagtatgctgtcactgtggatgttcttcacacggtgttttctgcatatggaactgtccagaagattgctatatttgagaagaatggttcaacgcaagcattaattcaatactctgatataccaacagcagcaatggccaaagaagcactggaaggacactgcatttatgacggtggctactgtaagcttcgactatcatactctcgtcatactgatctgaatgttaaggcttttagcgacaaaagcagagactatacacttcctgatctaagcctacttgtggcacaaaaaggtcccgcggtgtcgggttctgcaccaccagcaggttggcagaacccgcaagcgcaaagtcaatactcaggttatggcggaagcccatatatgtacccatcatctgatcccaacggggcttcaccctcaggtcaacctccttactatggatgagatatttgtttactaaaaatttcggattttgctgccaatggggagtatttccatgtttaggttgtttgaggttaaaagtgtgattgttctttcttttttgttgttgacataatttaagtggggagaccaataataaatcgaatatgttgcgct

SEQ ID NO: 73886 - protein, 448 aa, Arabidopsis thaliana; identical to SEQ ID NO: 27593
  peptide (1)..(448): Ceres Seq. ID no. 4983989
  misc_feature (68)..(139): Pfam Name: RNA recognition motif. (a.k.a. RRM, RBD, or RNP domain) Pfam Description: RNA recognition motif. (a.k.a. RRM, RBD, or RNP
  misc_feature (50)..(448): Homolog of NCBI NO: 15232047 NR Description: polypyrimidine tract-binding protein (PTB); id: At3g01150.1, supported by cDNA: gi_3395937 [Arabidopsis
  misc_feature (50)..(448): Homolog of NCBI NO: 11358627 NR Description: polypyrimidine tract-binding protein homolog
  misc_feature (50)..(444): Homolog of NCBI NO: 18921326 NR Description: putative polypyrimidine tract-binding protein
  misc_feature (50)..(443): Homolog of NCBI NO: 15238677 NR Description: polypyrimidine tract-binding protein (PTB), protein id: At5g53180.1 [Arabidopsis thaliana]
  misc_feature (258)..(447): Homolog of NCBI NO: 34912728 NR Description: putative polypyrimidine tract-binding protein
  misc_feature (52)..(226): Homolog of NCBI NO: 34912728 NR Description: putative polypyrimidine tract-binding protein
  misc_feature (177)..(362): Homolog of NCBI NO: 20260638 NR Description: putative polypyrimidine tract-binding protein
  misc_feature (65)..(392): Homolog of NCBI NO: 22329999 NR Description: heterogeneous nuclear ribonucleoprotein (hnRNP),
  misc_feature (64)..(269): Homolog of NCBI NO: 28949889 NR Description: polypyrimidine track-binding protein homologue
  misc_feature (281)..(446): Homolog of NCBI NO: 31230545 NR Description: ENSANGP00000002751 [Anopheles gambiae]

SEQ ID NO: 73887 - protein, 399 aa, Arabidopsis thaliana; identical to SEQ ID NO: 27594
  peptide (1)..(399): Ceres Seq. ID no. 4983990
  misc_feature (19)..(90): Pfam Name: RNA recognition motif. (a.k.a. RRM, RBD, or RNP domain) Pfam Description: RNA recognition motif. (a.k.a. RRM, RBD, or RNP
  misc_feature (1)..(399): Homolog of NCBI NO: 15232047 NR Description: polypyrimidine tract-binding protein (PTB); id: At3g01150.1, supported by cDNA: gi_3395937 [Arabidopsis
  misc_feature (1)..(399): Homolog of NCBI NO: 11358627 NR Description: polypyrimidine tract-binding protein homolog
  misc_feature (1)..(395): Homolog of NCBI NO: 18921326 NR Description: putative polypyrimidine tract-binding protein
  misc_feature (1)..(394): Homolog of NCBI NO: 15238677 NR Description: polypyrimidine tract-binding protein (PTB), protein id: At5g53180.1 [Arabidopsis thaliana]
  misc_feature (209)..(398): Homolog of NCBI NO: 34912728 NR Description: putative polypyrimidine tract-binding protein
  misc_feature (3)..(177): Homolog of NCBI NO: 34912728 NR Description: putative polypyrimidine tract-binding protein
  misc_feature (128)..(313): Homolog of NCBI NO: 20260638 NR Description: putative polypyrimidine tract-binding protein
  misc_feature (16)..(343): Homolog of NCBI NO: 22329999 NR Description: heterogeneous nuclear ribonucleoprotein (hnRNP),
  misc_feature (15)..(220): Homolog of NCBI NO: 28949889 NR Description: polypyrimidine track-binding protein homologue
  misc_feature (232)..(397): Homolog of NCBI NO: 31230545 NR Description: ENSANGP00000002751 [Anopheles gambiae]

SEQ ID NO: 73888 - protein, 330 aa, Arabidopsis thaliana; identical to SEQ ID NO: 27595
  peptide (1)..(330): Ceres Seq. ID no. 4983991
  misc_feature (1)..(330): Homolog of NCBI NO: 15232047 NR Description: polypyrimidine tract-binding protein (PTB); id: At3g01150.1, supported by cDNA: gi_3395937 [Arabidopsis
  misc_feature (1)..(330): Homolog of NCBI NO: 11358627 NR Description: polypyrimidine tract-binding protein homolog
  misc_feature (1)..(326): Homolog of NCBI NO: 18921326 NR Description: putative polypyrimidine tract-binding protein
  misc_feature (1)..(325): Homolog of NCBI NO: 15238677 NR Description: polypyrimidine tract-binding protein (PTB), protein id: At5g53180.1 [Arabidopsis thaliana]
  misc_feature (140)..(329): Homolog of NCBI NO: 34912728 NR Description: putative polypyrimidine tract-binding protein
  misc_feature (1)..(108): Homolog of NCBI NO: 34912728 NR Description: putative polypyrimidine tract-binding protein
  misc_feature (59)..(244): Homolog of NCBI NO: 20260638 NR Description: putative polypyrimidine tract-binding protein
  misc_feature (1)..(274): Homolog of NCBI NO: 22329999 NR Description: heterogeneous nuclear ribonucleoprotein (hnRNP),
  misc_feature (1)..(151): Homolog of NCBI NO: 28949889 NR Description: polypyrimidine track-binding protein homologue
  misc_feature (163)..(328): Homolog of NCBI NO: 31230545 NR Description: ENSANGP00000002751 [Anopheles gambiae]

SEQ ID NO: 73889 - DNA, 4290 bp, Arabidopsis thaliana
  misc_feature (1)..(4290): Ceres Seq. ID no. 4984083
  misc_feature: MA Experiment ID: 20000227 Result: Up-regulated in Transcription
  misc_feature: MA Experiment 20000227 PARAMETER Experiment Name: At_Root-Tips-vs-Tops_P Parameter: Tissue Value: Root Tips vs. Root Tops
  misc_feature: MA Experiment ID: 20000234 Result: Up-regulated in Transcription
  misc_feature: MA Experiment 20000234 PARAMETER Experiment Name: At_Siliques_P Parameter: Age (day) Value: 21
  misc_feature: MA Experiment 20000234 PARAMETER Experiment Name: At_Siliques_P Parameter: Organism Value: A. thaliana
  misc_feature: MA Experiment 20000234 PARAMETER Experiment Name: At_Siliques_P Parameter: Plant Line Value: WS
  misc_feature: MA Experiment 20000234 PARAMETER Experiment Name: At_Siliques_P Parameter: Tissue Value: Less Than 5mm Siliques vs. Whole Plant
  misc_feature: MA Experiment ID: 20000235 Result: Up-regulated in Transcription
  misc_feature: MA Experiment 20000235 PARAMETER Experiment Name: At_Siliques_P Parameter: Age (day) Value: 21
  misc_feature: MA Experiment 20000235 PARAMETER Experiment Name: At_Siliques_P Parameter: Organism Value: A. thaliana
  misc_feature: MA Experiment 20000235 PARAMETER Experiment Name: At_Siliques_P Parameter: Plant Line Value: WS
  misc_feature: MA Experiment 20000235 PARAMETER Experiment Name: At_Siliques_P Parameter: Tissue Value: 5-10mm Siliques vs. Whole Plant
  misc_feature: MA Experiment ID: 20000264 Result: Up-regulated in Transcription
  misc_feature: MA Experiment 20000264 PARAMETER Experiment Name: At_Open_Flower_P Parameter: Age (day) Value: 21
  misc_feature: MA Experiment 20000264 PARAMETER Experiment Name: At_Open_Flower_P Parameter: Plant Line Value: WS
  misc_feature: MA Experiment 20000264 PARAMETER Experiment Name: At_Open_Flower_P Parameter: Tissue Value: Open Flower vs. Whole Plant
  misc_feature: MA Experiment ID: 20000265 Result: Up-regulated in Transcription
  misc_feature: MA Experiment 20000265 PARAMETER Experiment Name: At_Open_Flower_P Parameter: Age (day) Value: 21
  misc_feature: MA Experiment 20000265 PARAMETER Experiment Name: At_Open_Flower_P Parameter: Plant Line Value: WS
  misc_feature: MA Experiment 20000265 PARAMETER Experiment Name: At_Open_Flower_P Parameter: Tissue Value: Closed Flower vs. Whole Plant
  misc_feature: MA Experiment ID: 20000286 Result: Up-regulated in Transcription
  misc_feature: MA Experiment 20000286 PARAMETER Experiment Name: At_Open_Flower_P Parameter: Age (day) Value: 21
  misc_feature: MA Experiment 20000286 PARAMETER Experiment Name: At_Open_Flower_P Parameter: Plant Line Value: WS
  misc_feature: MA Experiment 20000286 PARAMETER Experiment Name: At_Open_Flower_P Parameter: Tissue Value: Half Open vs. Whole Plant
  misc_feature: MA Experiment ID: 20000437 Result: Down-regulated in Transcription
  misc_feature: MA Experiment 20000437 PARAMETER Experiment Name: At_Drought_P Parameter: Age (day) Value: 8
  misc_feature: MA Experiment 20000437 PARAMETER Experiment Name: At_Drought_P Parameter: Organism Value: A. thaliana
  misc_feature: MA Experiment 20000437 PARAMETER Experiment Name: At_Drought_P Parameter: Plant Line Value: WS
  misc_feature: MA Experiment 20000437 PARAMETER Experiment Name: At_Drought_P Parameter: Timepoint (hr) Value: 24
  misc_feature: MA Experiment 20000437 PARAMETER Experiment Name: At_Drought_P Parameter: Tissue Value: Whole Plant
  misc_feature: MA Experiment 20000437 PARAMETER Experiment Name: At_Drought_P Parameter: Treatment Value: Drought vs. No Drought
  misc_feature: MA Experiment ID: 20000438 Result: Up-regulated in Transcription
  misc_feature: MA Experiment 20000438 PARAMETER Experiment Name: At_Shoots__P Parameter: Age (day) Value: 14
  misc_feature: MA Experiment 20000438 PARAMETER Experiment Name: At_Shoots__P Parameter: Tissue Value: Shoots vs. Whole Plant
  misc_feature: MA Experiment ID: 20000527 Result: Up-regulated in Transcription
  misc_feature: MA Experiment 20000527 PARAMETER Experiment Name: At_10percent_PEG_P Parameter: Age (day) Value: 20
  misc_feature: MA Experiment 20000527 PARAMETER Experiment Name: At_10percent_PEG_P Parameter: Organism Value: A. thaliana
  misc_feature: MA Experiment 20000527 PARAMETER Experiment Name: At_10percent_PEG_P Parameter: Plant Line Value: WS
  misc_feature: MA Experiment 20000527 PARAMETER Experiment Name: At_10percent_PEG_P Parameter: Timepoint (day) Value: 20
  misc_feature: MA Experiment 20000527 PARAMETER Experiment Name: At_10percent_PEG_P Parameter: Tissue Value: Whole Plant
  misc_feature: MA Experiment 20000527 PARAMETER Experiment Name: At_10percent_PEG_P Parameter: Treatment Value: 10percent PEG vs. No Treatment
  misc_feature: MA Experiment ID: 20001450 Result: Down-regulated in Transcription
  misc_feature: MA Experiment 20001450 PARAMETER Experiment Name: At_Far-red-induction_P Parameter: Age (day) Value: 7
  misc_feature: MA Experiment 20001450 PARAMETER Experiment Name: At_Far-red-induction_P Parameter: Light Value: Far-red vs. White
  misc_feature: MA Experiment 20001450 PARAMETER Experiment Name: At_Far-red-induction_P Parameter: Organism Value: A. thaliana
  misc_feature: MA Experiment 20001450 PARAMETER Experiment Name: At_Far-red-induction_P Parameter: Plant Line Value: Columbia
  misc_feature: MA Experiment 20001450 PARAMETER Experiment Name: At_Far-red-induction_P Parameter: Timepoint (hr) Value: 8
  misc_feature: MA Experiment 20001450 PARAMETER Experiment Name: At_Far-red-induction_P Parameter: Tissue Value: Whole Plant
atggcggtttctgcaggggctttagcttttcctgctttatccgttcgcgccactcttaatcctgagattaaagatgaacaagcgaacatcagcagcactacttcttcttcccagaaattcacttacagtcgagcttctcccgccgtccgatggccacatttgaatctccgtgagatttatgattccacaccttcacaaactctttcttctccggtttctcccatcgccggtacaccggattcaggtgatgtcgtcgattcaattgcctcccgcgaggagcaaaagacgaaagatgaaaccgccgtggcgactcggagaaggagagtgaagaagatgaataaagtggcgttgattaaggctaaagactggagagagagagtcaaatttctgacggataagattctaagcttgaaatctaatcagttcgttgctgatattctcgatgctcgtcttgttcagatgactcctactgattactgcttcgtcgtgaaatcagttggtcaagagagttggcaacgagctcttgaggtttttgagtggctcaatctccgtcattggcactctcctaacgctcggatggtggctgctatactcggtgttttgggacggtggaatcaggaatcccttgcggtggagattttcactagggctgagccaaccgtcggagatagggttcaggtgtacaacgcaatgatgggggtttattcacgtagtggtaagttttcgaaagcacaagagctggtcgatgcaatgcgtcagagagggtgtgttccagatcttattagtttcaatactcttatcaacgctaggcttaaatctggtgggttgactccgaatttggctgttgagttattagatatggtgaggaattcgggtcttaggcctgatgctatcacttacaacactcttcttagtgcctgttcgcgggattcgaatttggatggtgcagtgaaggtttttgaggatatggaagctcatcggtgtcagcctgatttgtggacttataatgctatgatttctgtttatggaagatgtgggcttgctgctgaagctgagaggctcttcatggagctggagcttaaaggttttttccctgatgcagtgacatacaactctttgctgtatgcgtttgccagagaaagaaatacggagaaggtgaaggaggtgtaccaacagatgcagaaaatggggtttgggaaagatgagatgacatacaacacgatcattcacatgtatggcaagcagggacaacttgatcttgcgctacagctttataaggacatgaaaggtttgtcgggtaggaaccctgatgctattacttacactgttttgatcgattctcttggaaaagcaaaccgaacagtggaagccgcagctttaatgtctgagatgcttgatgttgggatcaaaccaactctgcagacatacagtgctcttatctgtggttatgccaaggctggaaagcgagaggaggctgaggatactttcagttgcatgttgcgctcaggcactaaacctgataatttagcgtattctgtaatgttggatgtattactaagaggcaacgagacaagaaaggcctggggtttataccgtgatatgatttctgatggtcatacaccgtcttacactctgtatgagttgatgatacttggacttatgaaggaaaacaggtcagatgacattcagaaaaccatcagagacatggaagaattgtgtggcatgaacccactagagatttcatcagtgcttgttaagggcgaatgctttgatctcgctgctagacagttgaaagtggctatcaccaatggctatgaattggaaaacgacactctattgtctatcctgggttcctatagttcatcaggcaggcattcagaagcgtttgagttacttgaatttttgaaagagcatgccagtggatctaaaagacttataactgaagctctaattgttctacattgcaaggtgaacaacttaagcgctgctctagatgaatatttcgctgacccatgtgttcatggctggtgttttggcagttccaccatgtatgagactctattacactgctgtgtagcaaatgaacattatgctgaagcttctcaggttttctctgacctgagactatctggctgcgaagcttcagaaagtgtttgtaaaagcatggttgttgtgtattgcaagcttggctttccagagacagctcatcaagtggttaatcaggctgagacaaaaggcttccactttgcttgttcgcctatgtatactgatatcattgaggcttatggaaaacaaaaactatggcagaaagcggagagtgtggttggcaacctaagacaaagtggacgaacacctgatctgaagacatggaacagcttgatgtcggcttatgctcagtgtggctgttacgagcgggcaagggctatttttaacactatgatgagggatggtccgtctcctactgttgaatccatcaatattttgttgcatgctttgtgtgttgatgggagactcgaggagctctacgttgttgttgaagaattgcaagatatgggctttaagattagcaaaagctccattctcttgatgcttgacgcatttgcccgagctggaaatatctttgaggtaaagaagatatacagtagcatgaaagctgctggttacttacccacaatccgcctttataggatgatgattgagcttctctgcaaagggaaacgagttagagatgctgaaattatggtctctgaaatggaagaggccaatttcaaggttgagcttgctatatggaattccatgctgaagatgtatacggctatcgaggattacaagaagacagttcaagtataccagaggataaaagaaactggactggaaccagacgagaccacttacaatactctgattataatgtattgtagagacagacgaccagaagaagggtacttgcttatgcagcaaatgagaaatcttggtttggacccaaaactggacacatacaagagcttgatctctgcttttggtaagcaaaaatgccttgaacaagctgaacaactgtttgaagagcttctctcaaaaggtttgaaactagaccgttcattttaccacacaatgatgaaaatatcccgagattctggaagcgactccaaggcagagaagttattgcaaatgatgaagaatgcgggaatagaaccaacacttgctacaatgcatctgcttatggtttcatatagttcttcaggaaatccccaagaagctgaaaaagttcttagtaacctgaaagacacagaagtggaactaacaactctgccttatagttcagttattgatgcttaccttcggagcaaagattataacagtggaatagaaaggcttttggaaatgaagaaagagggcctagagccagaccacaggatatggacttgctttgttagggcggcgagtttctccaaggaaaaaattgaagtcatgttgctgcttaaagctcttgaagatattggttttgatcttcctatcaggcttttagctggaagacctgagttgctagtttctgaggtggatggatggttcgagaaactgaaatccatagaggacaatgctgctctcaattttgttaatgctcttttgaatcttctctgggcgtttgaactcagagctactgcatcatgggttttccaattgggaatcaaaaggggtatcttcagtctcgatgtttttagggtggcggacaaggactggggtgcggatttcagaaggctgtctggaggtgcagcacttgatgcatcactggaaggctacccagagtctccaaagtcagttgtcttaatcacagggaccgcagagtacaacggtatatcccttgataaaacgctaaaggcgtgtctttgggaaatgggttctccatttcttccctgcaagacgagaacgggactgctagtggccaaagctcactctctcagaatgtggttgaaggactcgccgttctgcttcgacttggagctaaaagactcggtgtctttaccagaatcaaactcgatggacctgattgacgggtgtttcataagacgtggacttgttcctgcgtttaaccacatcaaagagagacttggtggatttgtgtcaccaaagaagttttcgagactggcgttgctaccagacgagatgagagagcgagtgataaagacagatattgaaggacatagacagaagttagagaagatgaagaagaagaaaatgggcaatgaaacgaatggtattaacactcgaaggaagttcgtcagaagcaagtga

SEQ ID NO: 73890 - protein, 1429 aa, Arabidopsis thaliana
  peptide (1)..(1429): Ceres Seq. ID no. 4984084
  misc_feature (788)..(822): Pfam Name: PPR repeat Pfam Description: PPR repeat
  misc_feature (223)..(1003): Homolog of NCBI NO: 15236546 NR Description: putative protein; protein id: At4g31850.1
  misc_feature (240)..(1136): Homolog of NCBI NO: 15221621 NR Description: unknown protein; protein id: At1g62910.1
  misc_feature (684)..(1168): Homolog of NCBI NO: 6630464 NR Description: F23N19.4 [Arabidopsis thaliana]
  misc_feature (206)..(605): Homolog of NCBI NO: 6630464 NR Description: F23N19.4 [Arabidopsis thaliana]
  misc_feature (527)..(1073): Homolog of NCBI NO: 6630464 NR Description: F23N19.4 [Arabidopsis thaliana]
  misc_feature (225)..(1066): Homolog of NCBI NO: 25404938 NR Description: protein F1N19.15 [imported] - Arabidopsis >gi|6633829|gb|AAF19688.1|AC009519_22 F1N19.15 [Arabidopsis
  misc_feature (153)..(828): Homolog of NCBI NO: 15242557 NR Description: putative protein; protein id: At5g02860.1
  misc_feature (187)..(542): Homolog of NCBI NO: 6630464 NR Description: F23N19.4 [Arabidopsis thaliana]
  misc_feature (143)..(1086): Homolog of NCBI NO: 37534450 NR Description: unknown protein [Oryza sativa (japonica
  misc_feature (161)..(1069): Homolog of NCBI NO: 37534450 NR Description: unknown protein [Oryza sativa (japonica
MAVSAGALAFPALSVRATLNPEIKDEQANISSTTSSSQKFTYSRASPAVRWPHLNLREIYDSTPSQTLSSPVSPIAGTPDSGDVVDSIASREEQKTKDETAVATRRRRVKKMNKVALIKAKDWRERVKFLTDKILSLKSNQFVADILDARLVQMTPTDYCFVVKSVGQESWQRALEVFEWLNLRHWHSPNARMVAAILGVLGRWNQESLAVEIFTRAEPTVGDRVQVYNAMMGVYSRSGKFSKAQELVDAMRQRGCVPDLISFNTLINARLKSGGLTPNLAVELLDMVRNSGLRPDAITYNTLLSACSRDSNLDGAVKVFEDMEAHRCQPDLWTYNAMISVYGRCGLAAEAERLFMELELKGFFPDAVTYNSLLYAFARERNTEKVKEVYQQMQKMGFGKDEMTYNTIIHMYGKQGQLDLALQLYKDMKGLSGRNPDAITYTVLIDSLGKANRTVEAAALMSEMLDVGIKPTLQTYSALICGYAKAGKREEAEDTFSCMLRSGTKPDNLAYSVMLDVLLRGNETRKAWGLYRDMISDGHTPSYTLYELMILGLMKENRSDDIQKTIRDMEELCGMNPLEISSVLVKGECFDLAARQLKVAITNGYELENDTLLSILGSYSSSGRHSEAFELLEFLKEHASGSKRLITEALIVLHCKVNNLSAALDEYFADPCVHGWCFGSSTMYETLLHCCVANEHYAEASQVFSDLRLSGCEASESVCKSMVVVYCKLGFPETAHQVVNQAETKGFHFACSPMYTDIIEAYGKQKLWQKAESVVGNLRQSGRTPDLKTWNSLMSAYAQCGCYERARAIFNTMMRDGPSPTVESINILLHALCVDGRLEELYVVVEELQDMGFKISKSSILLMLDAFARAGNIFEVKKIYSSMKAAGYLPTIRLYRMMIELLCKGKRVRDAEIMVSEMEEANFKVELAIWNSMLKMYTAIEDYKKTVQVYQRIKETGLEPDETTYNTLIIMYCRDRRPEEGYLLMQQMRNLGLDPKLDTYKSLISAFGKQKCLEQAEQLFEELLSKGLKLDRSFYHTMMKISRDSGSDSKAEKLLQMMKNAGIEPTLATMHLLMVSYSSSGNPQEAEKVLSNLKDTEVELTTLPYSSVIDAYLRSKDYNSGIERLLEMKKEGLEPDHRIWTCFVRAASFSKEKIEVMLLLKALEDIGFDLPIRLLAGRPELLVSEVDGWFEKLKSIEDNAALNFVNALLNLLWAFELRATASWVFQLGIKRGIFSLDVFRVADKDWGADFRRLSGGAALDASLEGYPESPKSVVLITGTAEYNGISLDKTLKACLWEMGSPFLPCKTRTGLLVAKAHSLRMWLKDSPFCFDLELKDSVSLPESNSMDLIDGCFIRRGLVPAFNHIKERLGGFVSPKKFSRLALLPDEMRERVIKTDIEGHRQKLEKMKKKKMGNETNGINTRRKFVRSK

SEQ ID NO: 73891 - protein, 1318 aa, Arabidopsis thaliana
  peptide (1)..(1318): Ceres Seq. ID no. 4984085
  misc_feature (677)..(711): Pfam Name: PPR repeat Pfam Description: PPR repeat
  misc_feature (112)..(892): Homolog of NCBI NO: 15236546 NR Description: putative protein; protein id: At4g31850.1
  misc_feature (129)..(1025): Homolog of NCBI NO: 15221621 NR Description: unknown protein; protein id: At1g62910.1
  misc_feature (573)..(1057): Homolog of NCBI NO: 6630464 NR Description: F23N19.4 [Arabidopsis thaliana]
  misc_feature (95)..(494): Homolog of NCBI NO: 6630464 NR Description: F23N19.4 [Arabidopsis thaliana]
  misc_feature (416)..(962): Homolog of NCBI NO: 6630464 NR Description: F23N19.4 [Arabidopsis thaliana]
  misc_feature (114)..(955): Homolog of NCBI NO: 25404938 NR Description: protein F1N19.15 [imported] - Arabidopsis >gi|6633829|gb|AAF19688.1|AC009519_22 F1N19.15 [Arabidopsis
  misc_feature (42)..(717): Homolog of NCBI NO: 15242557 NR Description: putative protein; protein id: At5g02860.1
  misc_feature (76)..(431): Homolog of NCBI NO: 6630464 NR Description: F23N19.4 [Arabidopsis thaliana]
  misc_feature (32)..(975): Homolog of NCBI NO: 37534450 NR Description: unknown protein [Oryza sativa (japonica
  misc_feature (50)..(958): Homolog of NCBI NO: 37534450 NR Description: unknown protein [Oryza sativa (japonica
MNKVALIKAKDWRERVKFLTDKILSLKSNQFVADILDARLVQMTPTDYCFVVKSVGQESWQRALEVFEWLNLRHWHSPNARMVAAILGVLGRWNQESLAVEIFTRAEPTVGDRVQVYNAMMGVYSRSGKFSKAQELVDAMRQRGCVPDLISFNTLINARLKSGGLTPNLAVELLDMVRNSGLRPDAITYNTLLSACSRDSNLDGAVKVFEDMEAHRCQPDLWTYNAMISVYGRCGLAAEAERLFMELELKGFFPDAVTYNSLLYAFARERNTEKVKEVYQQMQKMGFGKDEMTYNTIIHMYGKQGQLDLALQLYKDMKGLSGRNPDAITYTVLIDSLGKANRTVEAAALMSEMLDVGIKPTLQTYSALICGYAKAGKREEAEDTFSCMLRSGTKPDNLAYSVMLDVLLRGNETRKAWGLYRDMISDGHTPSYTLYELMILGLMKENRSDDIQKTIRDMEELCGMNPLEISSVLVKGECFDLAARQLKVAITNGYELENDTLLSILGSYSSSGRHSEAFELLEFLKEHASGSKRLITEALIVLHCKVNNLSAALDEYFADPCVHGWCFGSSTMYETLLHCCVANEHYAEASQVFSDLRLSGCEASESVCKSMVVVYCKLGFPETAHQVVNQAETKGFHFACSPMYTDIIEAYGKQKLWQKAESVVGNLRQSGRTPDLKTWNSLMSAYAQCGCYERARAIFNTMMRDGPSPTVESINILLHALCVDGRLEELYVVVEELQDMGFKISKSSILLMLDAFARAGNIFEVKKIYSSMKAAGYLPTIRLYRMMIELLCKGKRVRDAEIMVSEMEEANFKVELAIWNSMLKMYTAIEDYKKTVQVYQRIKETGLEPDETTYNTLIIMYCRDRRPEEGYLLMQQMRNLGLDPKLDTYKSLISAFGKQKCLEQAEQLFEELLSKGLKLDRSFYHTMMKISRDSGSDSKAEKLLQMMKNAGIEPTLATMHLLMVSYSSSGNPQEAEKVLSNLKDTEVELTTLPYSSVIDAYLRSKDYNSGIERLLEMKKEGLEPDHRIWTCFVRAASFSKEKIEVMLLLKALEDIGFDLPIRLLAGRPELLVSEVDGWFEKLKSIEDNAALNFVNALLNLLWAFELRATASWVFQLGIKRGIFSLDVFRVADKDWGADFRRLSGGAALDASLEGYPESPKSVVLITGTAEYNGISLDKTLKACLWEMGSPFLPCKTRTGLLVAKAHSLRMWLKDSPFCFDLELKDSVSLPESNSMDLIDGCFIRRGLVPAFNHIKERLGGFVSPKKFSRLALLPDEMRERVIKTDIEGHRQKLEKMKKKKMGNETNGINTRRKFVRSK

SEQ ID NO: 73892 - protein, 1276 aa, Arabidopsis thaliana
  peptide (1)..(1276): Ceres Seq. ID no. 4984086
  misc_feature (635)..(669): Pfam Name: PPR repeat Pfam Description: PPR repeat
  misc_feature (70)..(850): Homolog of NCBI NO: 15236546 NR Description: putative protein; protein id: At4g31850.1
  misc_feature (87)..(983): Homolog of NCBI NO: 15221621 NR Description: unknown protein; protein id: At1g62910.1
  misc_feature (531)..(1015): Homolog of NCBI NO: 6630464 NR Description: F23N19.4 [Arabidopsis thaliana]
  misc_feature (53)..(452): Homolog of NCBI NO: 6630464 NR Description: F23N19.4 [Arabidopsis thaliana]
  misc_feature (374)..(920): Homolog of NCBI NO: 6630464 NR Description: F23N19.4 [Arabidopsis thaliana]
  misc_feature (72)..(913): Homolog of NCBI NO: 25404938 NR Description: protein F1N19.15 [imported] - Arabidopsis >gi|6633829|gb|AAF19688.1|AC009519_22 F1N19.15 [Arabidopsis
  misc_feature (1)..(675): Homolog of NCBI NO: 15242557 NR Description: putative protein; protein id: At5g02860.1
  misc_feature (34)..(389): Homolog of NCBI NO: 6630464 NR Description: F23N19.4 [Arabidopsis thaliana]
  misc_feature (1)..(933): Homolog of NCBI NO: 37534450 NR Description: unknown protein [Oryza sativa (japonica
  misc_feature (8)..(916): Homolog of NCBI NO: 37534450 NR Description: unknown protein [Oryza sativa (japonica
MTPTDYCFVVKSVGQESWQRALEVFEWLNLRHWHSPNARMVAAILGVLGRWNQESLAVEIFTRAEPTVGDRVQVYNAMMGVYSRSGKFSKAQELVDAMRQRGCVPDLISFNTLINARLKSGGLTPNLAVELLDMVRNSGLRPDAITYNTLLSACSRDSNLDGAVKVFEDMEAHRCQPDLWTYNAMISVYGRCGLAAEAERLFMELELKGFFPDAVTYNSLLYAFARERNTEKVKEVYQQMQKMGFGKDEMTYNTIIHMYGKQGQLDLALQLYKDMKGLSGRNPDAITYTVLIDSLGKANRTVEAAALMSEMLDVGIKPTLQTYSALICGYAKAGKREEAEDTFSCMLRSGTKPDNLAYSVMLDVLLRGNETRKAWGLYRDMISDGHTPSYTLYELMILGLMKENRSDDIQKTIRDMEELCGMNPLEISSVLVKGECFDLAARQLKVAITNGYELENDTLLSILGSYSSSGRHSEAFELLEFLKEHASGSKRLITEALIVLHCKVNNLSAALDEYFADPCVHGWCFGSSTMYETLLHCCVANEHYAEASQVFSDLRLSGCEASESVCKSMVVVYCKLGFPETAHQVVNQAETKGFHFACSPMYTDIIEAYGKQKLWQKAESVVGNLRQSGRTPDLKTWNSLMSAYAQCGCYERARAIFNTMMRDGPSPTVESINILLHALCVDGRLEELYVVVEELQDMGFKISKSSILLMLDAFARAGNIFEVKKIYSSMKAAGYLPTIRLYRMMIELLCKGKRVRDAEIMVSEMEEANFKVELAIWNSMLKMYTAIEDYKKTVQVYQRIKETGLEPDETTYNTLIIMYCRDRRPEEGYLLMQQMRNLGLDPKLDTYKSLISAFGKQKCLEQAEQLFEELLSKGLKLDRSFYHTMMKISRDSGSDSKAEKLLQMMKNAGIEPTLATMHLLMVSYSSSGNPQEAEKVLSNLKDTEVELTTLPYSSVIDAYLRSKDYNSGIERLLEMKKEGLEPDHRIWTCFVRAASFSKEKIEVMLLLKALEDIGFDLPIRLLAGRPELLVSEVDGWFEKLKSIEDNAALNFVNALLNLLWAFELRATASWVFQLGIKRGIFSLDVFRVADKDWGADFRRLSGGAALDASLEGYPESPKSVVLITGTAEYNGISLDKTLKACLWEMGSPFLPCKTRTGLLVAKAHSLRMWLKDSPFCFDLELKDSVSLPESNSMDLIDGCFIRRGLVPAFNHIKERLGGFVSPKKFSRLALLPDEMRERVIKTDIEGHRQKLEKMKKKKMGNETNGINTRRKFVRSK

SEQ ID NO: 73893 - DNA, 2742 bp, Arabidopsis thaliana
  misc_feature (1)..(2742): Ceres Seq. ID no. 4984244
  misc_feature: MA Experiment ID: 20000180 Result: Up-regulated in Transcription
  misc_feature: MA Experiment 20000180 PARAMETER Experiment Name: At_Germinating_Seeds_P Parameter: Age (hr) Value: 24 vs. 0
  misc_feature: MA Experiment 20000180 PARAMETER Experiment Name: At_Germinating_Seeds_P Parameter: Tissue Value: Germinating Seeds
  misc_feature: MA Experiment ID: 20000265 Result: Up-regulated in Transcription
  misc_feature: MA Experiment 20000265 PARAMETER Experiment Name: At_Open_Flower_P Parameter: Age (day) Value: 21
  misc_feature: MA Experiment 20000265 PARAMETER Experiment Name: At_Open_Flower_P Parameter: Plant Line Value: WS
  misc_feature: MA Experiment 20000265 PARAMETER Experiment Name: At_Open_Flower_P Parameter: Tissue Value: Closed Flower vs. Whole Plant
  misc_feature: MA Experiment ID: 20000286 Result: Up-regulated in Transcription
  misc_feature: MA Experiment 20000286 PARAMETER Experiment Name: At_Open_Flower_P Parameter: Age (day) Value: 21
  misc_feature: MA Experiment 20000286 PARAMETER Experiment Name: At_Open_Flower_P Parameter: Plant Line Value: WS
  misc_feature: MA Experiment 20000286 PARAMETER Experiment Name: At_Open_Flower_P Parameter: Tissue Value: Half Open vs. Whole Plant
  misc_feature: MA Experiment ID: 20000437 Result: Down-regulated in Transcription
  misc_feature: MA Experiment 20000437 PARAMETER Experiment Name: At_Drought_P Parameter: Age (day) Value: 8
  misc_feature: MA Experiment 20000437 PARAMETER Experiment Name: At_Drought_P Parameter: Organism Value: A. thaliana
  misc_feature: MA Experiment 20000437 PARAMETER Experiment Name: At_Drought_P Parameter: Plant Line Value: WS
  misc_feature: MA Experiment 20000437 PARAMETER Experiment Name: At_Drought_P Parameter: Timepoint (hr) Value: 24
  misc_feature: MA Experiment 20000437 PARAMETER Experiment Name: At_Drought_P Parameter: Tissue Value: Whole Plant
  misc_feature: MA Experiment 20000437 PARAMETER Experiment Name: At_Drought_P Parameter: Treatment Value: Drought vs. No Drought
atgaaagttcgtaggaaacttggtggtggttgcggcggagacgtcgttgtttcatggcggacgttcttttggttcgtgattctgtttgtcttctccttcgttctcttctccaccatgtttatttttaaggggaagtttcgtccggtggttcgttcgacgataagcttctcaacggctgttacggcaagggcggttttccgtgagtctatatcgtcttctccggcggttacgattcgtgaagcggtgaaattacctgaacaaactctggttttcctaaaataccctcagtctcgtcggttatttacaaaagacgatctcatttgcgttttctccggttcgtcgaagctacggaaagtgtatccgacggctgtggacagagacaaatttggaggtcagatcgtacggtgtcctgagacgccacgtggctacaccatttcgcttgccgtttcgagatggacgaccgatgatcatctcccggctggaccaactcaccggtatgattggctggtttacgacgccgtgatcgactacgataactctacggtggtttttgtcaaggggcttaatctacggccaggaagagttgctgacgtgtcgagatatgagtgcgtgtacggttgggatttcgcgaaacataatcggttaataagatcagatgtcatcactgcggctcaggagatcgtacggtgtagaacaccgttagctgtgttagacggcccaaaagcggcccgtgggcctgttaaagtctcggttagaatcaaaggaggaaccggaatgcttccttctatcgctcagccggttcggatcattaacccgccgcgaaagaaaccctttcaaatgtgcgtttgcaccatgacccgaaacgcagccgcggttttgagagagtgggtgatgtatcacgccggaattggcgttcaacggtggttcatctatgacaacaacagcgacgacgatatcatcgccgagatcgagaatctcgaaagacgtggttacaacatctctagacatttctggccgtggattaaaactcaggaagccggattctctaattgcgcgatccgtgcaaagagcgattgcgattggattgcgtttatcgacgtcgacgagttcttctacatcccatccggtgaaactctaacttccgtcatcagaaattacacaaccaccgactcaatcggtgaaattcgaacaccttgccacagtttcgggccatcgggtttgagatctcggcctcggagtggagtcacgtcgggatacacttgccgtgtggtgttaccggagagacacaagagcataatccggccggaagcgatgaacgcgacgctgataaacgttgttcaccattttcacctcagagatggattcacgtttgctgacatggataaggatataatggtaatcaaccactacaagtatcaggtgtgggaggttttcaaagagaagttttatcggcgagtcgcgacgtacgtagcggattggcaaaacgaagagaatgtcgggtcaagagatcgagcacccggtttaggaacccgacccgttgaaccatctgattgggctgagagattctgtgaggttaatgatacggggcttagagatcaagtgtttgagaagttcaaagacaaaaaaacgcagcgtttagtttgggaaaaagcggaagaagacgacaatatccagagaatggtgagtgaaacaccattgagagttactaatcgatctggagatggatcaaatggatcaaaggaagtatcgatcgcgagagagaagaatggtgaaaacgcagagatattcatcagcccgagattcaaatcagcggcggctatggcgggttgggacgaagaagatctgataatcgctagctttgtggtagatgatactcctgaaagaagttcttcaaagcgaaggagacgttccaatttgttgtttaaatcaaccccaccttctggttcttcaagaaggaatcagcgtgttaagcaaagtcttgttccgttacctgttattgatcttgataaagtaatcagacatgaagaagaaaaatctgcagagaagaagaaaaagaagagagagatggaaacagaaacaaaagaagagaagaaaatagataaagatgagaagagtttgtcagatcatgttgtgcttccttgcatagataagcttcgagatgaattgtcttgcgcgatttgtcttgagatttgctttgaacctagtactacaacttgtggacacagcttctgcaaaaagtgtttgcgatctgcggcggataagtgtggaaggaaatgccctaaatgcaggcaactaataggaaatggaagatattgtactgtcaatacggttctttggaacacaatccagcttttgttccctaaagaagtcgaagcacagagagctgcttctgctaacttgaaaggcaaggagacaccgagtcctagaaatccgaatcaaaggctaagaagcagaaacagggaaactgcattgtttcaagagaggttacaaagagaggatatttcgagattgcttgtatctgaagagagaagtgagaggagcgaaagaaggaggagaagtacaagtatgaggttggatcaaaatagggatgcagcattagcgatgcggttacagcgacaggagttcgcatcagcttttggcgcaacgacggctgaaacttcttcttcatcggtttctactctgtcgcgagcaagagctaacctgcaagctatggcgtcaagagctgttcgcaggcaaggatga

SEQ ID NO: 73894 - protein, 913 aa, Arabidopsis thaliana
  peptide (1)..(913): Ceres Seq. ID no. 4984245
  misc_feature (168)..(511): Pfam Name: Domain of unknown function Pfam Description: Domain of unknown function
  misc_feature (1)..(558): Homolog of NCBI NO: 7939506 NR Description: gb|AAB61497.1~gene_id:K1G2.5~similar to unknown
  misc_feature (1)..(568): Homolog of NCBI NO: 15237478 NR Description: putative protein; protein id: At5g40720.1, by cDNA: gi_15912254 [Arabidopsis thaliana] contains similarity to unknown
  misc_feature (1)..(568): Homolog of NCBI NO: 15912255 NR Description: AT5g40720/MNF13_240 [Arabidopsis thaliana]
  misc_feature (560)..(913): Homolog of NCBI NO: 11994635 NR Description: gene_id:K1G2.4~ref|NP_008959.1~similar to unknown
  misc_feature (280)..(558): Homolog of NCBI NO: 20453331 NR Description: AT3g27330/K1G2_3 [Arabidopsis thaliana]
  misc_feature (24)..(554): Homolog of NCBI NO: 13877765 NR Description: unknown protein [Arabidopsis thaliana]
  misc_feature (24)..(554): Homolog of NCBI NO: 18396238 NR Description: expressed protein; protein id: At1g27200.1, by cDNA: gi_13877764 [Arabidopsis thaliana]
  misc_feature (410)..(600): Homolog of NCBI NO: 27817205 NR Description: putative C3HC4 zinc finger-type protein [Capsella
  misc_feature (22)..(550): Homolog of NCBI NO: 15235543 NR Description: putative protein; protein id: At4g37420.1
  misc_feature (280)..(505): Homolog of NCBI NO: 39936498 NR Description: Glycosyl transferase, family 2 [Rhodopseudomonas >gi|39650354|emb|CAE28876.1| Glycosyl transferase, family 2
MKVRRKLGGGCGGDVVVSWRTFFWFVILFVFSFVLFSTMFIFKGKFRPVVRSTISFSTAVTARAVFRESISSSPAVTIREAVKLPEQTLVFLKYPQSRRLFTKDDLICVFSGSSKLRKVYPTAVDRDKFGGQIVRCPETPRGYTISLAVSRWTTDDHLPAGPTHRYDWLVYDAVIDYDNSTVVFVKGLNLRPGRVADVSRYECVYGWDFAKHNRLIRSDVITAAQEIVRCRTPLAVLDGPKAARGPVKVSVRIKGGTGMLPSIAQPVRIINPPRKKPFQMCVCTMTRNAAAVLREWVMYHAGIGVQRWFIYDNNSDDDIIAEIENLERRGYNISRHFWPWIKTQEAGFSNCAIRAKSDCDWIAFIDVDEFFYIPSGETLTSVIRNYTTTDSIGEIRTPCHSFGPSGLRSRPRSGVTSGYTCRVVLPERHKSIIRPEAMNATLINVVHHFHLRDGFTFADMDKDIMVINHYKYQVWEVFKEKFYRRVATYVADWQNEENVGSRDRAPGLGTRPVEPSDWAERFCEVNDTGLRDQVFEKFKDKKTQRLVWEKAEEDDNIQRMVSETPLRVTNRSGDGSNGSKEVSIAREKNGENAEIFISPRFKSAAAMAGWDEEDLIIASFVVDDTPERSSSKRRRRSNLLFKSTPPSGSSRRNQRVKQSLVPLPVIDLDKVIRHEEEKSAEKKKKKREMETETKEEKKIDKDEKSLSDHVVLPCIDKLRDELSCAICLEICFEPSTTTCGHSFCKKCLRSAADKCGRKCPKCRQLIGNGRYCTVNTVLWNTIQLLFPKEVEAQRAASANLKGKETPSPRNPNQRLRSRNRETALFQERLQREDISRLLVSEERSERSERRRRSTSMRLDQNRDAALAMRLQRQEFASAFGATTAETSSSSVSTLSRARANLQAMASRAVRRQG

SEQ ID NO: 73895 - protein, 875 aa, Arabidopsis thaliana
  peptide (1)..(875): Ceres Seq. ID no. 4984246
  misc_feature (130)..(473): Pfam Name: Domain of unknown function Pfam Description: Domain of unknown function
  misc_feature (1)..(520): Homolog of NCBI NO: 7939506 NR Description: gb|AAB61497.1~gene_id:K1G2.5~similar to unknown
  misc_feature (1)..(530): Homolog of NCBI NO: 15237478 NR Description: putative protein; protein id: At5g40720.1, by cDNA: gi_15912254 [Arabidopsis thaliana] contains similarity to unknown
  misc_feature (1)..(530): Homolog of NCBI NO: 15912255 NR Description: AT5g40720/MNF13_240 [Arabidopsis thaliana]
  misc_feature (522)..(875): Homolog of NCBI NO: 11994635 NR Description: gene_id:K1G2.4~ref|NP_008959.1~similar to unknown
  misc_feature (242)..(520): Homolog of NCBI NO: 20453331 NR Description: AT3g27330/K1G2_3 [Arabidopsis thaliana]
  misc_feature (1)..(516): Homolog of NCBI NO: 13877765 NR Description: unknown protein [Arabidopsis thaliana]
  misc_feature (1)..(516): Homolog of NCBI NO: 18396238 NR Description: expressed protein; protein id: At1g27200.1, by cDNA: gi_13877764 [Arabidopsis thaliana]
  misc_feature (372)..(562): Homolog of NCBI NO: 27817205 NR Description: putative C3HC4 zinc finger-type protein [Capsella
  misc_feature (1)..(512): Homolog of NCBI NO: 15235543 NR Description: putative protein; protein id: At4g37420.1
  misc_feature (242)..(467): Homolog of NCBI NO: 39936498 NR Description: Glycosyl transferase, family 2 [Rhodopseudomonas >gi|39650354|emb|CAE28876.1| Glycosyl transferase, family 2
MFIFKGKFRPVVRSTISFSTAVTARAVFRESISSSPAVTIREAVKLPEQTLVFLKYPQSRRLFTKDDLICVFSGSSKLRKVYPTAVDRDKFGGQIVRCPETPRGYTISLAVSRWTTDDHLPAGPTHRYDWLVYDAVIDYDNSTVVFVKGLNLRPGRVADVSRYECVYGWDFAKHNRLIRSDVITAAQEIVRCRTPLAVLDGPKAARGPVKVSVRIKGGTGMLPSIAQPVRIINPPRKKPFQMCVCTMTRNAAAVLREWVMYHAGIGVQRWFIYDNNSDDDIIAEIENLERRGYNISRHFWPWIKTQEAGFSNCAIRAKSDCDWIAFIDVDEFFYIPSGETLTSVIRNYTTTDSIGEIRTPCHSFGPSGLRSRPRSGVTSGYTCRVVLPERHKSIIRPEAMNATLINVVHHFHLRDGFTFADMDKDIMVINHYKYQVWEVFKEKFYRRVATYVADWQNEENVGSRDRAPGLGTRPVEPSDWAERFCEVNDTGLRDQVFEKFKDKKTQRLVWEKAEEDDNIQRMVSETPLRVTNRSGDGSNGSKEVSIAREKNGENAEIFISPRFKSAAAMAGWDEEDLIIASFVVDDTPERSSSKRRRRSNLLFKSTPPSGSSRRNQRVKQSLVPLPVIDLDKVIRHEEEKSAEKKKKKREMETETKEEKKIDKDEKSLSDHVVLPCIDKLRDELSCAICLEICFEPSTTTCGHSFCKKCLRSAADKCGRKCPKCRQLIGNGRYCTVNTVLWNTIQLLFPKEVEAQRAASANLKGKETPSPRNPNQRLRSRNRETALFQERLQREDISRLLVSEERSERSERRRRSTSMRLDQNRDAALAMRLQRQEFASAFGATTAETSSSSVSTLSRARANLQAMASRAVRRQG

SEQ ID NO: 73896 - protein, 655 aa, Arabidopsis thaliana
  peptide (1)..(655): Ceres Seq. ID no. 4984247
  misc_feature (1)..(253): Pfam Name: Domain of unknown function Pfam Description: Domain of unknown function
  misc_feature (1)..(300): Homolog of NCBI NO: 7939506 NR Description: gb|AAB61497.1~gene_id:K1G2.5~similar to unknown
  misc_feature (1)..(310): Homolog of NCBI NO: 15237478 NR Description: putative protein; protein id: At5g40720.1, by cDNA: gi_15912254 [Arabidopsis thaliana] contains similarity to unknown
  misc_feature (1)..(310): Homolog of NCBI NO: 15912255 NR Description: AT5g40720/MNF13_240 [Arabidopsis thaliana]
  misc_feature (302)..(655): Homolog of NCBI NO: 11994635 NR Description: gene_id:K1G2.4~ref|NP_008959.1~similar to unknown
  misc_feature (22)..(300): Homolog of NCBI NO: 20453331 NR Description: AT3g27330/K1G2_3 [Arabidopsis thaliana]
  misc_feature (1)..(296): Homolog of NCBI NO: 13877765 NR Description: unknown protein [Arabidopsis thaliana]
  misc_feature (1)..(296): Homolog of NCBI NO: 18396238 NR Description: expressed protein; protein id: At1g27200.1, by cDNA: gi_13877764 [Arabidopsis thaliana]
  misc_feature (152)..(342): Homolog of NCBI NO: 27817205 NR Description: putative C3HC4 zinc finger-type protein [Capsella
  misc_feature (1)..(292): Homolog of NCBI NO: 15235543 NR Description: putative protein; protein id: At4g37420.1
  misc_feature (22)..(247): Homolog of NCBI NO: 39936498 NR Description: Glycosyl transferase, family 2 [Rhodopseudomonas >gi|39650354|emb|CAE28876.1| Glycosyl transferase, family 2
MLPSIAQPVRIINPPRKKPFQMCVCTMTRNAAAVLREWVMYHAGIGVQRWFIYDNNSDDDIIAEIENLERRGYNISRHFWPWIKTQEAGFSNCAIRAKSDCDWIAFIDVDEFFYIPSGETLTSVIRNYTTTDSIGEIRTPCHSFGPSGLRSRPRSGVTSGYTCRVVLPERHKSIIRPEAMNATLINVVHHFHLRDGFTFADMDKDIMVINHYKYQVWEVFKEKFYRRVATYVADWQNEENVGSRDRAPGLGTRPVEPSDWAERFCEVNDTGLRDQVFEKFKDKKTQRLVWEKAEEDDNIQRMVSETPLRVTNRSGDGSNGSKEVSIAREKNGENAEIFISPRFKSAAAMAGWDEEDLIIASFVVDDTPERSSSKRRRRSNLLFKSTPPSGSSRRNQRVKQSLVPLPVIDLDKVIRHEEEKSAEKKKKKREMETETKEEKKIDKDEKSLSDHVVLPCIDKLRDELSCAICLEICFEPSTTTCGHSFCKKCLRSAADKCGRKCPKCRQLIGNGRYCTVNTVLWNTIQLLFPKEVEAQRAASANLKGKETPSPRNPNQRLRSRNRETALFQERLQREDISRLLVSEERSERSERRRRSTSMRLDQNRDAALAMRLQRQEFASAFGATTAETSSSSVSTLSRARANLQAMASRAVRRQG

SEQ ID NO: 73897 - DNA, 1692 bp, Arabidopsis thaliana
  misc_feature (1)..(1692): Ceres Seq. ID no. 4984414
  misc_feature: MA Experiment ID: 20000171 Result: Up-regulated in Transcription
  misc_feature: MA Experiment 20000171 PARAMETER Experiment Name: At_42deg_Heat_P Parameter: Age (day) Value: 14
  misc_feature: MA Experiment 20000171 PARAMETER Experiment Name: At_42deg_Heat_P Parameter: Organism Value: A. thaliana
  misc_feature: MA Experiment 20000171 PARAMETER Experiment Name: At_42deg_Heat_P Parameter: Plant Line Value: WS
  misc_feature: MA Experiment 20000171 PARAMETER Experiment Name: At_42deg_Heat_P Parameter: Temperature (deg C) Value: 42 vs. 22
  misc_feature: MA Experiment 20000171 PARAMETER Experiment Name: At_42deg_Heat_P Parameter: Timepoint (hr) Value: 1
  misc_feature: MA Experiment 20000171 PARAMETER Experiment Name: At_42deg_Heat_P Parameter: Tissue Value: Aerial
  misc_feature: MA Experiment ID: 20000173 Result: Up-regulated in Transcription
  misc_feature: MA Experiment 20000173 PARAMETER Experiment Name: At_42deg_Heat_P Parameter: Age (day) Value: 14
  misc_feature: MA Experiment 20000173 PARAMETER Experiment Name: At_42deg_Heat_P Parameter: Organism Value: A. thaliana
  misc_feature: MA Experiment 20000173 PARAMETER Experiment Name: At_42deg_Heat_P Parameter: Plant Line Value: WS
  misc_feature: MA Experiment 20000173 PARAMETER Experiment Name: At_42deg_Heat_P Parameter: Temperature (deg C) Value: 42 vs. 22
  misc_feature: MA Experiment 20000173 PARAMETER Experiment Name: At_42deg_Heat_P Parameter: Timepoint (hr) Value: 6
  misc_feature: MA Experiment 20000173 PARAMETER Experiment Name: At_42deg_Heat_P Parameter: Tissue Value: Aerial
  misc_feature: MA Experiment ID: 20000265 Result: Up-regulated in Transcription
  misc_feature: MA Experiment 20000265 PARAMETER Experiment Name: At_Open_Flower_P Parameter: Age (day) Value: 21
  misc_feature: MA Experiment 20000265 PARAMETER Experiment Name: At_Open_Flower_P Parameter: Plant Line Value: WS
  misc_feature: MA Experiment 20000265 PARAMETER Experiment Name: At_Open_Flower_P Parameter: Tissue Value: Closed Flower vs. Whole Plant
  misc_feature: MA Experiment ID: 20000286 Result: Up-regulated in Transcription
  misc_feature: MA Experiment 20000286 PARAMETER Experiment Name: At_Open_Flower_P Parameter: Age (day) Value: 21
  misc_feature: MA Experiment 20000286 PARAMETER Experiment Name: At_Open_Flower_P Parameter: Plant Line Value: WS
  misc_feature: MA Experiment 20000286 PARAMETER Experiment Name: At_Open_Flower_P Parameter: Tissue Value: Half Open vs. Whole Plant
atggcagcaatgatcacctttgactttcaaaacagcttcatcttcatcctcttttttctcttctctctcctttgttactctctcttcttcaggaaaccaaagggctcacgagctggccgtgatcttcctccgagccctccttcttttcctgtaattggtcatcttcaccttcttctctctgctcttgttcacaagtcttttcaaaacatctcctctaagtatggacctcttctccatctccgcgtcttccacattcccatagtcctcgcctcctcggcctcagtggcctacgagatcttcaaggcccaagatgtgaatgtctcctctcgcggtcacgctccagtcggggagtctctctggtttggatcgtctagcttcttcttcgctccctatggagattactttaaatttatgaggaagctcatagccacaaagcttcttggaccacaggcactcgagcgttcacgaaaaatccgtgcagatgagctagatcggttttacaaaaccttgcttgacaaggcgatgaagaaggagagtgttgagatcggtgaggaagcagcgaagctcaataacaatatcatctgcaagatgatcatggggaggagttgttcagaggagaatggtgaggcggagaaattcagacacttggtgatcgagtcgatggctttgacaaagcaaatcttctttggtatgatctttcacaaaccgcttaaaaagctcgggatctcactgttccaaaaggatatactaagtctttcccgcaagttcgacgagttgctggagaagattctttttgaacacgaagagaaaaaggcggagcacaatcaagctaatgacatgatggattttttgttggaagcttatggagacgaaaatgcagagtataaaatcacaagaaaccatatcaagtccttgttcgtggatcttgtcattgcagggactgacacctcggtgcaagcaacacagtggacaatgggggagctcattaacaaccctaagattcttcagagattgagagaagaaatcgaatcggttgtagggaacacaagattaattcaagaaaatgatttaccaaacctcccttacttgcaagcggtagtcaaagaagggctaagattgcatccgccggggtctatctcggtaaggatgtttcaagaaaggtgtgaactcaaagggttctacataccggagaagacattacttgttgttaatacttatgctataatgagagatcctaatttctgggaagatcctgaggagtttaaacctgagaggtttatagcatcttcaagatcagagcaagaggacgaggtaagagaggaagtcttgaaatacattcctttctccgcgggaaggagaggctgtcctggatcaaatctagcttatatctctctaggaatcgtgattggggtaatggtgcagtgctttgattggagaattgaaggagagaaagtaaacatgaatgaggctgctgaaacaactgcgttgtccatggctcagcctcttaagtgcactcctgtttctcgaaccaaaaaccctttgccatcaatggccggcgagatcttcagggcccacgacatgaacgtatcctctcgcggtgctgctgcgatagatgagtccctcgtgtttggatcttctggtgtcgtctacgctccctatggagataacttgaagttcgtgaagaagaaataa

SEQ ID NO: 73898 - protein, 563 aa, Arabidopsis thaliana
  peptide (1)..(563): Ceres Seq. ID no. 4984415
  misc_feature (43)..(506): Pfam Name: Cytochrome P450 Pfam Description: Cytochrome P450
  misc_feature (1)..(516): Homolog of NCBI NO: 30685997 NR Description: cytochrome P450 family [Arabidopsis thaliana]
  misc_feature (1)..(516): Homolog of NCBI NO: 15232418 NR Description: cytochrome P450, putative; protein id: At3g20950.1
  misc_feature (14)..(515): Homolog of NCBI NO: 15233774 NR Description: cytochrome p450 family; protein id: At4g15350.1
  misc_feature (14)..(515): Homolog of NCBI NO: 7430617 NR Description: cytochrome P450 - Arabidopsis thaliana
  misc_feature (1)..(512): Homolog of NCBI NO: 15238866 NR Description: cytochrome p450 family; protein id: At5g47990.1 thaliana] >gi|10177750|dbj|BAB11063.1| cytochrome P450
  misc_feature (1)..(511): Homolog of NCBI NO: 15231047 NR Description: cytochrome P450, putative; protein id: At3g20090.1
  misc_feature (1)..(514): Homolog of NCBI NO: 15231052 NR Description: cytochrome p450 family; protein id: At3g20130.1
  misc_feature (1)..(510): Homolog of NCBI NO: 9294003 NR Description: cytochrome P450-like protein [Arabidopsis
  misc_feature (4)..(513): Homolog of NCBI NO: 15231049 NR Description: cytochrome p450 family; protein id: At3g20100.1, by cDNA: 149380., supported by cDNA: gi_15215771 [Arabidopsis
  misc_feature (1)..(514): Homolog of NCBI NO: 9293969 NR Description: cytochrome P450-like protein [Arabidopsis
MAAMITFDFQNSFIFILFFLFSLLCYSLFFRKPKGSRAGRDLPPSPPSFPVIGHLHLLLSALVHKSFQNISSKYGPLLHLRVFHIPIVLASSASVAYEIFKAQDVNVSSRGHAPVGESLWFGSSSFFFAPYGDYFKFMRKLIATKLLGPQALERSRKIRADELDRFYKTLLDKAMKKESVEIGEEAAKLNNNIICKMIMGRSCSEENGEAEKFRHLVIESMALTKQIFFGMIFHKPLKKLGISLFQKDILSLSRKFDELLEKILFEHEEKKAEHNQANDMMDFLLEAYGDENAEYKITRNHIKSLFVDLVIAGTDTSVQATQWTMGELINNPKILQRLREEIESVVGNTRLIQENDLPNLPYLQAVVKEGLRLHPPGSISVRMFQERCELKGFYIPEKTLLVVNTYAIMRDPNFWEDPEEFKPERFIASSRSEQEDEVREEVLKYIPFSAGRRGCPGSNLAYISLGIVIGVMVQCFDWRIEGEKVNMNEAAETTALSMAQPLKCTPVSRTKNPLPSMAGEIFRAHDMNVSSRGAAAIDESLVFGSSGVVYAPYGDNLKFVKKK

SEQ ID NO: 73899 - protein, 560 aa, Arabidopsis thaliana
  peptide (1)..(560): Ceres Seq. ID no. 4984416
  misc_feature (40)..(503): Pfam Name: Cytochrome P450 Pfam Description: Cytochrome P450
  misc_feature (1)..(513): Homolog of NCBI NO: 30685997 NR Description: cytochrome P450 family [Arabidopsis thaliana]
  misc_feature (1)..(513): Homolog of NCBI NO: 15232418 NR Description: cytochrome P450, putative; protein id: At3g20950.1
  misc_feature (11)..(512): Homolog of NCBI NO: 15233774 NR Description: cytochrome p450 family; protein id: At4g15350.1
  misc_feature (11)..(512): Homolog of NCBI NO: 7430617 NR Description: cytochrome P450 - Arabidopsis thaliana
  misc_feature (1)..(509): Homolog of NCBI NO: 15238866 NR Description: cytochrome p450 family; protein id: At5g47990.1 thaliana] >gi|10177750|dbj|BAB11063.1| cytochrome P450
  misc_feature (1)..(508): Homolog of NCBI NO: 15231047 NR Description: cytochrome P450, putative; protein id: At3g20090.1
  misc_feature (1)..(511): Homolog of NCBI NO: 15231052 NR Description: cytochrome p450 family; protein id: At3g20130.1
  misc_feature (1)..(507): Homolog of NCBI NO: 9294003 NR Description: cytochrome P450-like protein [Arabidopsis
  misc_feature (1)..(510): Homolog of NCBI NO: 15231049 NR Description: cytochrome p450 family; protein id: At3g20100.1, by cDNA: 149380., supported by cDNA: gi_15215771 [Arabidopsis
  misc_feature (1)..(511): Homolog of NCBI NO: 9293969 NR Description: cytochrome P450-like protein [Arabidopsis
MITFDFQNSFIFILFFLFSLLCYSLFFRKPKGSRAGRDLPPSPPSFPVIGHLHLLLSALVHKSFQNISSKYGPLLHLRVFHIPIVLASSASVAYEIFKAQDVNVSSRGHAPVGESLWFGSSSFFFAPYGDYFKFMRKLIATKLLGPQALERSRKIRADELDRFYKTLLDKAMKKESVEIGEEAAKLNNNIICKMIMGRSCSEENGEAEKFRHLVIESMALTKQIFFGMIFHKPLKKLGISLFQKDILSLSRKFDELLEKILFEHEEKKAEHNQANDMMDFLLEAYGDENAEYKITRNHIKSLFVDLVIAGTDTSVQATQWTMGELINNPKILQRLREEIESVVGNTRLIQENDLPNLPYLQAVVKEGLRLHPPGSISVRMFQERCELKGFYIPEKTLLVVNTYAIMRDPNFWEDPEEFKPERFIASSRSEQEDEVREEVLKYIPFSAGRRGCPGSNLAYISLGIVIGVMVQCFDWRIEGEKVNMNEAAETTALSMAQPLKCTPVSRTKNPLPSMAGEIFRAHDMNVSSRGAAAIDESLVFGSSGVVYAPYGDNLKFVKKK

SEQ ID NO: 73900 - protein, 426 aa, Arabidopsis thaliana
  peptide (1)..(426): Ceres Seq. ID no. 4984417
  misc_feature (1)..(369): Pfam Name: Cytochrome P450 Pfam Description: Cytochrome P450
  misc_feature (1)..(379): Homolog of NCBI NO: 30685997 NR Description: cytochrome P450 family [Arabidopsis thaliana]
  misc_feature (1)..(379): Homolog of NCBI NO: 15232418 NR Description: cytochrome P450, putative; protein id: At3g20950.1
  misc_feature (1)..(378): Homolog of NCBI NO: 15233774 NR Description: cytochrome p450 family; protein id: At4g15350.1
  misc_feature (1)..(378): Homolog of NCBI NO: 7430617 NR Description: cytochrome P450 - Arabidopsis thaliana
  misc_feature (1)..(375): Homolog of NCBI NO: 15238866 NR Description: cytochrome p450 family; protein id: At5g47990.1 thaliana] >gi|10177750|dbj|BAB11063.1| cytochrome P450
  misc_feature (1)..(374): Homolog of NCBI NO: 15231047 NR Description: cytochrome P450, putative; protein id: At3g20090.1
  misc_feature (1)..(377): Homolog of NCBI NO: 15231052 NR Description: cytochrome p450 family; protein id: At3g20130.1
  misc_feature (1)..(373): Homolog of NCBI NO: 9294003 NR Description: cytochrome P450-like protein [Arabidopsis
  misc_feature (1)..(376): Homolog of NCBI NO: 15231049 NR Description: cytochrome p450 family; protein id: At3g20100.1, by cDNA: 149380., supported by cDNA: gi_15215771 [Arabidopsis
  misc_feature (1)..(377): Homolog of NCBI NO: 9293969 NR Description: cytochrome P450-like protein [Arabidopsis
MRKLIATKLLGPQALERSRKIRADELDRFYKTLLDKAMKKESVEIGEEAAKLNNNIICKMIMGRSCSEENGEAEKFRHLVIESMALTKQIFFGMIFHKPLKKLGISLFQKDILSLSRKFDELLEKILFEHEEKKAEHNQANDMMDFLLEAYGDENAEYKITRNHIKSLFVDLVIAGTDTSVQATQWTMGELINNPKILQRLREEIESVVGNTRLIQENDLPNLPYLQAVVKEGLRLHPPGSISVRMFQERCELKGFYIPEKTLLVVNTYAIMRDPNFWEDPEEFKPERFIASSRSEQEDEVREEVLKYIPFSAGRRGCPGSNLAYISLGIVIGVMVQCFDWRIEGEKVNMNEAAETTALSMAQPLKCTPVSRTKNPLPSMAGEIFRAHDMNVSSRGAAAIDESLVFGSSGVVYAPYGDNLKFVKKK

SEQ ID NO: 73901 - DNA, 2133 bp, Arabidopsis thaliana
  misc_feature (1)..(2133): Ceres Seq. ID no. 4984473
  misc_feature: MA Experiment ID: 20000327 Result: Down-regulated in Transcription
  misc_feature: MA Experiment 20000327 PARAMETER Experiment Name: At_42deg_Heat_Sub_P Parameter: Age (day) Value: 14
  misc_feature: MA Experiment 20000327 PARAMETER Experiment Name: At_42deg_Heat_Sub_P Parameter: Organism Value: A. thaliana
  misc_feature: MA Experiment 20000327 PARAMETER Experiment Name: At_42deg_Heat_Sub_P Parameter: Plant Line Value: WS
  misc_feature: MA Experiment 20000327 PARAMETER Experiment Name: At_42deg_Heat_Sub_P Parameter: Temperature (deg C) Value: 42 vs. 22
  misc_feature: MA Experiment 20000327 PARAMETER Experiment Name: At_42deg_Heat_Sub_P Parameter: Timepoint (hr) Value: 1
  misc_feature: MA Experiment 20000327 PARAMETER Experiment Name: At_42deg_Heat_Sub_P Parameter: Tissue Value: Aerial
  misc_feature: MA Experiment ID: 20000347 Result: Down-regulated in Transcription
  misc_feature: MA Experiment 20000347 PARAMETER Experiment Name: At_2mM_SA_Sub_P Parameter: Age (day) Value: 14
  misc_feature: MA Experiment 20000347 PARAMETER Experiment Name: At_2mM_SA_Sub_P Parameter: Organism Value: A. thaliana
  misc_feature: MA Experiment 20000347 PARAMETER Experiment Name: At_2mM_SA_Sub_P Parameter: Plant Line Value: WS
  misc_feature: MA Experiment 20000347 PARAMETER Experiment Name: At_2mM_SA_Sub_P Parameter: Timepoint (hr) Value: 6
  misc_feature: MA Experiment 20000347 PARAMETER Experiment Name: At_2mM_SA_Sub_P Parameter: Tissue Value: Aerial
  misc_feature: MA Experiment 20000347 PARAMETER Experiment Name: At_2mM_SA_Sub_P Parameter: Treatment Value: 2mM SA vs. No Treatment
  misc_feature: MA Experiment ID: 20000355 Result: Up-regulated in Transcription
  misc_feature: MA Experiment 20000355 PARAMETER Experiment Name: At_Siliques_Sub_P Parameter: Age (day) Value: 21
  misc_feature: MA Experiment 20000355 PARAMETER Experiment Name: At_Siliques_Sub_P Parameter: Organism Value: A. thaliana
  misc_feature: MA Experiment 20000355 PARAMETER Experiment Name: At_Siliques_Sub_P Parameter: Plant Line Value: WS
  misc_feature: MA Experiment 20000355 PARAMETER Experiment Name: At_Siliques_Sub_P Parameter: Tissue Value: Less Than 5mm Siliques vs. Whole Plant
atgatgatcgggaagttgtggagatctgtgggaaccgtcggaaagtttgatggtcgttacgacggcgtgaggacgatggttggaaaagcctcgaaccgagctggtgttcatgtcacagatactgtacttttcgaagagacgagtttcgaattttcgccttctctcactcctgagctgaatgaatttccaatgccttctttagatgttatcactccacaagcttatcttactccactggggtctcagagtatcaaccatgctaaatttttacaaatcccatggagacaatttgtcttcacaaagcctttaggtctctctaaatcaaccaaactcgacgaagccgtgacattgatagagaattcatcatcctcgccgtccaatctctccactcccgaagcttacacagaccttcttcatgcttgtatctccgctaaatcactccaccatggtataaaaatatgttctttgattctcaacaatcctagtctccgtcacaaccccaaattgctaagcaagctcattaccctattctcggtttgtcgccgattggatcttgctcggaaaatctttgacgatgtaactgattcgagtctacttactgagaaagtctgggcagctatggcgattgggtattctagaaacgggtcaccaagagacgctttgatcgtctatgtggatatgttgtgtagcttcattgagcctgggaatttttcgatatccgtggcgttgaaagcgtgcgtggatttgaaagatcttcgggttggtagaggaatccatgcccagattgtgaaacgaaaggagaaggttgaccaagtagtgtataatgtgctcttgaagctttatatggaaagtggcttatttgatgatgcacgtaaggtgttcgatggaatgtctgagagaaatgttgttacttggaattctttaatttcggtactcagtaagaaagttcgggttcatgagatgtttaatctgttcaggaagatgcaggaagagatgatcgggtttagttgggcgacgttgacgacaatattacccgcttgttcacgtgtcgctgctcttctcaccgggaaagagattcatgcacagattctgaaatcgaaagagaaacctgatgttccattgcttaattcattgatggatatgtatgggaaatgtggagaggttgagtattctcggagagtctttgatgtgatgttaactaaggatttggcttcatggaacataatgctaaactgttatgcaatcaacggaaatattgaagaagtgataaatctgtttgaatggatgatagagtcaggcgttgcaccagatgggattacctttgttgctttgttatctgggtgtagcgatacagggcttacggaatatggtctaagtttgtttgaacgcatgaaaacggagttcagagtttcaccggctttggagcattatgcttgtttggttgacatcttggggcgagctggtaagatcaaagaagcagtgaaggtgatagaaacaatgccatttaagccaagtgcgtccatttggggatcactgctcaactcttgcaggcttcatgggaatgtttcagtgggagagattgcagcaaaagagttgtttgttcttgaacctcataatccagggaactacgttatggtttctaacatatatgctgatgcaaagatgtgggacaatgtggataagattcgagagatgatgaaacaaagaggggtcaaaaaggaagctggttgcagttgggtacaggttaaagacaagattcaaatctttgttgcaggaggtggttatgagtttcgtaattctgatgagtataagaaagtatggacagaactacaagaagcaattgaaaaatccggttattcgcctaatacgagtgtggtgcttcatgatgttgatgaagaaaccaaagcaaattgggtttgtggacacagcgagagactcgcgacaacctactccctaatccacacaggtgaaggggttccaattaggattaccaagaatctcagagtatgtgcagactgtcattcatggatgaagattgtgtcacaagtaactaggagagtcatagtcctcagagacacaaaacgattccaccatttcgtcgacggaatctgctcatgtaaagactactggtga

SEQ ID NO: 73902 - protein, 710 aa, Arabidopsis thaliana
  peptide (1)..(710): Ceres Seq. ID no. 4984474
  misc_feature (404)..(438): Pfam Name: PPR repeat Pfam Description: PPR repeat
  misc_feature (70)..(710): Homolog of NCBI NO: 15232648 NR Description: putative protein; protein id: At3g46790.1
  misc_feature (131)..(710): Homolog of NCBI NO: 11281371 NR Description: hypothetical protein T8H10.30 - Arabidopsis >gi|6706414|emb|CAB66100.1| putative protein [Arabidopsis
  misc_feature (131)..(710): Homolog of NCBI NO: 30694644 NR Description: pentatricopeptide (PPR) repeat-containing protein
  misc_feature (131)..(710): Homolog of NCBI NO: 30794008 NR Description: unknown protein [Arabidopsis thaliana]
  misc_feature (86)..(710): Homolog of NCBI NO: 15231358 NR Description: hypothetical protein; protein id: At3g13770.1
  misc_feature (93)..(710): Homolog of NCBI NO: 11994419 NR Description: selenium-binding protein-like [Arabidopsis
  misc_feature (165)..(710): Homolog of NCBI NO: 18394615 NR Description: hypothetical protein; protein id: At1g18485.1
  misc_feature (93)..(709): Homolog of NCBI NO: 15230593 NR Description: unknown protein; protein id: At3g12770.1
  misc_feature (168)..(710): Homolog of NCBI NO: 15234006 NR Description: putative protein; protein id: At4g18750.1
  misc_feature (104)..(710): Homolog of NCBI NO: 18418348 NR Description: putative protein; protein id: At4g33990.1
MMIGKLWRSVGTVGKFDGRYDGVRTMVGKASNRAGVHVTDTVLFEETSFEFSPSLTPELNEFPMPSLDVITPQAYLTPLGSQSINHAKFLQIPWRQFVFTKPLGLSKSTKLDEAVTLIENSSSSPSNLSTPEAYTDLLHACISAKSLHHGIKICSLILNNPSLRHNPKLLSKLITLFSVCRRLDLARKIFDDVTDSSLLTEKVWAAMAIGYSRNGSPRDALIVYVDMLCSFIEPGNFSISVALKACVDLKDLRVGRGIHAQIVKRKEKVDQVVYNVLLKLYMESGLFDDARKVFDGMSERNVVTWNSLISVLSKKVRVHEMFNLFRKMQEEMIGFSWATLTTILPACSRVAALLTGKEIHAQILKSKEKPDVPLLNSLMDMYGKCGEVEYSRRVFDVMLTKDLASWNIMLNCYAINGNIEEVINLFEWMIESGVAPDGITFVALLSGCSDTGLTEYGLSLFERMKTEFRVSPALEHYACLVDILGRAGKIKEAVKVIETMPFKPSASIWGSLLNSCRLHGNVSVGEIAAKELFVLEPHNPGNYVMVSNIYADAKMWDNVDKIREMMKQRGVKKEAGCSWVQVKDKIQIFVAGGGYEFRNSDEYKKVWTELQEAIEKSGYSPNTSVVLHDVDEETKANWVCGHSERLATTYSLIHTGEGVPIRITKNLRVCADCHSWMKIVSQVTRRVIVLRDTKRFHHFVDGICSCKDYW

SEQ ID NO: 73903 - protein, 709 aa, Arabidopsis thaliana
  peptide (1)..(709): Ceres Seq. ID no. 4984475
  misc_feature (403)..(437): Pfam Name: PPR repeat Pfam Description: PPR repeat
  misc_feature (69)..(709): Homolog of NCBI NO: 15232648 NR Description: putative protein; protein id: At3g46790.1
  misc_feature (130)..(709): Homolog of NCBI NO: 11281371 NR Description: hypothetical protein T8H10.30 - Arabidopsis >gi|6706414|emb|CAB66100.1| putative protein [Arabidopsis
  misc_feature (130)..(709): Homolog of NCBI NO: 30794008 NR Description: unknown protein [Arabidopsis thaliana]
  misc_feature (130)..(709): Homolog of NCBI NO: 30694644 NR Description: pentatricopeptide (PPR) repeat-containing protein
  misc_feature (85)..(709): Homolog of NCBI NO: 15231358 NR Description: hypothetical protein; protein id: At3g13770.1
  misc_feature (92)..(709): Homolog of NCBI NO: 11994419 NR Description: selenium-binding protein-like [Arabidopsis
  misc_feature (164)..(709): Homolog of NCBI NO: 18394615 NR Description: hypothetical protein; protein id: At1g18485.1
  misc_feature (92)..(708): Homolog of NCBI NO: 15230593 NR Description: unknown protein; protein id: At3g12770.1
  misc_feature (167)..(709): Homolog of NCBI NO: 15234006 NR Description: putative protein; protein id: At4g18750.1
  misc_feature (103)..(709): Homolog of NCBI NO: 18418348 NR Description: putative protein; protein id: At4g33990.1
MIGKLWRSVGTVGKFDGRYDGVRTMVGKASNRAGVHVTDTVLFEETSFEFSPSLTPELNEFPMPSLDVITPQAYLTPLGSQSINHAKFLQIPWRQFVFTKPLGLSKSTKLDEAVTLIENSSSSPSNLSTPEAYTDLLHACISAKSLHHGIKICSLILNNPSLRHNPKLLSKLITLFSVCRRLDLARKIFDDVTDSSLLTEKVWAAMAIGYSRNGSPRDALIVYVDMLCSFIEPGNFSISVALKACVDLKDLRVGRGIHAQIVKRKEKVDQVVYNVLLKLYMESGLFDDARKVFDGMSERNVVTWNSLISVLSKKVRVHEMFNLFRKMQEEMIGFSWATLTTILPACSRVAALLTGKEIHAQILKSKEKPDVPLLNSLMDMYGKCGEVEYSRRVFDVMLTKDLASWNIMLNCYAINGNIEEVINLFEWMIESGVAPDGITFVALLSGCSDTGLTEYGLSLFERMKTEFRVSPALEHYACLVDILGRAGKIKEAVKVIETMPFKPSASIWGSLLNSCRLHGNVSVGEIAAKELFVLEPHNPGNYVMVSNIYADAKMWDNVDKIREMMKQRGVKKEAGCSWVQVKDKIQIFVAGGGYEFRNSDEYKKVWTELQEAIEKSGYSPNTSVVLHDVDEETKANWVCGHSERLATTYSLIHTGEGVPIRITKNLRVCADCHSWMKIVSQVTRRVIVLRDTKRFHHFVDGICSCKDYW

SEQ ID NO: 73904 - protein, 685 aa, Arabidopsis thaliana
  peptide (1)..(685): Ceres Seq. ID no. 4984476
  misc_feature (379)..(413): Pfam Name: PPR repeat Pfam Description: PPR repeat
  misc_feature (45)..(685): Homolog of NCBI NO: 15232648 NR Description: putative protein; protein id: At3g46790.1
  misc_feature (106)..(685): Homolog of NCBI NO: 11281371 NR Description: hypothetical protein T8H10.30 - Arabidopsis >gi|6706414|emb|CAB66100.1| putative protein [Arabidopsis
  misc_feature (106)..(685): Homolog of NCBI NO: 30794008 NR Description: unknown protein [Arabidopsis thaliana]
  misc_feature (106)..(685): Homolog of NCBI NO: 30694644 NR Description: pentatricopeptide (PPR) repeat-containing protein
  misc_feature (61)..(685): Homolog of NCBI NO: 15231358 NR Description: hypothetical protein; protein id: At3g13770.1
  misc_feature (68)..(685): Homolog of NCBI NO: 11994419 NR Description: selenium-binding protein-like [Arabidopsis
  misc_feature (140)..(685): Homolog of NCBI NO: 18394615 NR Description: hypothetical protein; protein id: At1g18485.1
  misc_feature (68)..(684): Homolog of NCBI NO: 15230593 NR Description: unknown protein; protein id: At3g12770.1
  misc_feature (143)..(685): Homolog of NCBI NO: 15234006 NR Description: putative protein; protein id: At4g18750.1
  misc_feature (79)..(685): Homolog of NCBI NO: 18418348 NR Description: putative protein; protein id: At4g33990.1
MVGKASNRAGVHVTDTVLFEETSFEFSPSLTPELNEFPMPSLDVITPQAYLTPLGSQSINHAKFLQIPWRQFVFTKPLGLSKSTKLDEAVTLIENSSSSPSNLSTPEAYTDLLHACISAKSLHHGIKICSLILNNPSLRHNPKLLSKLITLFSVCRRLDLARKIFDDVTDSSLLTEKVWAAMAIGYSRNGSPRDALIVYVDMLCSFIEPGNFSISVALKACVDLKDLRVGRGIHAQIVKRKEKVDQVVYNVLLKLYMESGLFDDARKVFDGMSERNVVTWNSLISVLSKKVRVHEMFNLFRKMQEEMIGFSWATLTTILPACSRVAALLTGKEIHAQILKSKEKPDVPLLNSLMDMYGKCGEVEYSRRVFDVMLTKDLASWNIMLNCYAINGNIEEVINLFEWMIESGVAPDGITFVALLSGCSDTGLTEYGLSLFERMKTEFRVSPALEHYACLVDILGRAGKIKEAVKVIETMPFKPSASIWGSLLNSCRLHGNVSVGEIAAKELFVLEPHNPGNYVMVSNIYADAKMWDNVDKIREMMKQRGVKKEAGCSWVQVKDKIQIFVAGGGYEFRNSDEYKKVWTELQEAIEKSGYSPNTSVVLHDVDEETKANWVCGHSERLATTYSLIHTGEGVPIRITKNLRVCADCHSWMKIVSQVTRRVIVLRDTKRFHHFVDGICSCKDYW

SEQ ID NO: 73905 - DNA, 585 bp, Arabidopsis thaliana
  misc_feature (1)..(585): Ceres Seq. ID no. 4984562
  misc_feature: MA Experiment ID: 20000227 Result: Down-regulated in Transcription
  misc_feature: MA Experiment 20000227 PARAMETER Experiment Name: At_Root-Tips-vs-Tops_P Parameter: Tissue Value: Root Tips vs. Root Tops
atggacgaggtgatgacagcggcggacgttggttcgttaggtggcggcaatagggcgttgtacggatctcctccgtcgcataatctgtttcctcacaatctcccaatcttctccgcttttcttgccttcgctcttgctcagttcctcaaagtcttcactaattggtacaaagaaaagaggtgggactctaaacgtatgattagttctggtggaatgccttcttctcattctgctactgtcactgccttagctgttgccattggctttgaagaaggagctggagcaccagcttttgctattgcagttgtcttggcttgcgttgttatgtatgatgcctctggtgtcaggcttcatgctggtcgtcaagccgagctgctgaatcaaattgtttgtgagtttcctccggagcatccattatcaacagttagaccattgcgtgaactgcttggccacactcctatccaggagctcaagctagtcagtctctctacacaagaacaaatcccgaattcttttgaaatcatagacccttcaggtactaagatagattcagcgatatcaagtgacgctagattattggagtaa

SEQ ID NO: 73906 - protein, 194 aa, Arabidopsis thaliana
  peptide (1)..(194): Ceres Seq. ID no. 4984563
  misc_feature (27)..(155): Pfam Name: Divergent PAP2 family Pfam Description: Divergent PAP2 family
  misc_feature (1)..(155): Homolog of NCBI NO: 30686309 NR Description: expressed protein [Arabidopsis thaliana] unknown protein [Arabidopsis thaliana]
  misc_feature (5)..(155): Homolog of NCBI NO: 11994397 NR Description: gb|AAB61516.1~gene_id:MIL23.18~similar to unknown
  misc_feature (23)..(164): Homolog of NCBI NO: 15220480 NR Description: F12A21.27; protein id: At1g67600.1, supported by
  misc_feature (23)..(155): Homolog of NCBI NO: 12324675 NR Description: unknown protein [Arabidopsis thaliana]
  misc_feature (33)..(155): Homolog of NCBI NO: 7486375 NR Description: hypothetical protein F3I6.29 - Arabidopsis >gi|2829889|gb|AAC00597.1| Hypothetical protein [Arabidopsis
  misc_feature (33)..(155): Homolog of NCBI NO: 9743358 NR Description: F21J9.1 [Arabidopsis thaliana]
  misc_feature (33)..(155): Homolog of NCBI NO: 18395459 NR Description: expressed protein; protein id: At1g24350.1,
  misc_feature (33)..(155): Homolog of NCBI NO: 21555270 NR Description: unknown [Arabidopsis thaliana]
  misc_feature (33)..(155): Homolog of NCBI NO: 26449729 NR Description: unknown protein [Arabidopsis thaliana]
  misc_feature (35)..(157): Homolog of NCBI NO: 18412127 NR Description: putative protein; protein id: At3g61770.1, by cDNA: 29280., supported by cDNA: gi_19347770 [Arabidopsis >gi|19347771|gb|AAL86337.1| unknown protein [Arabidopsis
MDEVMTAADVGSLGGGNRALYGSPPSHNLFPHNLPIFSAFLAFALAQFLKVFTNWYKEKRWDSKRMISSGGMPSSHSATVTALAVAIGFEEGAGAPAFAIAVVLACVVMYDASGVRLHAGRQAELLNQIVCEFPPEHPLSTVRPLRELLGHTPIQELKLVSLSTQEQIPNSFEIIDPSGTKIDSAISSDARLLE

SEQ ID NO: 73907 - protein, 190 aa, Arabidopsis thaliana
  peptide (1)..(190): Ceres Seq. ID no. 4984564
  misc_feature (23)..(151): Pfam Name: Divergent PAP2 family Pfam Description: Divergent PAP2 family
  misc_feature (1)..(151): Homolog of NCBI NO: 30686309 NR Description: expressed protein [Arabidopsis thaliana] unknown protein [Arabidopsis thaliana]
  misc_feature (1)..(151): Homolog of NCBI NO: 11994397 NR Description: gb|AAB61516.1~gene_id:MIL23.18~similar to unknown
  misc_feature (19)..(160): Homolog of NCBI NO: 15220480 NR Description: F12A21.27; protein id: At1g67600.1, supported by
  misc_feature (19)..(151): Homolog of NCBI NO: 12324675 NR Description: unknown protein [Arabidopsis thaliana]
  misc_feature (29)..(151): Homolog of NCBI NO: 7486375 NR Description: hypothetical protein F3I6.29 - Arabidopsis >gi|2829889|gb|AAC00597.1| Hypothetical protein [Arabidopsis
  misc_feature (29)..(151): Homolog of NCBI NO: 26449729 NR Description: unknown protein [Arabidopsis thaliana]
  misc_feature (29)..(151): Homolog of NCBI NO: 21555270 NR Description: unknown [Arabidopsis thaliana]
  misc_feature (29)..(151): Homolog of NCBI NO: 18395459 NR Description: expressed protein; protein id: At1g24350.1,
  misc_feature (29)..(151): Homolog of NCBI NO: 9743358 NR Description: F21J9.1 [Arabidopsis thaliana]
  misc_feature (31)..(153): Homolog of NCBI NO: 18412127 NR Description: putative protein; protein id: At3g61770.1, by cDNA: 29280., supported by cDNA: gi_19347770 [Arabidopsis >gi|19347771|gb|AAL86337.1| unknown protein [Arabidopsis
MTAADVGSLGGGNRALYGSPPSHNLFPHNLPIFSAFLAFALAQFLKVFTNWYKEKRWDSKRMISSGGMPSSHSATVTALAVAIGFEEGAGAPAFAIAVVLACVVMYDASGVRLHAGRQAELLNQIVCEFPPEHPLSTVRPLRELLGHTPIQELKLVSLSTQEQIPNSFEIIDPSGTKIDSAISSDARLLE

SEQ ID NO: 73908 - protein, 129 aa, Arabidopsis thaliana
  peptide (1)..(129): Ceres Seq. ID no. 4984565
  misc_feature (1)..(90): Pfam Name: Divergent PAP2 family Pfam Description: Divergent PAP2 family
  misc_feature (1)..(90): Homolog of NCBI NO: 30686309 NR Description: expressed protein [Arabidopsis thaliana] unknown protein [Arabidopsis thaliana]
  misc_feature (1)..(90): Homolog of NCBI NO: 11994397 NR Description: gb|AAB61516.1~gene_id:MIL23.18~similar to unknown
  misc_feature (1)..(99): Homolog of NCBI NO: 15220480 NR Description: F12A21.27; protein id: At1g67600.1, supported by
  misc_feature (1)..(90): Homolog of NCBI NO: 12324675 NR Description: unknown protein [Arabidopsis thaliana]
  misc_feature (1)..(90): Homolog of NCBI NO: 7486375 NR Description: hypothetical protein F3I6.29 - Arabidopsis >gi|2829889|gb|AAC00597.1| Hypothetical protein [Arabidopsis
  misc_feature (1)..(90): Homolog of NCBI NO: 18395459 NR Description: expressed protein; protein id: At1g24350.1,
  misc_feature (1)..(90): Homolog of NCBI NO: 9743358 NR Description: F21J9.1 [Arabidopsis thaliana]
  misc_feature (1)..(90): Homolog of NCBI NO: 26449729 NR Description: unknown protein [Arabidopsis thaliana]
  misc_feature (1)..(90): Homolog of NCBI NO: 21555270 NR Description: unknown [Arabidopsis thaliana]
  misc_feature (1)..(92): Homolog of NCBI NO: 18412127 NR Description: putative protein; protein id: At3g61770.1, by cDNA: 29280., supported by cDNA: gi_19347770 [Arabidopsis >gi|19347771|gb|AAL86337.1| unknown protein [Arabidopsis
MISSGGMPSSHSATVTALAVAIGFEEGAGAPAFAIAVVLACVVMYDASGVRLHAGRQAELLNQIVCEFPPEHPLSTVRPLRELLGHTPIQELKLVSLSTQEQIPNSFEIIDPSGTKIDSAISSDARLLE

SEQ ID NO: 73909 - DNA, 1296 bp, Arabidopsis thaliana
  misc_feature (1)..(1296): Ceres Seq. ID no. 4984598
  misc_feature: MA Experiment ID: 20000314 Result: Down-regulated in Transcription
  misc_feature: MA Experiment 20000314 PARAMETER Experiment Name: At_14day_Shoots-Roots_Sub_P Parameter: Age (day) Value: 14
  misc_feature: MA Experiment 20000314 PARAMETER Experiment Name: At_14day_Shoots-Roots_Sub_P Parameter: Organism Value: A. thaliana
  misc_feature: MA Experiment 20000314 PARAMETER Experiment Name: At_14day_Shoots-Roots_Sub_P Parameter: Plant Line Value: WS
  misc_feature: MA Experiment 20000314 PARAMETER Experiment Name: At_14day_Shoots-Roots_Sub_P Parameter: Tissue Value: Roots vs. Whole Plant
  misc_feature: MA Experiment ID: 20000315 Result: Down-regulated in Transcription
  misc_feature: MA Experiment 20000315 PARAMETER Experiment Name: At_14day_Shoots-Roots_Sub_P Parameter: Age (day) Value: 14
  misc_feature: MA Experiment 20000315 PARAMETER Experiment Name: At_14day_Shoots-Roots_Sub_P Parameter: Organism Value: A. thaliana
  misc_feature: MA Experiment 20000315 PARAMETER Experiment Name: At_14day_Shoots-Roots_Sub_P Parameter: Plant Line Value: WS
  misc_feature: MA Experiment 20000315 PARAMETER Experiment Name: At_14day_Shoots-Roots_Sub_P Parameter: Tissue Value: Shoots vs. Whole Plant
  misc_feature: MA Experiment ID: 20000346 Result: Up-regulated in Transcription
  misc_feature: MA Experiment 20000346 PARAMETER Experiment Name: At_2mM_SA_Sub_P Parameter: Age (day) Value: 14
  misc_feature: MA Experiment 20000346 PARAMETER Experiment Name: At_2mM_SA_Sub_P Parameter: Organism Value: A. thaliana
  misc_feature: MA Experiment 20000346 PARAMETER Experiment Name: At_2mM_SA_Sub_P Parameter: Plant Line Value: WS
  misc_feature: MA Experiment 20000346 PARAMETER Experiment Name: At_2mM_SA_Sub_P Parameter: Timepoint (hr) Value: 1
  misc_feature: MA Experiment 20000346 PARAMETER Experiment Name: At_2mM_SA_Sub_P Parameter: Tissue Value: Aerial
  misc_feature: MA Experiment 20000346 PARAMETER Experiment Name: At_2mM_SA_Sub_P Parameter: Treatment Value: 2mM SA vs. No Treatment
  misc_feature: MA Experiment ID: 20000347 Result: Up-regulated in Transcription
  misc_feature: MA Experiment 20000347 PARAMETER Experiment Name: At_2mM_SA_Sub_P Parameter: Age (day) Value: 14
  misc_feature: MA Experiment 20000347 PARAMETER Experiment Name: At_2mM_SA_Sub_P Parameter: Organism Value: A. thaliana
  misc_feature: MA Experiment 20000347 PARAMETER Experiment Name: At_2mM_SA_Sub_P Parameter: Plant Line Value: WS
  misc_feature: MA Experiment 20000347 PARAMETER Experiment Name: At_2mM_SA_Sub_P Parameter: Timepoint (hr) Value: 6
  misc_feature: MA Experiment 20000347 PARAMETER Experiment Name: At_2mM_SA_Sub_P Parameter: Tissue Value: Aerial
  misc_feature: MA Experiment 20000347 PARAMETER Experiment Name: At_2mM_SA_Sub_P Parameter: Treatment Value: 2mM SA vs. No Treatment
  misc_feature: MA Experiment ID: 20000355 Result: Down-regulated in Transcription
  misc_feature: MA Experiment 20000355 PARAMETER Experiment Name: At_Siliques_Sub_P Parameter: Age (day) Value: 21
  misc_feature: MA Experiment 20000355 PARAMETER Experiment Name: At_Siliques_Sub_P Parameter: Organism Value: A. thaliana
  misc_feature: MA Experiment 20000355 PARAMETER Experiment Name: At_Siliques_Sub_P Parameter: Plant Line Value: WS
  misc_feature: MA Experiment 20000355 PARAMETER Experiment Name: At_Siliques_Sub_P Parameter: Tissue Value: Less Than 5mm Siliques vs. Whole Plant
  misc_feature: MA Experiment ID: 20000440 Result: Down-regulated in Transcription
  misc_feature: MA Experiment 20000440 PARAMETER Experiment Name: At_Closed-Flower__Sub_P Parameter: Tissue Value: Closed Flower vs. Whole Plant
atgatcacctctcttacatccaacaaccgcctccggtacgaaataatctccggaggagatcaacaaccaacggagctcaaagcaactgattcccacatccaaagtctaaagccactggtgagagacgcggttgctaaactcgtagattccactctaccagacgcgcctcgtcttgcgggattcgttgttgacatgtactgcacgtcgatgatcgatgtcgctaacgaatttggcgtccctagttacttgttttacacctctaacgctggatttcttggacttttgcttcacattcagttcatgtacgatgcagaggatatctatgacatgagcgaattagaagactctgacgtagagttggtggttccgagtttgactagtccttatccgttgaaatgtcttccttacattttcaaatcaaaagagtggctcactttttttgtaactcaagcgagaagattcagagaaactaagggcattttggtaaacacggttcctgacttggaacctcaagcgttgacgtttctttccaatggtaacattccacgtgcttacccagtaggaccattgttgcatctcaaaaacgtaaattgtgattacgtggacaagaagcaatcggagattttacggtggctagacgagcaaccgccaagatctgtagtgttcctctgtttcgggagcatgggagggttcagtgaggaacaagtgagagaaaccgcattagctctcgatcgaagcggccaccggtttctttggtctctccgtcgtgcatctccgaatatattgagagagcctcccggagaattcacaaacctagaggagattctcccagaagggtttttcgatcggacggctaacagaggaaaggttatcggatgggctgaacaggtggccatattggcgaagccggcgatcggaggttttgtttctcacggcggatggaattcgacgttggagagtttgtggtttggtgttccgatggcgatttggccgctttacgctgaacagaagtttaacgctttcgagatggtggaagagcttggtttggctgtggagatcaagaagcattggcgaggagatcttttgttggggaggtcggagattgtgacggcggaggagattgagaaaggaatcatatgtttgatggagcaagacagtgacgtcaggaagagagtgaatgagatcagcgagaagtgccacgtggctttaatggacggtggatcgtcagaaactgctttgaaaagatttattcaagacgtaacggagaatattgcttggtcggaaactgaaagctag

SEQ ID NO: 73910 - protein, 431 aa, Arabidopsis thaliana
  peptide (1)..(431): Ceres Seq. ID no. 4984599
  misc_feature (1)..(424): Pfam Name: UDP-glucoronosyl and UDP-glucosyl transferase Pfam Description: UDP-glucoronosyl and UDP-glucosyl transferase
  misc_feature (1)..(431): Homolog of NCBI NO: 11994645 NR Description: UTP-glucose glucosyltransferase [Arabidopsis
  misc_feature (1)..(431): Homolog of NCBI NO: 15233155 NR Description: putative UDP-glucose glucosyltransferase; protein
  misc_feature (4)..(430): Homolog of NCBI NO: 11994646 NR Description: UTP-glucose glucosyltransferase [Arabidopsis
  misc_feature (4)..(430): Homolog of NCBI NO: 15233157 NR Description: putative UDP-glucose glucosyltransferase; protein
  misc_feature (4)..(425): Homolog of NCBI NO: 15233158 NR Description: putative UDP-glucose glucosyltransferase; protein
  misc_feature (7)..(425): Homolog of NCBI NO: 7488111 NR Description: probable glucosyltransferase - Arabidopsis >gi|2244884|emb|CAB10305.1| glucosyltransferase [Arabidopsis >gi|7268273|emb|CAB78568.1| glucosyltransferase [Arabidopsis
  misc_feature (2)..(424): Homolog of NCBI NO: 15233761 NR Description: UTP-glucose glucosyltransferase; protein id:
  misc_feature (2)..(425): Homolog of NCBI NO: 15233151 NR Description: putative UDP-glucose glucosyltransferase; protein At3g21760.1, supported by cDNA: gi_13937235, supported by cDNA:
  misc_feature (65)..(425): Homolog of NCBI NO: 30683191 NR Description: UDP-glycosyltransferase family [Arabidopsis >gi|26450578|dbj|BAC42401.1| putative glucosyltransferase
  misc_feature (7)..(424): Homolog of NCBI NO: 15233149 NR Description: UDP-glycosyltransferase family; protein id:
MITSLTSNNRLRYEIISGGDQQPTELKATDSHIQSLKPLVRDAVAKLVDSTLPDAPRLAGFVVDMYCTSMIDVANEFGVPSYLFYTSNAGFLGLLLHIQFMYDAEDIYDMSELEDSDVELVVPSLTSPYPLKCLPYIFKSKEWLTFFVTQARRFRETKGILVNTVPDLEPQALTFLSNGNIPRAYPVGPLLHLKNVNCDYVDKKQSEILRWLDEQPPRSVVFLCFGSMGGFSEEQVRETALALDRSGHRFLWSLRRASPNILREPPGEFTNLEEILPEGFFDRTANRGKVIGWAEQVAILAKPAIGGFVSHGGWNSTLESLWFGVPMAIWPLYAEQKFNAFEMVEELGLAVEIKKHWRGDLLLGRSEIVTAEEIEKGIICLMEQDSDVRKRVNEISEKCHVALMDGGSSETALKRFIQDVTENIAWSETES

SEQ ID NO: 73911 - protein, 367 aa, Arabidopsis thaliana
  peptide (1)..(367): Ceres Seq. ID no. 4984600
  misc_feature (1)..(360): Pfam Name: UDP-glucoronosyl and UDP-glucosyl transferase Pfam Description: UDP-glucoronosyl and UDP-glucosyl transferase
  misc_feature (1)..(367): Homolog of NCBI NO: 11994645 NR Description: UTP-glucose glucosyltransferase [Arabidopsis
  misc_feature (1)..(367): Homolog of NCBI NO: 15233155 NR Description: putative UDP-glucose glucosyltransferase; protein
  misc_feature (1)..(366): Homolog of NCBI NO: 11994646 NR Description: UTP-glucose glucosyltransferase [Arabidopsis
  misc_feature (1)..(366): Homolog of NCBI NO: 15233157 NR Description: putative UDP-glucose glucosyltransferase; protein
  misc_feature (1)..(361): Homolog of NCBI NO: 15233158 NR Description: putative UDP-glucose glucosyltransferase; protein
  misc_feature (1)..(361): Homolog of NCBI NO: 7488111 NR Description: probable glucosyltransferase - Arabidopsis >gi|2244884|emb|CAB10305.1| glucosyltransferase [Arabidopsis >gi|7268273|emb|CAB78568.1| glucosyltransferase [Arabidopsis
  misc_feature (1)..(360): Homolog of NCBI NO: 15233761 NR Description: UTP-glucose glucosyltransferase; protein id:
  misc_feature (1)..(361): Homolog of NCBI NO: 15233151 NR Description: putative UDP-glucose glucosyltransferase; protein At3g21760.1, supported by cDNA: gi_13937235, supported by cDNA:
  misc_feature (1)..(361): Homolog of NCBI NO: 30683191 NR Description: UDP-glycosyltransferase family [Arabidopsis >gi|26450578|dbj|BAC42401.1| putative glucosyltransferase
  misc_feature (1)..(360): Homolog of NCBI NO: 15233149 NR Description: UDP-glycosyltransferase family; protein id:
MYCTSMIDVANEFGVPSYLFYTSNAGFLGLLLHIQFMYDAEDIYDMSELEDSDVELVVPSLTSPYPLKCLPYIFKSKEWLTFFVTQARRFRETKGILVNTVPDLEPQALTFLSNGNIPRAYPVGPLLHLKNVNCDYVDKKQSEILRWLDEQPPRSVVFLCFGSMGGFSEEQVRETALALDRSGHRFLWSLRRASPNILREPPGEFTNLEEILPEGFFDRTANRGKVIGWAEQVAILAKPAIGGFVSHGGWNSTLESLWFGVPMAIWPLYAEQKFNAFEMVEELGLAVEIKKHWRGDLLLGRSEIVTAEEIEKGIICLMEQDSDVRKRVNEISEKCHVALMDGGSSETALKRFIQDVTENIAWSETES

SEQ ID NO: 73912 - protein, 362 aa, Arabidopsis thaliana
  peptide (1)..(362): Ceres Seq. ID no. 4984601
  misc_feature (1)..(355): Pfam Name: UDP-glucoronosyl and UDP-glucosyl transferase Pfam Description: UDP-glucoronosyl and UDP-glucosyl transferase
  misc_feature (1)..(362): Homolog of NCBI NO: 11994645 NR Description: UTP-glucose glucosyltransferase [Arabidopsis
  misc_feature (1)..(362): Homolog of NCBI NO: 15233155 NR Description: putative UDP-glucose glucosyltransferase; protein
  misc_feature (1)..(361): Homolog of NCBI NO: 11994646 NR Description: UTP-glucose glucosyltransferase [Arabidopsis
  misc_feature (1)..(361): Homolog of NCBI NO: 15233157 NR Description: putative UDP-glucose glucosyltransferase; protein
  misc_feature (1)..(356): Homolog of NCBI NO: 15233158 NR Description: putative UDP-glucose glucosyltransferase; protein
  misc_feature (1)..(356): Homolog of NCBI NO: 7488111 NR Description: probable glucosyltransferase - Arabidopsis >gi|2244884|emb|CAB10305.1| glucosyltransferase [Arabidopsis >gi|7268273|emb|CAB78568.1| glucosyltransferase [Arabidopsis
  misc_feature (1)..(355): Homolog of NCBI NO: 15233761 NR Description: UTP-glucose glucosyltransferase; protein id:
  misc_feature (1)..(356): Homolog of NCBI NO: 15233151 NR Description: putative UDP-glucose glucosyltransferase; protein At3g21760.1, supported by cDNA: gi_13937235, supported by cDNA:
  misc_feature (1)..(356): Homolog of NCBI NO: 30683191 NR Description: UDP-glycosyltransferase family [Arabidopsis >gi|26450578|dbj|BAC42401.1| putative glucosyltransferase
  misc_feature (1)..(355): Homolog of NCBI NO: 15233149 NR Description: UDP-glycosyltransferase family; protein id:
MIDVANEFGVPSYLFYTSNAGFLGLLLHIQFMYDAEDIYDMSELEDSDVELVVPSLTSPYPLKCLPYIFKSKEWLTFFVTQARRFRETKGILVNTVPDLEPQALTFLSNGNIPRAYPVGPLLHLKNVNCDYVDKKQSEILRWLDEQPPRSVVFLCFGSMGGFSEEQVRETALALDRSGHRFLWSLRRASPNILREPPGEFTNLEEILPEGFFDRTANRGKVIGWAEQVAILAKPAIGGFVSHGGWNSTLESLWFGVPMAIWPLYAEQKFNAFEMVEELGLAVEIKKHWRGDLLLGRSEIVTAEEIEKGIICLMEQDSDVRKRVNEISEKCHVALMDGGSSETALKRFIQDVTENIAWSETES

SEQ ID NO: 73913 - DNA, 564 bp, Arabidopsis thaliana
  misc_feature (1)..(564): Ceres Seq. ID no. 4984621
  misc_feature: MA Experiment ID: 20000227 Result: Up-regulated in Transcription
  misc_feature: MA Experiment 20000227 PARAMETER Experiment Name: At_Root-Tips-vs-Tops_P Parameter: Tissue Value: Root Tips vs. Root Tops
  misc_feature: MA Experiment ID: 20000234 Result: Up-regulated in Transcription
  misc_feature: MA Experiment 20000234 PARAMETER Experiment Name: At_Siliques_P Parameter: Age (day) Value: 21
  misc_feature: MA Experiment 20000234 PARAMETER Experiment Name: At_Siliques_P Parameter: Organism Value: A. thaliana
  misc_feature: MA Experiment 20000234 PARAMETER Experiment Name: At_Siliques_P Parameter: Plant Line Value: WS
  misc_feature: MA Experiment 20000234 PARAMETER Experiment Name: At_Siliques_P Parameter: Tissue Value: Less Than 5mm Siliques vs. Whole Plant
  misc_feature: MA Experiment ID: 20000264 Result: Up-regulated in Transcription
  misc_feature: MA Experiment 20000264 PARAMETER Experiment Name: At_Open_Flower_P Parameter: Age (day) Value: 21
  misc_feature: MA Experiment 20000264 PARAMETER Experiment Name: At_Open_Flower_P Parameter: Plant Line Value: WS
  misc_feature: MA Experiment 20000264 PARAMETER Experiment Name: At_Open_Flower_P Parameter: Tissue Value: Open Flower vs. Whole Plant
  misc_feature: MA Experiment ID: 20000265 Result: Up-regulated in Transcription
  misc_feature: MA Experiment 20000265 PARAMETER Experiment Name: At_Open_Flower_P Parameter: Age (day) Value: 21
  misc_feature: MA Experiment 20000265 PARAMETER Experiment Name: At_Open_Flower_P Parameter: Plant Line Value: WS
  misc_feature: MA Experiment 20000265 PARAMETER Experiment Name: At_Open_Flower_P Parameter: Tissue Value: Closed Flower vs. Whole Plant
atggatgaaggaagagaaggagagatagagaagaagaagaagaaagatgaagaaggagaagtgaaggaaggagtagcatcaatagctttgttaccatgtgggactatctctggtcatttcattcagatgcctagctctatctgttatggcctccatggcactgaactagcttgtgagactgagtgtagccgcggtgaggattatcggttgatcaaactcactatcatagactacaatagaaagaaggaacaaacagttgtagtggagtgcaaaggccatgatgctgctcgaattaatgatgtcgagcatgctcacggtgaatatgactacttgtctttggaaaggtgggaggaagatgtgataggattagtcgaagaaaaacacgggaagaagaaagtatcggtttcgttcgagtgtgagacattgaaggcagatgaagcagcagaggaccatatcagacagtttatgcccaaattagctggacttgatgctgttattaacattggaccgatgaagatttccgggcttgattttgctgcggtggaagagggacacataaactaa

SEQ ID NO: 73914 - protein, 187 aa, Arabidopsis thaliana
  peptide (1)..(187): Ceres Seq. ID no. 4984622
  misc_feature (1)..(187): Homolog of NCBI NO: 15228659 NR Description: hypothetical protein; protein id: At3g29280.1
  misc_feature (43)..(165): Homolog of NCBI NO: 11994768 NR Description: gene_id:MMF24.3~unknown protein [Arabidopsis
MDEGREGEIEKKKKKDEEGEVKEGVASIALLPCGTISGHFIQMPSSICYGLHGTELACETECSRGEDYRLIKLTIIDYNRKKEQTVVVECKGHDAARINDVEHAHGEYDYLSLERWEEDVIGLVEEKHGKKKVSVSFECETLKADEAAEDHIRQFMPKLAGLDAVINIGPMKISGLDFAAVEEGHIN

SEQ ID NO: 73915 - protein, 145 aa, Arabidopsis thaliana
  peptide (1)..(145): Ceres Seq. ID no. 4984623
  misc_feature (1)..(145): Homolog of NCBI NO: 15228659 NR Description: hypothetical protein; protein id: At3g29280.1
  misc_feature (1)..(123): Homolog of NCBI NO: 11994768 NR Description: gene_id:MMF24.3~unknown protein [Arabidopsis
MPSSICYGLHGTELACETECSRGEDYRLIKLTIIDYNRKKEQTVVVECKGHDAARINDVEHAHGEYDYLSLERWEEDVIGLVEEKHGKKKVSVSFECETLKADEAAEDHIRQFMPKLAGLDAVINIGPMKISGLDFAAVEEGHIN

SEQ ID NO: 73916 - DNA, 393 bp, Arabidopsis thaliana
  misc_feature (1)..(393): Ceres Seq. ID no. 4984678
  misc_feature: MA Experiment ID: 20000307 Result: Up-regulated in Transcription
  misc_feature: MA Experiment 20000307 PARAMETER Experiment Name: At_Germinating_Seeds_Sub_P Parameter: Age (hr) Value: 24 vs. 0
  misc_feature: MA Experiment 20000307 PARAMETER Experiment Name: At_Germinating_Seeds_Sub_P Parameter: Organism Value: A. thaliana
  misc_feature: MA Experiment 20000307 PARAMETER Experiment Name: At_Germinating_Seeds_Sub_P Parameter: Plant Line Value: WS
  misc_feature: MA Experiment 20000307 PARAMETER Experiment Name: At_Germinating_Seeds_Sub_P Parameter: Tissue Value: Germinating Seeds
  misc_feature: MA Experiment ID: 20000314 Result: Down-regulated in Transcription
  misc_feature: MA Experiment 20000314 PARAMETER Experiment Name: At_14day_Shoots-Roots_Sub_P Parameter: Age (day) Value: 14
  misc_feature: MA Experiment 20000314 PARAMETER Experiment Name: At_14day_Shoots-Roots_Sub_P Parameter: Organism Value: A. thaliana
  misc_feature: MA Experiment 20000314 PARAMETER Experiment Name: At_14day_Shoots-Roots_Sub_P Parameter: Plant Line Value: WS
  misc_feature: MA Experiment 20000314 PARAMETER Experiment Name: At_14day_Shoots-Roots_Sub_P Parameter: Tissue Value: Roots vs. Whole Plant
  misc_feature: MA Experiment ID: 20000315 Result: Down-regulated in Transcription
  misc_feature: MA Experiment 20000315 PARAMETER Experiment Name: At_14day_Shoots-Roots_Sub_P Parameter: Age (day) Value: 14
  misc_feature: MA Experiment 20000315 PARAMETER Experiment Name: At_14day_Shoots-Roots_Sub_P Parameter: Organism Value: A. thaliana
  misc_feature: MA Experiment 20000315 PARAMETER Experiment Name: At_14day_Shoots-Roots_Sub_P Parameter: Plant Line Value: WS
  misc_feature: MA Experiment 20000315 PARAMETER Experiment Name: At_14day_Shoots-Roots_Sub_P Parameter: Tissue Value: Shoots vs. Whole Plant
  misc_feature: MA Experiment ID: 20000328 Result: Down-regulated in Transcription
  misc_feature: MA Experiment 20000328 PARAMETER Experiment Name: At_42deg_Heat_Sub_P Parameter: Age (day) Value: 14
  misc_feature: MA Experiment 20000328 PARAMETER Experiment Name: At_42deg_Heat_Sub_P Parameter: Organism Value: A. thaliana
  misc_feature: MA Experiment 20000328 PARAMETER Experiment Name: At_42deg_Heat_Sub_P Parameter: Plant Line Value: WS
  misc_feature: MA Experiment 20000328 PARAMETER Experiment Name: At_42deg_Heat_Sub_P Parameter: Temperature (deg C) Value: 42 vs. 22
  misc_feature: MA Experiment 20000328 PARAMETER Experiment Name: At_42deg_Heat_Sub_P Parameter: Timepoint (hr) Value: 6
  misc_feature: MA Experiment 20000328 PARAMETER Experiment Name: At_42deg_Heat_Sub_P Parameter: Tissue Value: Aerial
  misc_feature: MA Experiment ID: 20000347 Result: Up-regulated in Transcription
  misc_feature: MA Experiment 20000347 PARAMETER Experiment Name: At_2mM_SA_Sub_P Parameter: Age (day) Value: 14
  misc_feature: MA Experiment 20000347 PARAMETER Experiment Name: At_2mM_SA_Sub_P Parameter: Organism Value: A. thaliana
  misc_feature: MA Experiment 20000347 PARAMETER Experiment Name: At_2mM_SA_Sub_P Parameter: Plant Line Value: WS
  misc_feature: MA Experiment 20000347 PARAMETER Experiment Name: At_2mM_SA_Sub_P Parameter: Timepoint (hr) Value: 6
  misc_feature: MA Experiment 20000347 PARAMETER Experiment Name: At_2mM_SA_Sub_P Parameter: Tissue Value: Aerial
  misc_feature: MA Experiment 20000347 PARAMETER Experiment Name: At_2mM_SA_Sub_P Parameter: Treatment Value: 2mM SA vs. No Treatment
  misc_feature: MA Experiment ID: 20000355 Result: Down-regulated in Transcription
  misc_feature: MA Experiment 20000355 PARAMETER Experiment Name: At_Siliques_Sub_P Parameter: Age (day) Value: 21
  misc_feature: MA Experiment 20000355 PARAMETER Experiment Name: At_Siliques_Sub_P Parameter: Organism Value: A. thaliana
  misc_feature: MA Experiment 20000355 PARAMETER Experiment Name: At_Siliques_Sub_P Parameter: Plant Line Value: WS
  misc_feature: MA Experiment 20000355 PARAMETER Experiment Name: At_Siliques_Sub_P Parameter: Tissue Value: Less Than 5mm Siliques vs. Whole Plant
  misc_feature: MA Experiment ID: 20000440 Result: Down-regulated in Transcription
  misc_feature: MA Experiment 20000440 PARAMETER Experiment Name: At_Closed-Flower__Sub_P Parameter: Tissue Value: Closed Flower vs. Whole Plant
atgacggatgattgcaagaaatcgttcatggagatgaaatggaagaaagtgcatagatacgtcgtttacaaactcgaggagaagtctcggaaagtcaccgtcgacaaggttggtgccgccggcgagagctacgacgatctcgctgcttctttgccggaggatgactgtcgttacgccgtgtttgatttcgattacgtcaccgtcgataactgtcgtatgagcaagatcttcttcataacttggtcgccggaggcttcaaggataagggagaagatgatgtacgcgacgtcgaagagcggactgagaagagtgttggatggtgttcactacgagcttcaagccaccgacccaaccgagatgggatttgataaaatccaggaccgggccaaatga

SEQ ID NO: 73917 - protein, 130 aa, Arabidopsis thaliana
  peptide (1)..(130): Ceres Seq. ID no. 4984679
  misc_feature (3)..(130): Pfam Name: Cofilin/tropomyosin-type actin-binding protein Pfam Description: Cofilin/tropomyosin-type actin-binding protein
  misc_feature (1)..(130): Homolog of NCBI NO: 15236233 NR Description: actin depolymerizing factor - like protein;
  misc_feature (1)..(130): Homolog of NCBI NO: 18398187 NR Description: actin depolymerizing factor 5; protein id: supported by cDNA: 26940., supported by cDNA: gi_13430779, by cDNA: gi_15293262, supported by cDNA: gi_4185512 [Arabidopsis
  misc_feature (1)..(130): Homolog of NCBI NO: 25295742 NR Description: actin depolymerizing factor 5 [imported] -
  misc_feature (1)..(130): Homolog of NCBI NO: 7330254 NR Description: actin depolymerizing factor [Elaeis guineensis]
  misc_feature (1)..(129): Homolog of NCBI NO: 32363121 NR Description: Actin-depolymerizing factor (ADF)
  misc_feature (1)..(129): Homolog of NCBI NO: 4566614 NR Description: actin depolymerizing factor [Populus x canescens]
  misc_feature (3)..(129): Homolog of NCBI NO: 17366768 NR Description: Actin-depolymerizing factor 1 (ADF 1)
  misc_feature (1)..(129): Homolog of NCBI NO: 24745620 NR Description: actin depolymerizing factor 6 [Solanum tuberosum]
  misc_feature (3)..(128): Homolog of NCBI NO: 30697300 NR Description: actin depolymerizing factor 4 - like protein
  misc_feature (3)..(128): Homolog of NCBI NO: 30697303 NR Description: actin depolymerizing factor 4 - like protein thaliana] >gi|15215859|gb|AAK91473.1| AT5g59890/mmn10_110 thaliana] >gi|19699262|gb|AAL90997.1| At1g05180/YUP8H12_21
MTDDCKKSFMEMKWKKVHRYVVYKLEEKSRKVTVDKVGAAGESYDDLAASLPEDDCRYAVFDFDYVTVDNCRMSKIFFITWSPEASRIREKMMYATSKSGLRRVLDGVHYELQATDPTEMGFDKIQDRAK

SEQ ID NO: 73918 - protein, 121 aa, Arabidopsis thaliana
  peptide (1)..(121): Ceres Seq. ID no. 4984680
  misc_feature (1)..(121): Pfam Name: Cofilin/tropomyosin-type actin-binding protein Pfam Description: Cofilin/tropomyosin-type actin-binding protein
  misc_feature (1)..(121): Homolog of NCBI NO: 15236233 NR Description: actin depolymerizing factor - like protein;
  misc_feature (1)..(121): Homolog of NCBI NO: 18398187 NR Description: actin depolymerizing factor 5; protein id: supported by cDNA: 26940., supported by cDNA: gi_13430779, by cDNA: gi_15293262, supported by cDNA: gi_4185512 [Arabidopsis
  misc_feature (1)..(121): Homolog of NCBI NO: 25295742 NR Description: actin depolymerizing factor 5 [imported] -
  misc_feature (1)..(121): Homolog of NCBI NO: 7330254 NR Description: actin depolymerizing factor [Elaeis guineensis]
  misc_feature (1)..(120): Homolog of NCBI NO: 32363121 NR Description: Actin-depolymerizing factor (ADF)
  misc_feature (1)..(120): Homolog of NCBI NO: 4566614 NR Description: actin depolymerizing factor [Populus x canescens]
  misc_feature (1)..(120): Homolog of NCBI NO: 17366768 NR Description: Actin-depolymerizing factor 1 (ADF 1)
  misc_feature (1)..(120): Homolog of NCBI NO: 24745620 NR Description: actin depolymerizing factor 6 [Solanum tuberosum]
  misc_feature (1)..(119): Homolog of NCBI NO: 30697300 NR Description: actin depolymerizing factor 4 - like protein
  misc_feature (1)..(119): Homolog of NCBI NO: 30697303 NR Description: actin depolymerizing factor 4 - like protein thaliana] >gi|15215859|gb|AAK91473.1| AT5g59890/mmn10_110 thaliana] >gi|19699262|gb|AAL90997.1| At1g05180/YUP8H12_21
MEMKWKKVHRYVVYKLEEKSRKVTVDKVGAAGESYDDLAASLPEDDCRYAVFDFDYVTVDNCRMSKIFFITWSPEASRIREKMMYATSKSGLRRVLDGVHYELQATDPTEMGFDKIQDRAK

SEQ ID NO: 73919 - protein, 119 aa, Arabidopsis thaliana
  peptide (1)..(119): Ceres Seq. ID no. 4984681
  misc_feature (1)..(119): Pfam Name: Cofilin/tropomyosin-type actin-binding protein Pfam Description: Cofilin/tropomyosin-type actin-binding protein
  misc_feature (1)..(119): Homolog of NCBI NO: 15236233 NR Description: actin depolymerizing factor - like protein;
  misc_feature (1)..(119): Homolog of NCBI NO: 18398187 NR Description: actin depolymerizing factor 5; protein id: supported by cDNA: 26940., supported by cDNA: gi_13430779, by cDNA: gi_15293262, supported by cDNA: gi_4185512 [Arabidopsis
  misc_feature (1)..(119): Homolog of NCBI NO: 25295742 NR Description: actin depolymerizing factor 5 [imported] -
  misc_feature (1)..(119): Homolog of NCBI NO: 7330254 NR Description: actin depolymerizing factor [Elaeis guineensis]
  misc_feature (1)..(118): Homolog of NCBI NO: 32363121 NR Description: Actin-depolymerizing factor (ADF)
  misc_feature (1)..(118): Homolog of NCBI NO: 4566614 NR Description: actin depolymerizing factor [Populus x canescens]
  misc_feature (1)..(118): Homolog of NCBI NO: 17366768 NR Description: Actin-depolymerizing factor 1 (ADF 1)
  misc_feature (1)..(118): Homolog of NCBI NO: 24745620 NR Description: actin depolymerizing factor 6 [Solanum tuberosum]
  misc_feature (1)..(117): Homolog of NCBI NO: 30697300 NR Description: actin depolymerizing factor 4 - like protein
  misc_feature (1)..(117): Homolog of NCBI NO: 30697303 NR Description: actin depolymerizing factor 4 - like protein thaliana] >gi|15215859|gb|AAK91473.1| AT5g59890/mmn10_110 thaliana] >gi|19699262|gb|AAL90997.1| At1g05180/YUP8H12_21
MKWKKVHRYVVYKLEEKSRKVTVDKVGAAGESYDDLAASLPEDDCRYAVFDFDYVTVDNCRMSKIFFITWSPEASRIREKMMYATSKSGLRRVLDGVHYELQATDPTEMGFDKIQDRAK

SEQ ID NO: 73920 - DNA, 3693 bp, Arabidopsis thaliana
  misc_feature (1)..(3693): Ceres Seq. ID no. 4984702
  misc_feature: MA Experiment ID: 20000306 Result: Down-regulated in Transcription
  misc_feature: MA Experiment 20000306 PARAMETER Experiment Name: At_Germinating_Seeds_Sub_P Parameter: Age (hr) Value: 6 vs. 0
  misc_feature: MA Experiment 20000306 PARAMETER Experiment Name: At_Germinating_Seeds_Sub_P Parameter: Organism Value: A. thaliana
  misc_feature: MA Experiment 20000306 PARAMETER Experiment Name: At_Germinating_Seeds_Sub_P Parameter: Plant Line Value: WS
  misc_feature: MA Experiment 20000306 PARAMETER Experiment Name: At_Germinating_Seeds_Sub_P Parameter: Tissue Value: Germinating Seeds
atgaagaaggggaacttggaagcgaacacaaagacagtaccgttctacaaattgtttttcttctcagattctaccgatgtgttgttgatgatcgttggttcgatcggagctatcgcaaacggtgtttgttctccgttaatgacattattgtttggtgaactcattgatgcaatgggtccaaaccagaacaatgaagagattgttgagagagtttccaaggtttgtttgagtttagtctaccttggacttggagccctaggagctgcctttcttcaggtggcttgttggatgattactggggagagacaagctgcaaggataaggagtttgtatctgaaaacgattctaagacaagacattggattcttcgatgtcgaaatgaccacaggagaagttgttggtcgaatgtctggtgatacggttcttatacttgatgctatgggtgagaaggttgggaagtttatacagttgatttcaacatttgtgggtggatttgttatagcgtttttgagaggatggttacttacacttgttatgttgacctcaattcctcttctagctatgtctggtgcagctatagcgattatagttacaagagcttcttctcaagaacaagctgcttatgcaaaagcatcaaatgttgttgaacaaactttggggtccattcgaaccgttgcttctttcacgggagagaagcaagcgatgagtagctacaaagagttgataaatttggcctataaatcgaatgttaagcaaggtttcgttacgggtttaggtcttggagtaatgttcttggtgttcttttccacctatgctttgggtacatggtttggtggtgaaatgatactgagaaaagggtatacaggtggtgcagtgatcaatgttatggtcactgtggtctcgagttcgatagctttagggcaagcatcaccttgtctaactgcatttacggctggtaaagctgcagcttataagatgtttgaaacaatcgaaagagagcctttgattgatacttttgacctaaatgggaaggttttagaagatattcgaggcgaaatcgagctgagagatgtgtgttttagttaccctgcaaggcctaaagaagaggtttttggcggattctctctgttgattccgagtggcacaaccactgctttggtaggagaaagcgggagtgggaagtctactgtgatcagtttgatcgaaaggttttatgatccgaattccggacaagtgcttattgatggtgttgatttaaaggagtttcagttgaaatggattaggggaaagattggattggttagtcaagaacctgttctgttttcttcaagtataatggagaatatcggatacgggaaagagggggcaacggttgaagagatacaagcagcgtcgaagctagcaaacgcggctaaattcatcgataagttgcctctaggtttagagacattggtaggggagcatggaactcaactctcaggaggacagaaacagaggattgctatcgcgagggcgatacttaaagatccgcggatcttgctgttagatgaagcgacaagcgcacttgatgcggaatccgaaagagtggttcaagaggctttagataggataatggtgaaccggactacagtgattgtcgcgcatcggttaagcacggttagaaacgctgatatcatcgctgtgattcatcgtggaaagattgtggaagaaggttcgcattcagagttacttaaagatcatgaaggggcttattcacagcttctaaggttacaagagataaacaaagaatcaaagcgattggagatttctgatggatcaatcagcagtggatcatcaagaggaaacaacagcacaaggcaagatgatgactctttttctgttctgggtttacttgcaggccaagatagtactaaaatgtctcaagaactatcacagaaagtgtcgtttactcgaatcgctgctctaaacaaaccagagattccaattcttatacttggaaccctagtaggtgctgtgaacggcactatattccccatctttggtatcctctttgccaaagtaatcgaagctttcttcaaagcgcctcatgagctgaagagagattcaagattctggtcgatgatattcgtacttcttggtgtagccgctgtgatagtgtatccaacgactaactacttgtttgctatagctggagggagacttattcggaggataagatcaatgtgttttgagaaagttgttcacatggaggttgggtggttcgatgaacctgggaactcgagcggtgcaatgggagcgaggctctctgctgatgcagccttgatccggactcttgtgggagactcgctttgtctatcggttaaaaacgttgcgtctttggtgacaggactaatcatagctttcacggcgagctgggaagtggcgattatcatcttagtaattattccgtttattggaatcaatggatatattcaaattaagttcatgaaaggcttcagtgcagacgcaaaggcaaagtacgaggaggcgagtcaggtggcgaacgatgcagtggggagtataagaacggttgcgtctttctgtgcggaggaaaaagtgatggagatgtataagaaacgatgtgaagatacgattaaatctgggattaagcaaggtttaatcagcggagtagggtttggtatctcctttttcgttctttactctgtctacgctagttgtttctacgtgggagctagactggttaaagccggaaggacaaacttcaacgatgtttttcaggttttcttggccttgacgttaacagcagttgggatttctcaggcgagctcttttgctcctgattcgagtaaaggtaagggtgctgctgtttcgattttcagaattattgataggatatcgaagatagattcgagagacgaatcgggaatggtgttggagaatgtaaaaggagatatcgagctttgccacataagcttcacttaccaaactagacctgatgttcaagtctttcgtgacctctgtttgagcattcgtgccggacagactgttgctttggttggagaaagtgggtcaggaaaatctacggtgatttcactgttacagaggttttatgatccggattcaggtcatataactctagacggagttgagctcaagaagctgcgactaaaatggctaagacaacagatggggcttgtaggacaagagcctgtactattcaacgacacgatacgagccaacattgcttatggaaaaggcggcgaggaagcaaccgaggctgagattatagctgcttccgagctagctaatgcccacaggttcatctctagtatacaaaagggttatgatacggtggtgggagagagagggatacaattgtcaggaggacagaagcagcgcgtggcgattgcacgcgccatcgtgaaagaaccgaagattctgttactcgacgaagcgacgagcgcgttggacgcagaatcggagcgggtggttcaagacgcgcttgatcgggtgatggtgaaccggaccaccatcgtggtggctcacaggctttcaacgatcaagaatgctgacgtcatcgccgtcgtcaagaacggtgtgattgcagagaaagggacgcacgagacgttgatcaatatcgaaggtggagtttatgcctcgctcgttcaactccacatcaatgcttctaattga

SEQ ID NO: 73921 - protein, 1230 aa, Arabidopsis thaliana
  peptide (1)..(1230): Ceres Seq. ID no. 4984703
  misc_feature (1013)..(1199): Pfam Name: ABC transporter Pfam Description: ABC transporter
  misc_feature (2)..(917): Homolog of NCBI NO: 18496818 NR Description: ABC transporter AbcB3 [Dictyostelium discoideum]
  misc_feature (921)..(1221): Homolog of NCBI NO: 18496818 NR Description: ABC transporter AbcB3 [Dictyostelium discoideum]
  misc_feature (568)..(1218): Homolog of NCBI NO: 14030565 NR Description: bile salt export pump [Raja erinacea]
  misc_feature (61)..(662): Homolog of NCBI NO: 14030565 NR Description: bile salt export pump [Raja erinacea]
  misc_feature (13)..(56): Homolog of NCBI NO: 14030565 NR Description: bile salt export pump [Raja erinacea]
  misc_feature (409)..(1228): Homolog of NCBI NO: 24960750 NR Description: Hypothetical protein [Oryza sativa (japonica
  misc_feature (11)..(293): Homolog of NCBI NO: 24960750 NR Description: Hypothetical protein [Oryza sativa (japonica
  misc_feature (313)..(411): Homolog of NCBI NO: 24960750 NR Description: Hypothetical protein [Oryza sativa (japonica
  misc_feature (506)..(1224): Homolog of NCBI NO: 27368845 NR Description: MDR-like ABC transporter [Oryza sativa (japonica
  misc_feature (14)..(491): Homolog of NCBI NO: 27368845 NR Description: MDR-like ABC transporter [Oryza sativa (japonica
MKKGNLEANTKTVPFYKLFFFSDSTDVLLMIVGSIGAIANGVCSPLMTLLFGELIDAMGPNQNNEEIVERVSKVCLSLVYLGLGALGAAFLQVACWMITGERQAARIRSLYLKTILRQDIGFFDVEMTTGEVVGRMSGDTVLILDAMGEKVGKFIQLISTFVGGFVIAFLRGWLLTLVMLTSIPLLAMSGAAIAIIVTRASSQEQAAYAKASNVVEQTLGSIRTVASFTGEKQAMSSYKELINLAYKSNVKQGFVTGLGLGVMFLVFFSTYALGTWFGGEMILRKGYTGGAVINVMVTVVSSSIALGQASPCLTAFTAGKAAAYKMFETIEREPLIDTFDLNGKVLEDIRGEIELRDVCFSYPARPKEEVFGGFSLLIPSGTTTALVGESGSGKSTVISLIERFYDPNSGQVLIDGVDLKEFQLKWIRGKIGLVSQEPVLFSSSIMENIGYGKEGATVEEIQAASKLANAAKFIDKLPLGLETLVGEHGTQLSGGQKQRIAIARAILKDPRILLLDEATSALDAESERVVQEALDRIMVNRTTVIVAHRLSTVRNADIIAVIHRGKIVEEGSHSELLKDHEGAYSQLLRLQEINKESKRLEISDGSISSGSSRGNNSTRQDDDSFSVLGLLAGQDSTKMSQELSQKVSFTRIAALNKPEIPILILGTLVGAVNGTIFPIFGILFAKVIEAFFKAPHELKRDSRFWSMIFVLLGVAAVIVYPTTNYLFAIAGGRLIRRIRSMCFEKVVHMEVGWFDEPGNSSGAMGARLSADAALIRTLVGDSLCLSVKNVASLVTGLIIAFTASWEVAIIILVIIPFIGINGYIQIKFMKGFSADAKAKYEEASQVANDAVGSIRTVASFCAEEKVMEMYKKRCEDTIKSGIKQGLISGVGFGISFFVLYSVYASCFYVGARLVKAGRTNFNDVFQVFLALTLTAVGISQASSFAPDSSKGKGAAVSIFRIIDRISKIDSRDESGMVLENVKGDIELCHISFTYQTRPDVQVFRDLCLSIRAGQTVALVGESGSGKSTVISLLQRFYDPDSGHITLDGVELKKLRLKWLRQQMGLVGQEPVLFNDTIRANIAYGKGGEEATEAEIIAASELANAHRFISSIQKGYDTVVGERGIQLSGGQKQRVAIARAIVKEPKILLLDEATSALDAESERVVQDALDRVMVNRTTIVVAHRLSTIKNADVIAVVKNGVIAEKGTHETLINIEGGVYASLVQLHINASN

SEQ ID NO: 73922 - protein, 1201 aa, Arabidopsis thaliana
  peptide (1)..(1201): Ceres Seq. ID no. 4984704
  misc_feature (984)..(1170): Pfam Name: ABC transporter Pfam Description: ABC transporter
  misc_feature (1)..(888): Homolog of NCBI NO: 18496818 NR Description: ABC transporter AbcB3 [Dictyostelium discoideum]
  misc_feature (892)..(1192): Homolog of NCBI NO: 18496818 NR Description: ABC transporter AbcB3 [Dictyostelium discoideum]
  misc_feature (539)..(1189): Homolog of NCBI NO: 14030565 NR Description: bile salt export pump [Raja erinacea]
  misc_feature (32)..(633): Homolog of NCBI NO: 14030565 NR Description: bile salt export pump [Raja erinacea]
  misc_feature (1)..(27): Homolog of NCBI NO: 14030565 NR Description: bile salt export pump [Raja erinacea]
  misc_feature (380)..(1199): Homolog of NCBI NO: 24960750 NR Description: Hypothetical protein [Oryza sativa (japonica
  misc_feature (1)..(264): Homolog of NCBI NO: 24960750 NR Description: Hypothetical protein [Oryza sativa (japonica
  misc_feature (284)..(382): Homolog of NCBI NO: 24960750 NR Description: Hypothetical protein [Oryza sativa (japonica
  misc_feature (477)..(1195): Homolog of NCBI NO: 27368845 NR Description: MDR-like ABC transporter [Oryza sativa (japonica
  misc_feature (1)..(462): Homolog of NCBI NO: 27368845 NR Description: MDR-like ABC transporter [Oryza sativa (japonica
MIVGSIGAIANGVCSPLMTLLFGELIDAMGPNQNNEEIVERVSKVCLSLVYLGLGALGAAFLQVACWMITGERQAARIRSLYLKTILRQDIGFFDVEMTTGEVVGRMSGDTVLILDAMGEKVGKFIQLISTFVGGFVIAFLRGWLLTLVMLTSIPLLAMSGAAIAIIVTRASSQEQAAYAKASNVVEQTLGSIRTVASFTGEKQAMSSYKELINLAYKSNVKQGFVTGLGLGVMFLVFFSTYALGTWFGGEMILRKGYTGGAVINVMVTVVSSSIALGQASPCLTAFTAGKAAAYKMFETIEREPLIDTFDLNGKVLEDIRGEIELRDVCFSYPARPKEEVFGGFSLLIPSGTTTALVGESGSGKSTVISLIERFYDPNSGQVLIDGVDLKEFQLKWIRGKIGLVSQEPVLFSSSIMENIGYGKEGATVEEIQAASKLANAAKFIDKLPLGLETLVGEHGTQLSGGQKQRIAIARAILKDPRILLLDEATSALDAESERVVQEALDRIMVNRTTVIVAHRLSTVRNADIIAVIHRGKIVEEGSHSELLKDHEGAYSQLLRLQEINKESKRLEISDGSISSGSSRGNNSTRQDDDSFSVLGLLAGQDSTKMSQELSQKVSFTRIAALNKPEIPILILGTLVGAVNGTIFPIFGILFAKVIEAFFKAPHELKRDSRFWSMIFVLLGVAAVIVYPTTNYLFAIAGGRLIRRIRSMCFEKVVHMEVGWFDEPGNSSGAMGARLSADAALIRTLVGDSLCLSVKNVASLVTGLIIAFTASWEVAIIILVIIPFIGINGYIQIKFMKGFSADAKAKYEEASQVANDAVGSIRTVASFCAEEKVMEMYKKRCEDTIKSGIKQGLISGVGFGISFFVLYSVYASCFYVGARLVKAGRTNFNDVFQVFLALTLTAVGISQASSFAPDSSKGKGAAVSIFRIIDRISKIDSRDESGMVLENVKGDIELCHISFTYQTRPDVQVFRDLCLSIRAGQTVALVGESGSGKSTVISLLQRFYDPDSGHITLDGVELKKLRLKWLRQQMGLVGQEPVLFNDTIRANIAYGKGGEEATEAEIIAASELANAHRFISSIQKGYDTVVGERGIQLSGGQKQRVAIARAIVKEPKILLLDEATSALDAESERVVQDALDRVMVNRTTIVVAHRLSTIKNADVIAVVKNGVIAEKGTHETLINIEGGVYASLVQLHINASN

SEQ ID NO: 73923 - protein, 1184 aa, Arabidopsis thaliana
  peptide (1)..(1184): Ceres Seq. ID no. 4984705
  misc_feature (967)..(1153): Pfam Name: ABC transporter Pfam Description: ABC transporter
  misc_feature (1)..(871): Homolog of NCBI NO: 18496818 NR Description: ABC transporter AbcB3 [Dictyostelium discoideum]
  misc_feature (875)..(1175): Homolog of NCBI NO: 18496818 NR Description: ABC transporter AbcB3 [Dictyostelium discoideum]
  misc_feature (522)..(1172): Homolog of NCBI NO: 14030565 NR Description: bile salt export pump [Raja erinacea]
  misc_feature (15)..(616): Homolog of NCBI NO: 14030565 NR Description: bile salt export pump [Raja erinacea]
  misc_feature (363)..(1182): Homolog of NCBI NO: 24960750 NR Description: Hypothetical protein [Oryza sativa (japonica
  misc_feature (1)..(247): Homolog of NCBI NO: 24960750 NR Description: Hypothetical protein [Oryza sativa (japonica
  misc_feature (267)..(365): Homolog of NCBI NO: 24960750 NR Description: Hypothetical protein [Oryza sativa (japonica
  misc_feature (460)..(1178): Homolog of NCBI NO: 27368845 NR Description: MDR-like ABC transporter [Oryza sativa (japonica
  misc_feature (1)..(445): Homolog of NCBI NO: 27368845 NR Description: MDR-like ABC transporter [Oryza sativa (japonica
  misc_feature (547)..(1179): Homolog of NCBI NO: 27368853 NR Description: MDR-like ABC transporter [Oryza sativa (japonica
MTLLFGELIDAMGPNQNNEEIVERVSKVCLSLVYLGLGALGAAFLQVACWMITGERQAARIRSLYLKTILRQDIGFFDVEMTTGEVVGRMSGDTVLILDAMGEKVGKFIQLISTFVGGFVIAFLRGWLLTLVMLTSIPLLAMSGAAIAIIVTRASSQEQAAYAKASNVVEQTLGSIRTVASFTGEKQAMSSYKELINLAYKSNVKQGFVTGLGLGVMFLVFFSTYALGTWFGGEMILRKGYTGGAVINVMVTVVSSSIALGQASPCLTAFTAGKAAAYKMFETIEREPLIDTFDLNGKVLEDIRGEIELRDVCFSYPARPKEEVFGGFSLLIPSGTTTALVGESGSGKSTVISLIERFYDPNSGQVLIDGVDLKEFQLKWIRGKIGLVSQEPVLFSSSIMENIGYGKEGATVEEIQAASKLANAAKFIDKLPLGLETLVGEHGTQLSGGQKQRIAIARAILKDPRILLLDEATSALDAESERVVQEALDRIMVNRTTVIVAHRLSTVRNADIIAVIHRGKIVEEGSHSELLKDHEGAYSQLLRLQEINKESKRLEISDGSISSGSSRGNNSTRQDDDSFSVLGLLAGQDSTKMSQELSQKVSFTRIAALNKPEIPILILGTLVGAVNGTIFPIFGILFAKVIEAFFKAPHELKRDSRFWSMIFVLLGVAAVIVYPTTNYLFAIAGGRLIRRIRSMCFEKVVHMEVGWFDEPGNSSGAMGARLSADAALIRTLVGDSLCLSVKNVASLVTGLIIAFTASWEVAIIILVIIPFIGINGYIQIKFMKGFSADAKAKYEEASQVANDAVGSIRTVASFCAEEKVMEMYKKRCEDTIKSGIKQGLISGVGFGISFFVLYSVYASCFYVGARLVKAGRTNFNDVFQVFLALTLTAVGISQASSFAPDSSKGKGAAVSIFRIIDRISKIDSRDESGMVLENVKGDIELCHISFTYQTRPDVQVFRDLCLSIRAGQTVALVGESGSGKSTVISLLQRFYDPDSGHITLDGVELKKLRLKWLRQQMGLVGQEPVLFNDTIRANIAYGKGGEEATEAEIIAASELANAHRFISSIQKGYDTVVGERGIQLSGGQKQRVAIARAIVKEPKILLLDEATSALDAESERVVQDALDRVMVNRTTIVVAHRLSTIKNADVIAVVKNGVIAEKGTHETLINIEGGVYASLVQLHINASN

SEQ ID NO: 73924 - DNA, 2070 bp, Arabidopsis thaliana
  misc_feature (1)..(2070): Ceres Seq. ID no. 4984739
  misc_feature: MA Experiment ID: 20000307 Result: Up-regulated in Transcription
  misc_feature: MA Experiment 20000307 PARAMETER Experiment Name: At_Germinating_Seeds_Sub_P Parameter: Age (hr) Value: 24 vs. 0
  misc_feature: MA Experiment 20000307 PARAMETER Experiment Name: At_Germinating_Seeds_Sub_P Parameter: Organism Value: A. thaliana
  misc_feature: MA Experiment 20000307 PARAMETER Experiment Name: At_Germinating_Seeds_Sub_P Parameter: Plant Line Value: WS
  misc_feature: MA Experiment 20000307 PARAMETER Experiment Name: At_Germinating_Seeds_Sub_P Parameter: Tissue Value: Germinating Seeds
  misc_feature: MA Experiment ID: 20000314 Result: Up-regulated in Transcription
  misc_feature: MA Experiment 20000314 PARAMETER Experiment Name: At_14day_Shoots-Roots_Sub_P Parameter: Age (day) Value: 14
  misc_feature: MA Experiment 20000314 PARAMETER Experiment Name: At_14day_Shoots-Roots_Sub_P Parameter: Organism Value: A. thaliana
  misc_feature: MA Experiment 20000314 PARAMETER Experiment Name: At_14day_Shoots-Roots_Sub_P Parameter: Plant Line Value: WS
  misc_feature: MA Experiment 20000314 PARAMETER Experiment Name: At_14day_Shoots-Roots_Sub_P Parameter: Tissue Value: Roots vs. Whole Plant
atgttcaagtataacataaaaccaaaacaaataaataaaaataaagagatgggtatgatgagatcctcaagaacgatggggttagggcattgcatggtttacgttgtggtcctaagtgccattgcggctacagtgacatcatacccttactcctctccttactcatcccctcaaaccccacattacaattctcccagccatgaacacaaaagccctaagtacgcgccacatccaaaaccatacgtttatatttctccaccacctccatcatactattctccttctccaaaagtaaactataagtctccaccaccaccaaacgtctacaactctccacctccaccatactattctccttcaccaaaggttgattataagtctccaccaccaccttacgtctacagttccccacctccaccatactattctccttctccgaaggttgactataagtctcctccaccaccatacgtctacagctccccacccccaccatactattctccttcgccaaaggttgaatacaagtctccaccaccaccgtacgtctacaattctccacctccaccatactactctccttctcctaagatagagtacaagtccccaccaccaccatatgtctacagttctccacccccaccgtactactctccatctccaaaggttgactacaagtccccaccaccaccgtacgtctacaactccccacccccaccatactactctccttcgccaaaggttgactacaaatctcccccaccaccgtacgtctacagttccccacccccaccatacttctctccttcgccaaaggttgaatacaagtctcccccaccaccgtacgtctacaattctccacctccaccatactactctccttctcctaaggtagagtacaagtccccaccaccaccatatgtctacagctctccacccccaccgtactactcaccatctccaaaagtttactacaagtccccaccaccaccatacgtctacagctccccacccccaccatactactctccatctccaaaggttgactacaagtccccaccaccaccgtatgtttacagctctccacccccaccatactactctccttcgcctaaggttgactacaagtctcccccaccaccatacgtctacagctccccgcccccacaatactactctccttcgccaaaggttgcgtacaagtctcccccaccaccatacgtctacagctctccgcccccaccttactactctccttcaccaaaggttgcgtacaagtctcccccaccaccatacgtctacagctccccgcccccaccatactactctccttcacctaaggttgattacaagtctcccccaccaccatacgtctacagctcccctcctccaccttactactctccttcaccaaaggttgagtacaagtctcccccaccaccatacgtctacagctcccctcccccaccttactactctccttcaccaaaggttgagtacaagtctccaccaccaccatacgtctacagttcccctcccccaccataccactctccttcgcctaaggtaaactacaaatctccaccaccaccatacgtctacagctcccatcccccaccatactactctccttcgcctaaggtaaactacaaatctccaccaccaccatacgtctacagctccccacccccaccatactactctccttcgcctaaggttaactacaagtctcccccaccaccatacgtttacagttctccgcccccaccatactactctccttctcctatggttgactacaagtctacccccccaccatacgtctatagcttcccacccctaccatattattctccttctccaaaggttgactacaagtctccaccactaccatacgtttacagctccccacccccactatattactctccttctccaaaggttcattacaaatctccaccaccaccatacgtgtataactctccacctccaccatactattctccttctccaaaggtcacttacaagtctccaccacccccatatgtctacaaggcgccttactattga

SEQ ID NO: 73925 - protein, 689 aa, Arabidopsis thaliana
  peptide (1)..(689): Ceres Seq. ID no. 4984740
  misc_feature (228)..(531): Pfam Name: Formin Homology 2 Domain Pfam Description: Formin Homology 2 Domain
  misc_feature (110)..(689): Homolog of NCBI NO: 15233034 NR Description: unknown protein; protein id: At3g28550.1 thaliana] >gi|9294269|dbj|BAB02171.1| gene_id:MZN14.2~unknown
  misc_feature (26)..(592): Homolog of NCBI NO: 15224658 NR Description: unknown protein; protein id: At2g24980.1
  misc_feature (49)..(659): Homolog of NCBI NO: 15220851 NR Description: unknown protein; protein id: At1g23720.1
  misc_feature (157)..(689): Homolog of NCBI NO: 15224658 NR Description: unknown protein; protein id: At2g24980.1
  misc_feature (81)..(617): Homolog of NCBI NO: 15224658 NR Description: unknown protein; protein id: At2g24980.1
  misc_feature (100)..(642): Homolog of NCBI NO: 15224658 NR Description: unknown protein; protein id: At2g24980.1
  misc_feature (132)..(667): Homolog of NCBI NO: 15224658 NR Description: unknown protein; protein id: At2g24980.1
  misc_feature (17)..(534): Homolog of NCBI NO: 15236486 NR Description: extensin-like protein; protein id: At4g08400.1
  misc_feature (81)..(559): Homolog of NCBI NO: 15236486 NR Description: extensin-like protein; protein id: At4g08400.1
  misc_feature (109)..(584): Homolog of NCBI NO: 15236486 NR Description: extensin-like protein; protein id: At4g08400.1
MFKYNIKPKQINKNKEMGMMRSSRTMGLGHCMVYVVVLSAIAATVTSYPYSSPYSSPQTPHYNSPSHEHKSPKYAPHPKPYVYISPPPPSYYSPSPKVNYKSPPPPNVYNSPPPPYYSPSPKVDYKSPPPPYVYSSPPPPYYSPSPKVDYKSPPPPYVYSSPPPPYYSPSPKVEYKSPPPPYVYNSPPPPYYSPSPKIEYKSPPPPYVYSSPPPPYYSPSPKVDYKSPPPPYVYNSPPPPYYSPSPKVDYKSPPPPYVYSSPPPPYFSPSPKVEYKSPPPPYVYNSPPPPYYSPSPKVEYKSPPPPYVYSSPPPPYYSPSPKVYYKSPPPPYVYSSPPPPYYSPSPKVDYKSPPPPYVYSSPPPPYYSPSPKVDYKSPPPPYVYSSPPPQYYSPSPKVAYKSPPPPYVYSSPPPPYYSPSPKVAYKSPPPPYVYSSPPPPYYSPSPKVDYKSPPPPYVYSSPPPPYYSPSPKVEYKSPPPPYVYSSPPPPYYSPSPKVEYKSPPPPYVYSSPPPPYHSPSPKVNYKSPPPPYVYSSHPPPYYSPSPKVNYKSPPPPYVYSSPPPPYYSPSPKVNYKSPPPPYVYSSPPPPYYSPSPMVDYKSTPPPYVYSFPPLPYYSPSPKVDYKSPPLPYVYSSPPPLYYSPSPKVHYKSPPPPYVYNSPPPPYYSPSPKVTYKSPPPPYVYKAPYY

SEQ ID NO: 73926 - protein, 673 aa, Arabidopsis thaliana
  peptide (1)..(673): Ceres Seq. ID no. 4984741
  misc_feature (212)..(515): Pfam Name: Formin Homology 2 Domain Pfam Description: Formin Homology 2 Domain
  misc_feature (94)..(673): Homolog of NCBI NO: 15233034 NR Description: unknown protein; protein id: At3g28550.1 thaliana] >gi|9294269|dbj|BAB02171.1| gene_id:MZN14.2~unknown
  misc_feature (10)..(576): Homolog of NCBI NO: 15224658 NR Description: unknown protein; protein id: At2g24980.1
  misc_feature (33)..(643): Homolog of NCBI NO: 15220851 NR Description: unknown protein; protein id: At1g23720.1
  misc_feature (141)..(673): Homolog of NCBI NO: 15224658 NR Description: unknown protein; protein id: At2g24980.1
  misc_feature (65)..(601): Homolog of NCBI NO: 15224658 NR Description: unknown protein; protein id: At2g24980.1
  misc_feature (84)..(626): Homolog of NCBI NO: 15224658 NR Description: unknown protein; protein id: At2g24980.1
  misc_feature (116)..(651): Homolog of NCBI NO: 15224658 NR Description: unknown protein; protein id: At2g24980.1
  misc_feature (1)..(518): Homolog of NCBI NO: 15236486 NR Description: extensin-like protein; protein id: At4g08400.1
  misc_feature (65)..(543): Homolog of NCBI NO: 15236486 NR Description: extensin-like protein; protein id: At4g08400.1
  misc_feature (93)..(568): Homolog of NCBI NO: 15236486 NR Description: extensin-like protein; protein id: At4g08400.1
MGMMRSSRTMGLGHCMVYVVVLSAIAATVTSYPYSSPYSSPQTPHYNSPSHEHKSPKYAPHPKPYVYISPPPPSYYSPSPKVNYKSPPPPNVYNSPPPPYYSPSPKVDYKSPPPPYVYSSPPPPYYSPSPKVDYKSPPPPYVYSSPPPPYYSPSPKVEYKSPPPPYVYNSPPPPYYSPSPKIEYKSPPPPYVYSSPPPPYYSPSPKVDYKSPPPPYVYNSPPPPYYSPSPKVDYKSPPPPYVYSSPPPPYFSPSPKVEYKSPPPPYVYNSPPPPYYSPSPKVEYKSPPPPYVYSSPPPPYYSPSPKVYYKSPPPPYVYSSPPPPYYSPSPKVDYKSPPPPYVYSSPPPPYYSPSPKVDYKSPPPPYVYSSPPPQYYSPSPKVAYKSPPPPYVYSSPPPPYYSPSPKVAYKSPPPPYVYSSPPPPYYSPSPKVDYKSPPPPYVYSSPPPPYYSPSPKVEYKSPPPPYVYSSPPPPYYSPSPKVEYKSPPPPYVYSSPPPPYHSPSPKVNYKSPPPPYVYSSHPPPYYSPSPKVNYKSPPPPYVYSSPPPPYYSPSPKVNYKSPPPPYVYSSPPPPYYSPSPMVDYKSTPPPYVYSFPPLPYYSPSPKVDYKSPPLPYVYSSPPPLYYSPSPKVHYKSPPPPYVYNSPPPPYYSPSPKVTYKSPPPPYVYKAPYY

SEQ ID NO: 73927 - protein, 671 aa, Arabidopsis thaliana
  peptide (1)..(671): Ceres Seq. ID no. 4984742
  misc_feature (210)..(513): Pfam Name: Formin Homology 2 Domain Pfam Description: Formin Homology 2 Domain
  misc_feature (92)..(671): Homolog of NCBI NO: 15233034 NR Description: unknown protein; protein id: At3g28550.1 thaliana] >gi|9294269|dbj|BAB02171.1| gene_id:MZN14.2~unknown
  misc_feature (8)..(574): Homolog of NCBI NO: 15224658 NR Description: unknown protein; protein id: At2g24980.1
  misc_feature (31)..(641): Homolog of NCBI NO: 15220851 NR Description: unknown protein; protein id: At1g23720.1
  misc_feature (139)..(671): Homolog of NCBI NO: 15224658 NR Description: unknown protein; protein id: At2g24980.1
  misc_feature (63)..(599): Homolog of NCBI NO: 15224658 NR Description: unknown protein; protein id: At2g24980.1
  misc_feature (82)..(624): Homolog of NCBI NO: 15224658 NR Description: unknown protein; protein id: At2g24980.1
  misc_feature (114)..(649): Homolog of NCBI NO: 15224658 NR Description: unknown protein; protein id: At2g24980.1
  misc_feature (1)..(516): Homolog of NCBI NO: 15236486 NR Description: extensin-like protein; protein id: At4g08400.1
  misc_feature (63)..(541): Homolog of NCBI NO: 15236486 NR Description: extensin-like protein; protein id: At4g08400.1
  misc_feature (91)..(566): Homolog of NCBI NO: 15236486 NR Description: extensin-like protein; protein id: At4g08400.1
MMRSSRTMGLGHCMVYVVVLSAIAATVTSYPYSSPYSSPQTPHYNSPSHEHKSPKYAPHPKPYVYISPPPPSYYSPSPKVNYKSPPPPNVYNSPPPPYYSPSPKVDYKSPPPPYVYSSPPPPYYSPSPKVDYKSPPPPYVYSSPPPPYYSPSPKVEYKSPPPPYVYNSPPPPYYSPSPKIEYKSPPPPYVYSSPPPPYYSPSPKVDYKSPPPPYVYNSPPPPYYSPSPKVDYKSPPPPYVYSSPPPPYFSPSPKVEYKSPPPPYVYNSPPPPYYSPSPKVEYKSPPPPYVYSSPPPPYYSPSPKVYYKSPPPPYVYSSPPPPYYSPSPKVDYKSPPPPYVYSSPPPPYYSPSPKVDYKSPPPPYVYSSPPPQYYSPSPKVAYKSPPPPYVYSSPPPPYYSPSPKVAYKSPPPPYVYSSPPPPYYSPSPKVDYKSPPPPYVYSSPPPPYYSPSPKVEYKSPPPPYVYSSPPPPYYSPSPKVEYKSPPPPYVYSSPPPPYHSPSPKVNYKSPPPPYVYSSHPPPYYSPSPKVNYKSPPPPYVYSSPPPPYYSPSPKVNYKSPPPPYVYSSPPPPYYSPSPMVDYKSTPPPYVYSFPPLPYYSPSPKVDYKSPPLPYVYSSPPPLYYSPSPKVHYKSPPPPYVYNSPPPPYYSPSPKVTYKSPPPPYVYKAPYY

SEQ ID NO: 73928 - DNA, 1401 bp, Arabidopsis thaliana
  misc_feature (1)..(1401): Ceres Seq. ID no. 4984986
  misc_feature: MA Experiment ID: 20000173 Result: Down-regulated in Transcription
  misc_feature: MA Experiment 20000173 PARAMETER Experiment Name: At_42deg_Heat_P Parameter: Age (day) Value: 14
  misc_feature: MA Experiment 20000173 PARAMETER Experiment Name: At_42deg_Heat_P Parameter: Organism Value: A. thaliana
  misc_feature: MA Experiment 20000173 PARAMETER Experiment Name: At_42deg_Heat_P Parameter: Plant Line Value: WS
  misc_feature: MA Experiment 20000173 PARAMETER Experiment Name: At_42deg_Heat_P Parameter: Temperature (deg C) Value: 42 vs. 22
  misc_feature: MA Experiment 20000173 PARAMETER Experiment Name: At_42deg_Heat_P Parameter: Timepoint (hr) Value: 6
  misc_feature: MA Experiment 20000173 PARAMETER Experiment Name: At_42deg_Heat_P Parameter: Tissue Value: Aerial
  misc_feature: MA Experiment ID: 20000182 Result: Up-regulated in Transcription
  misc_feature: MA Experiment 20000182 PARAMETER Experiment Name: At_2mM_SA_P Parameter: Age (day) Value: 14
  misc_feature: MA Experiment 20000182 PARAMETER Experiment Name: At_2mM_SA_P Parameter: Organism Value: A. thaliana
  misc_feature: MA Experiment 20000182 PARAMETER Experiment Name: At_2mM_SA_P Parameter: Plant Line Value: WS
  misc_feature: MA Experiment 20000182 PARAMETER Experiment Name: At_2mM_SA_P Parameter: Timepoint (hr) Value: 6
  misc_feature: MA Experiment 20000182 PARAMETER Experiment Name: At_2mM_SA_P Parameter: Tissue Value: Aerial
  misc_feature: MA Experiment 20000182 PARAMETER Experiment Name: At_2mM_SA_P Parameter: Treatment Value: 2mM SA vs. No Treatment
  misc_feature: MA Experiment ID: 20000184 Result: Down-regulated in Transcription
  misc_feature: MA Experiment 20000184 PARAMETER Experiment Name: At_Shoots__P Parameter: Age (day) Value: 7
  misc_feature: MA Experiment 20000184 PARAMETER Experiment Name: At_Shoots__P Parameter: Tissue Value: Shoots vs. Whole Plant
  misc_feature: MA Experiment ID: 20000234 Result: Down-regulated in Transcription
  misc_feature: MA Experiment 20000234 PARAMETER Experiment Name: At_Siliques_P Parameter: Age (day) Value: 21
  misc_feature: MA Experiment 20000234 PARAMETER Experiment Name: At_Siliques_P Parameter: Organism Value: A. thaliana
  misc_feature: MA Experiment 20000234 PARAMETER Experiment Name: At_Siliques_P Parameter: Plant Line Value: WS
  misc_feature: MA Experiment 20000234 PARAMETER Experiment Name: At_Siliques_P Parameter: Tissue Value: Less Than 5mm Siliques vs. Whole Plant
  misc_feature: MA Experiment ID: 20000264 Result: Down-regulated in Transcription
  misc_feature: MA Experiment 20000264 PARAMETER Experiment Name: At_Open_Flower_P Parameter: Age (day) Value: 21
  misc_feature: MA Experiment 20000264 PARAMETER Experiment Name: At_Open_Flower_P Parameter: Plant Line Value: WS
  misc_feature: MA Experiment 20000264 PARAMETER Experiment Name: At_Open_Flower_P Parameter: Tissue Value: Open Flower vs. Whole Plant
  misc_feature: MA Experiment ID: 20000265 Result: Down-regulated in Transcription
  misc_feature: MA Experiment 20000265 PARAMETER Experiment Name: At_Open_Flower_P Parameter: Age (day) Value: 21
  misc_feature: MA Experiment 20000265 PARAMETER Experiment Name: At_Open_Flower_P Parameter: Plant Line Value: WS
  misc_feature: MA Experiment 20000265 PARAMETER Experiment Name: At_Open_Flower_P Parameter: Tissue Value: Closed Flower vs. Whole Plant
  misc_feature: MA Experiment ID: 20000286 Result: Down-regulated in Transcription
  misc_feature: MA Experiment 20000286 PARAMETER Experiment Name: At_Open_Flower_P Parameter: Age (day) Value: 21
  misc_feature: MA Experiment 20000286 PARAMETER Experiment Name: At_Open_Flower_P Parameter: Plant Line Value: WS
  misc_feature: MA Experiment 20000286 PARAMETER Experiment Name: At_Open_Flower_P Parameter: Tissue Value: Half Open vs. Whole Plant
  misc_feature: MA Experiment ID: 20000438 Result: Down-regulated in Transcription
  misc_feature: MA Experiment 20000438 PARAMETER Experiment Name: At_Shoots__P Parameter: Age (day) Value: 14
  misc_feature: MA Experiment 20000438 PARAMETER Experiment Name: At_Shoots__P Parameter: Tissue Value: Shoots vs. Whole Plant
  misc_feature: MA Experiment ID: 20000496 Result: Down-regulated in Transcription
  misc_feature: MA Experiment 20000496 PARAMETER Experiment Name: At_Guard_Cells_P Parameter: Harvest Date Value: 7/19/2002
  misc_feature: MA Experiment 20000496 PARAMETER Experiment Name: At_Guard_Cells_P Parameter: Organism Value: Canola
  misc_feature: MA Experiment 20000496 PARAMETER Experiment Name: At_Guard_Cells_P Parameter: Tissue Value: Guard Cells vs. Leaves
  misc_feature: MA Experiment ID: 20000794 Result: Down-regulated in Transcription
  misc_feature: MA Experiment 20000794 PARAMETER Experiment Name: At_Petals_P Parameter: Age (day) Value: 23-25 days
  misc_feature: MA Experiment 20000794 PARAMETER Experiment Name: At_Petals_P Parameter: Plant Line Value: WS
  misc_feature: MA Experiment 20000794 PARAMETER Experiment Name: At_Petals_P Parameter: Tissue Value: Petals vs. Whole plant
atgaggagcaaaaccccaacgcctctccgcttctcaaatggaaagcatcagagagatgattctgagtatagttggactgatgtaggtactggggagaaggccaggaatgtctccgtcctcggtgcgatcagaagggcagctaagaaagtctttgttattattttcttaggacaacggaagttaaagccaacagaatgtagatctgatcctggagagagcagcacgcacgacagagaatctacatcctttcttgaatatcaggagcatgctttgaatctcttaagctctggtgatgtatgccgaccattaagacaaccaaactttgttacaaacctgaggtatcaggctggactggttattcatcaccaagctcctttggaaggtcaacagaaagaaaggtttcagcttcaaagggcaaccgcaaatttttcttcggttcatcaaattggggaaggcggttttggaactgtttttaagggaaaacttgatgatggaactattgttgctatcaagcgtgcgagaaagaacaactatggcaaaagctggttgctagagttcaagaatgaaatatacacattgtcaaagattgagcatatgaatttggtaaagctgtatggatttcttgaacatggagatgaaaaggttattgttgttgaatatgttgccaatggaaacctacgagaacatctagatggtttaaggggtaaccgccttgaaatggcagaacgtcttgagattgcaattgatgtggctcatgcattgacctatttgcacacatatactgatagtccaataatccacagagacattaaagcatcaaatatcctcatcacgaataagcttagagccaaagtggcggactttggctttgctcgtttagtgtcggaagatcttggggctactcatatatcgactcaggtcaaaggatctgcaggctatgtggatccagattacctcaggacgtttcaactaactgacaagagcgacgtttactcttttggtgttttgctcgtagagattctcactggaagacgtcccattgagttaaagagaccacgaaaagacagactcacggttaaatgggcattgaggagactcaaagacgatgaagctgttctcataatggacccatttctcaagagaaaccgagccgccattgaagtggctgagaagatgctgagacttgcgagcgaatgtgttaccccgacgagagctacacgtccagctatgaaaggcattgcggaaaagctatgggctataaggagagagatgaaggagacgatgatatgttcatctgcatctaattcttcttgttcttcaacaacacatagcttcattggtcgtgattcagacagatatgcattgccgaggattgaagataacgagaatagcattgagtaa

SEQ ID NO: 73929 - protein, 466 aa, Arabidopsis thaliana
  peptide (1)..(466): Ceres Seq. ID no. 4984987
  misc_feature (143)..(346): Pfam Name: Protein kinase domain Pfam Description: Protein kinase domain
  misc_feature (1)..(466): Homolog of NCBI NO: 15237782 NR Description: receptor-like protein kinase precursor - like;
  misc_feature (1)..(466): Homolog of NCBI NO: 9759225 NR Description: contains similarity to protein
  misc_feature (139)..(443): Homolog of NCBI NO: 34908354 NR Description: P0529H11.30 [Oryza sativa (japonica
  misc_feature (135)..(435): Homolog of NCBI NO: 27261468 NR Description: Hypothetical protein [Oryza sativa (japonica
  misc_feature (135)..(428): Homolog of NCBI NO: 22328175 NR Description: coded for by A. thaliana cDNA R30513; protein id: supported by cDNA: gi_17381215 [Arabidopsis thaliana]
  misc_feature (135)..(421): Homolog of NCBI NO: 18397027 NR Description: putative protein kinase; protein id: At2g11520.1, by cDNA: gi_13605880, supported by cDNA: gi_20334779 [Arabidopsis >gi|13605881|gb|AAK32926.1|AF367339_1 At2g11520/F14P14.15
  misc_feature (135)..(421): Homolog of NCBI NO: 25287604 NR Description: probable protein kinase [imported] - Arabidopsis
  misc_feature (67)..(427): Homolog of NCBI NO: 38345153 NR Description: OSJNBa0014K14.7 [Oryza sativa (japonica
  misc_feature (125)..(451): Homolog of NCBI NO: 34897358 NR Description: putative receptor kinase [Oryza sativa]
  misc_feature (126)..(464): Homolog of NCBI NO: 34909240 NR Description: putative receptor protein kinase [Oryza sativa
MRSKTPTPLRFSNGKHQRDDSEYSWTDVGTGEKARNVSVLGAIRRAAKKVFVIIFLGQRKLKPTECRSDPGESSTHDRESTSFLEYQEHALNLLSSGDVCRPLRQPNFVTNLRYQAGLVIHHQAPLEGQQKERFQLQRATANFSSVHQIGEGGFGTVFKGKLDDGTIVAIKRARKNNYGKSWLLEFKNEIYTLSKIEHMNLVKLYGFLEHGDEKVIVVEYVANGNLREHLDGLRGNRLEMAERLEIAIDVAHALTYLHTYTDSPIIHRDIKASNILITNKLRAKVADFGFARLVSEDLGATHISTQVKGSAGYVDPDYLRTFQLTDKSDVYSFGVLLVEILTGRRPIELKRPRKDRLTVKWALRRLKDDEAVLIMDPFLKRNRAAIEVAEKMLRLASECVTPTRATRPAMKGIAEKLWAIRREMKETMICSSASNSSCSSTTHSFIGRDSDRYALPRIEDNENSIE

SEQ ID NO: 73930 - protein, 268 aa, Arabidopsis thaliana
  peptide (1)..(268): Ceres Seq. ID no. 4984988
  misc_feature (1)..(148): Pfam Name: Protein kinase domain Pfam Description: Protein kinase domain
  misc_feature (1)..(268): Homolog of NCBI NO: 15237782 NR Description: receptor-like protein kinase precursor - like;
  misc_feature (1)..(268): Homolog of NCBI NO: 9759225 NR Description: contains similarity to protein
  misc_feature (1)..(245): Homolog of NCBI NO: 34908354 NR Description: P0529H11.30 [Oryza sativa (japonica
  misc_feature (1)..(237): Homolog of NCBI NO: 27261468 NR Description: Hypothetical protein [Oryza sativa (japonica
  misc_feature (1)..(230): Homolog of NCBI NO: 22328175 NR Description: coded for by A. thaliana cDNA R30513; protein id: supported by cDNA: gi_17381215 [Arabidopsis thaliana]
  misc_feature (1)..(223): Homolog of NCBI NO: 18397027 NR Description: putative protein kinase; protein id: At2g11520.1, by cDNA: gi_13605880, supported by cDNA: gi_20334779 [Arabidopsis >gi|13605881|gb|AAK32926.1|AF367339_1 At2g11520/F14P14.15
  misc_feature (1)..(223): Homolog of NCBI NO: 25287604 NR Description: probable protein kinase [imported] - Arabidopsis
  misc_feature (1)..(229): Homolog of NCBI NO: 38345153 NR Description: OSJNBa0014K14.7 [Oryza sativa (japonica
  misc_feature (1)..(253): Homolog of NCBI NO: 34897358 NR Description: putative receptor kinase [Oryza sativa]
  misc_feature (1)..(266): Homolog of NCBI NO: 34909240 NR Description: putative receptor protein kinase [Oryza sativa
MNLVKLYGFLEHGDEKVIVVEYVANGNLREHLDGLRGNRLEMAERLEIAIDVAHALTYLHTYTDSPIIHRDIKASNILITNKLRAKVADFGFARLVSEDLGATHISTQVKGSAGYVDPDYLRTFQLTDKSDVYSFGVLLVEILTGRRPIELKRPRKDRLTVKWALRRLKDDEAVLIMDPFLKRNRAAIEVAEKMLRLASECVTPTRATRPAMKGIAEKLWAIRREMKETMICSSASNSSCSSTTHSFIGRDSDRYALPRIEDNENSIE

SEQ ID NO: 73931 - DNA, 1560 bp, Arabidopsis thaliana
  misc_feature (1)..(1560): Ceres Seq. ID no. 4985020
  misc_feature: MA Experiment ID: 20000227 Result: Up-regulated in Transcription
  misc_feature: MA Experiment 20000227 PARAMETER Experiment Name: At_Root-Tips-vs-Tops_P Parameter: Tissue Value: Root Tips vs. Root Tops
  misc_feature: MA Experiment ID: 20000286 Result: Down-regulated in Transcription
  misc_feature: MA Experiment 20000286 PARAMETER Experiment Name: At_Open_Flower_P Parameter: Age (day) Value: 21
  misc_feature: MA Experiment 20000286 PARAMETER Experiment Name: At_Open_Flower_P Parameter: Plant Line Value: WS
  misc_feature: MA Experiment 20000286 PARAMETER Experiment Name: At_Open_Flower_P Parameter: Tissue Value: Half Open vs. Whole Plant
  misc_feature: MA Experiment ID: 20001555 Result: Down-regulated in Transcription
  misc_feature: MA Experiment 20001555 PARAMETER Experiment Name: At_Drought_Soil_Dry_P Parameter: Age (day) Value: 24
  misc_feature: MA Experiment 20001555 PARAMETER Experiment Name: At_Drought_Soil_Dry_P Parameter: Organism Value: A. thaliana
  misc_feature: MA Experiment 20001555 PARAMETER Experiment Name: At_Drought_Soil_Dry_P Parameter: Plant Line Value: WS
  misc_feature: MA Experiment 20001555 PARAMETER Experiment Name: At_Drought_Soil_Dry_P Parameter: Post Timepoint (hr) Value: None
  misc_feature: MA Experiment 20001555 PARAMETER Experiment Name: At_Drought_Soil_Dry_P Parameter: Post-Treatment Value: None
  misc_feature: MA Experiment 20001555 PARAMETER Experiment Name: At_Drought_Soil_Dry_P Parameter: Timepoint (day) Value: 10
  misc_feature: MA Experiment 20001555 PARAMETER Experiment Name: At_Drought_Soil_Dry_P Parameter: Treatment Value: Drought vs. No Drought
  misc_feature: MA Experiment ID: 20001556 Result: Down-regulated in Transcription
  misc_feature: MA Experiment 20001556 PARAMETER Experiment Name: At_Drought_Soil_Dry_P Parameter: Age (day) Value: 26
  misc_feature: MA Experiment 20001556 PARAMETER Experiment Name: At_Drought_Soil_Dry_P Parameter: Organism Value: A. thaliana
  misc_feature: MA Experiment 20001556 PARAMETER Experiment Name: At_Drought_Soil_Dry_P Parameter: Plant Line Value: WS
  misc_feature: MA Experiment 20001556 PARAMETER Experiment Name: At_Drought_Soil_Dry_P Parameter: Post Timepoint (hr) Value: None
  misc_feature: MA Experiment 20001556 PARAMETER Experiment Name: At_Drought_Soil_Dry_P Parameter: Post-Treatment Value: None
  misc_feature: MA Experiment 20001556 PARAMETER Experiment Name: At_Drought_Soil_Dry_P Parameter: Timepoint (day) Value: 12
  misc_feature: MA Experiment 20001556 PARAMETER Experiment Name: At_Drought_Soil_Dry_P Parameter: Treatment Value: Drought vs. No Drought
atggctagagaaaacccattgatgagcttctcctttagtttcagatatctctgtcactttgctctactcctctctctcctctcctttgtctcttttctcttcagacacaacacatcactctgttcttgtctttacgatcacaacacctacgttaacacattcgatcatcagcaaaacaatgaaaccatcgatcttcttcgattctcttctgcttggaaccatctcactttcccttctaaacccaagaagactctcaagatcgctgtggtggtcaagaaatggccgaggaaatcgcaagctggtgggctcgagcgacacgcgcttacattgcatctcgctctagccaatcgtggccacgagcttcatgttttcaccgctgcttctccatcgttccctgaatatcaactgaaaaatctgatgttccatctctctgagccaaccgctgctggatatcttgatcaagcttctgtctcgcaacagcttcagaaacggaatttaactaacgcaattttcctccggaaatcgcagacgcagaacgctagtggaagaccgtttgacgtaattcacacagagagcgttgggcttctccacacaagagccaagaatctccgtaacgtggtcgcgtcttggcatggaatcgcttacgaaacttttcactctgacatcatccaagaactccttcgtcaagcagacatcgccgccgccaccgctgctggaaccgaagaagaacagccaccgccttcatcgccagctctgacggagcgagcgaagcgagtcgtcgaggaagtcaaattcttccaacgttacgctcaccacgtggcaactagcgatcactgcggtgacgtactcaagaggatttacatgattccggaggaacgtgtccatatcattctaaacggcgtcgacgagaacgttttcaaaccggacgtttcaaaacgtgagagctttagagagaaatttggcgttagaagcggcaagaacaagaaatctcctctggttttgggaattgcagggaggttagtgagagataaaggtcatcctttgatgttctcagctttgaagcgagtgtttgaagaaaacaaggaggcacgtgaaaacgttgtcgttttggtagctggagatggtccatggggaaacagatataaagacctcgggtctactaatgtgattgttcttggaccgttggatcaagaaaagctagcgggattctacaacgcgatcgatgtgtttgtgaatccgacccttcgagctcaagggctggatcacactctcttggaagccatggtttcaggaaaaccggtcttagctactaggctagcgagtatcactgggtcagtggttgtcggtccacatttgggatatactttctcaccaaatgttgagtctcttaccgaggcgattttgcgggttgttagcgatggaacagaggaattacagaggaaaggcaaggaagcgcgtgaacggtcgttgaggcttttcacggcgactaaaatggctgattcatatgaaaggttttttctttgcatttcggatcagaggttttgtacgttacaagcttaa

SEQ ID NO: 73932 - protein, 519 aa, Arabidopsis thaliana
  peptide (1)..(519): Ceres Seq. ID no. 4985021
  misc_feature (318)..(488): Pfam Name: Glycosyl transferases group 1 Pfam Description: Glycosyl transferases group 1
  misc_feature (1)..(519): Homolog of NCBI NO: 15237813 NR Description: hexosyltransferase - like protein; protein id:
  misc_feature (1)..(519): Homolog of NCBI NO: 10177634 NR Description: glycosyl transferase-like [Arabidopsis thaliana]
  misc_feature (247)..(515): Homolog of NCBI NO: 15219398 NR Description: putative glycosyl transferase; protein id: [Arabidopsis thaliana] >gi|25406256|pir||E96757 protein glycosyl
  misc_feature (24)..(226): Homolog of NCBI NO: 15219398 NR Description: putative glycosyl transferase; protein id: [Arabidopsis thaliana] >gi|25406256|pir||E96757 protein glycosyl
  misc_feature (247)..(513): Homolog of NCBI NO: 5903105 NR Description: Hypothetical protein [Arabidopsis thaliana]
  misc_feature (24)..(226): Homolog of NCBI NO: 5903105 NR Description: Hypothetical protein [Arabidopsis thaliana]
  misc_feature (237)..(519): Homolog of NCBI NO: 34911892 NR Description: OSJNBb0032K15.23 [Oryza sativa (japonica
  misc_feature (180)..(231): Homolog of NCBI NO: 34911892 NR Description: OSJNBb0032K15.23 [Oryza sativa (japonica
  misc_feature (258)..(515): Homolog of NCBI NO: 21593749 NR Description: unknown [Arabidopsis thaliana]
  misc_feature (258)..(515): Homolog of NCBI NO: 18415319 NR Description: putative protein; protein id: At4g19460.1,
MARENPLMSFSFSFRYLCHFALLLSLLSFVSFLFRHNTSLCSCLYDHNTYVNTFDHQQNNETIDLLRFSSAWNHLTFPSKPKKTLKIAVVVKKWPRKSQAGGLERHALTLHLALANRGHELHVFTAASPSFPEYQLKNLMFHLSEPTAAGYLDQASVSQQLQKRNLTNAIFLRKSQTQNASGRPFDVIHTESVGLLHTRAKNLRNVVASWHGIAYETFHSDIIQELLRQADIAAATAAGTEEEQPPPSSPALTERAKRVVEEVKFFQRYAHHVATSDHCGDVLKRIYMIPEERVHIILNGVDENVFKPDVSKRESFREKFGVRSGKNKKSPLVLGIAGRLVRDKGHPLMFSALKRVFEENKEARENVVVLVAGDGPWGNRYKDLGSTNVIVLGPLDQEKLAGFYNAIDVFVNPTLRAQGLDHTLLEAMVSGKPVLATRLASITGSVVVGPHLGYTFSPNVESLTEAILRVVSDGTEELQRKGKEARERSLRLFTATKMADSYERFFLCISDQRFCTLQA

SEQ ID NO: 73933 - protein, 512 aa, Arabidopsis thaliana
  peptide (1)..(512): Ceres Seq. ID no. 4985022
  misc_feature (311)..(481): Pfam Name: Glycosyl transferases group 1 Pfam Description: Glycosyl transferases group 1
  misc_feature (1)..(512): Homolog of NCBI NO: 15237813 NR Description: hexosyltransferase - like protein; protein id:
  misc_feature (1)..(512): Homolog of NCBI NO: 10177634 NR Description: glycosyl transferase-like [Arabidopsis thaliana]
  misc_feature (240)..(508): Homolog of NCBI NO: 15219398 NR Description: putative glycosyl transferase; protein id: [Arabidopsis thaliana] >gi|25406256|pir||E96757 protein glycosyl
  misc_feature (17)..(219): Homolog of NCBI NO: 15219398 NR Description: putative glycosyl transferase; protein id: [Arabidopsis thaliana] >gi|25406256|pir||E96757 protein glycosyl
  misc_feature (240)..(506): Homolog of NCBI NO: 5903105 NR Description: Hypothetical protein [Arabidopsis thaliana]
  misc_feature (17)..(219): Homolog of NCBI NO: 5903105 NR Description: Hypothetical protein [Arabidopsis thaliana]
  misc_feature (230)..(512): Homolog of NCBI NO: 34911892 NR Description: OSJNBb0032K15.23 [Oryza sativa (japonica
  misc_feature (173)..(224): Homolog of NCBI NO: 34911892 NR Description: OSJNBb0032K15.23 [Oryza sativa (japonica
  misc_feature (251)..(508): Homolog of NCBI NO: 21593749 NR Description: unknown [Arabidopsis thaliana]
  misc_feature (251)..(508): Homolog of NCBI NO: 18415319 NR Description: putative protein; protein id: At4g19460.1,
MSFSFSFRYLCHFALLLSLLSFVSFLFRHNTSLCSCLYDHNTYVNTFDHQQNNETIDLLRFSSAWNHLTFPSKPKKTLKIAVVVKKWPRKSQAGGLERHALTLHLALANRGHELHVFTAASPSFPEYQLKNLMFHLSEPTAAGYLDQASVSQQLQKRNLTNAIFLRKSQTQNASGRPFDVIHTESVGLLHTRAKNLRNVVASWHGIAYETFHSDIIQELLRQADIAAATAAGTEEEQPPPSSPALTERAKRVVEEVKFFQRYAHHVATSDHCGDVLKRIYMIPEERVHIILNGVDENVFKPDVSKRESFREKFGVRSGKNKKSPLVLGIAGRLVRDKGHPLMFSALKRVFEENKEARENVVVLVAGDGPWGNRYKDLGSTNVIVLGPLDQEKLAGFYNAIDVFVNPTLRAQGLDHTLLEAMVSGKPVLATRLASITGSVVVGPHLGYTFSPNVESLTEAILRVVSDGTEELQRKGKEARERSLRLFTATKMADSYERFFLCISDQRFCTLQA

SEQ ID NO: 73934 - protein, 380 aa, Arabidopsis thaliana
  peptide (1)..(380): Ceres Seq. ID no. 4985023
  misc_feature (179)..(349): Pfam Name: Glycosyl transferases group 1 Pfam Description: Glycosyl transferases group 1
  misc_feature (1)..(380): Homolog of NCBI NO: 15237813 NR Description: hexosyltransferase - like protein; protein id:
  misc_feature (1)..(380): Homolog of NCBI NO: 10177634 NR Description: glycosyl transferase-like [Arabidopsis thaliana]
  misc_feature (108)..(376): Homolog of NCBI NO: 15219398 NR Description: putative glycosyl transferase; protein id: [Arabidopsis thaliana] >gi|25406256|pir||E96757 protein glycosyl
  misc_feature (1)..(87): Homolog of NCBI NO: 15219398 NR Description: putative glycosyl transferase; protein id: [Arabidopsis thaliana] >gi|25406256|pir||E96757 protein glycosyl
  misc_feature (108)..(374): Homolog of NCBI NO: 5903105 NR Description: Hypothetical protein [Arabidopsis thaliana]
  misc_feature (1)..(87): Homolog of NCBI NO: 5903105 NR Description: Hypothetical protein [Arabidopsis thaliana]
  misc_feature (98)..(380): Homolog of NCBI NO: 34911892 NR Description: OSJNBb0032K15.23 [Oryza sativa (japonica
  misc_feature (41)..(92): Homolog of NCBI NO: 34911892 NR Description: OSJNBb0032K15.23 [Oryza sativa (japonica
  misc_feature (119)..(376): Homolog of NCBI NO: 21593749 NR Description: unknown [Arabidopsis thaliana]
  misc_feature (119)..(376): Homolog of NCBI NO: 18415319 NR Description: putative protein; protein id: At4g19460.1,
MFHLSEPTAAGYLDQASVSQQLQKRNLTNAIFLRKSQTQNASGRPFDVIHTESVGLLHTRAKNLRNVVASWHGIAYETFHSDIIQELLRQADIAAATAAGTEEEQPPPSSPALTERAKRVVEEVKFFQRYAHHVATSDHCGDVLKRIYMIPEERVHIILNGVDENVFKPDVSKRESFREKFGVRSGKNKKSPLVLGIAGRLVRDKGHPLMFSALKRVFEENKEARENVVVLVAGDGPWGNRYKDLGSTNVIVLGPLDQEKLAGFYNAIDVFVNPTLRAQGLDHTLLEAMVSGKPVLATRLASITGSVVVGPHLGYTFSPNVESLTEAILRVVSDGTEELQRKGKEARERSLRLFTATKMADSYERFFLCISDQRFCTLQA

SEQ ID NO: 73935 - DNA, 765 bp, Arabidopsis thaliana
  misc_feature (1)..(765): Ceres Seq. ID no. 4985415
  misc_feature: MA Experiment ID: 20000185 Result: Down-regulated in Transcription
  misc_feature: MA Experiment 20000185 PARAMETER Experiment Name: At_Roots__P Parameter: Age (day) Value: 7 vs. 21
  misc_feature: MA Experiment 20000185 PARAMETER Experiment Name: At_Roots__P Parameter: Organism Value: A. thaliana
  misc_feature: MA Experiment 20000185 PARAMETER Experiment Name: At_Roots__P Parameter: Tissue Value: Roots vs. Whole Plant
  misc_feature: MA Experiment ID: 20000227 Result: Down-regulated in Transcription
  misc_feature: MA Experiment 20000227 PARAMETER Experiment Name: At_Root-Tips-vs-Tops_P Parameter: Tissue Value: Root Tips vs. Root Tops
  misc_feature: MA Experiment ID: 20000264 Result: Down-regulated in Transcription
  misc_feature: MA Experiment 20000264 PARAMETER Experiment Name: At_Open_Flower_P Parameter: Age (day) Value: 21
  misc_feature: MA Experiment 20000264 PARAMETER Experiment Name: At_Open_Flower_P Parameter: Plant Line Value: WS
  misc_feature: MA Experiment 20000264 PARAMETER Experiment Name: At_Open_Flower_P Parameter: Tissue Value: Open Flower vs. Whole Plant
  misc_feature: MA Experiment ID: 20000269 Result: Down-regulated in Transcription
  misc_feature: MA Experiment 20000269 PARAMETER Experiment Name: At_1mM_KNO3_L-vs-H_Roots_P Parameter: Age (day) Value: 7,10,12
  misc_feature: MA Experiment 20000269 PARAMETER Experiment Name: At_1mM_KNO3_L-vs-H_Roots_P Parameter: Organism Value: A. thaliana
  misc_feature: MA Experiment 20000269 PARAMETER Experiment Name: At_1mM_KNO3_L-vs-H_Roots_P Parameter: Plant Line Value: WS
  misc_feature: MA Experiment 20000269 PARAMETER Experiment Name: At_1mM_KNO3_L-vs-H_Roots_P Parameter: Timepoint (day) Value: 7,10,12
  misc_feature: MA Experiment 20000269 PARAMETER Experiment Name: At_1mM_KNO3_L-vs-H_Roots_P Parameter: Tissue Value: Roots
  misc_feature: MA Experiment 20000269 PARAMETER Experiment Name: At_1mM_KNO3_L-vs-H_Roots_P Parameter: Treatment Value: 1mM KNO3 vs. 50mM KNO3
  misc_feature: MA Experiment ID: 20000439 Result: Down-regulated in Transcription
  misc_feature: MA Experiment 20000439 PARAMETER Experiment Name: At_Roots__P Parameter: Age (day) Value: 14 vs. 21
  misc_feature: MA Experiment 20000439 PARAMETER Experiment Name: At_Roots__P Parameter: Organism Value: A. thaliana
  misc_feature: MA Experiment 20000439 PARAMETER Experiment Name: At_Roots__P Parameter: Tissue Value: Roots vs. Whole Plant
  misc_feature: MA Experiment ID: 20000794 Result: Down-regulated in Transcription
  misc_feature: MA Experiment 20000794 PARAMETER Experiment Name: At_Petals_P Parameter: Age (day) Value: 23-25 days
  misc_feature: MA Experiment 20000794 PARAMETER Experiment Name: At_Petals_P Parameter: Plant Line Value: WS
  misc_feature: MA Experiment 20000794 PARAMETER Experiment Name: At_Petals_P Parameter: Tissue Value: Petals vs. Whole plant
  misc_feature: MA Experiment ID: 20001904 Result: Down-regulated in Transcription
  misc_feature: MA Experiment 20001904 PARAMETER Experiment Name: At_Drought_Reproduction_P Parameter: Age (day) Value: 37
  misc_feature: MA Experiment 20001904 PARAMETER Experiment Name: At_Drought_Reproduction_P Parameter: Organism Value: A. thaliana
  misc_feature: MA Experiment 20001904 PARAMETER Experiment Name: At_Drought_Reproduction_P Parameter: Plant Line Value: WS
  misc_feature: MA Experiment 20001904 PARAMETER Experiment Name: At_Drought_Reproduction_P Parameter: Timepoint (day) Value: 7
  misc_feature: MA Experiment 20001904 PARAMETER Experiment Name: At_Drought_Reproduction_P Parameter: Tissue Value: Rosettes
  misc_feature: MA Experiment 20001904 PARAMETER Experiment Name: At_Drought_Reproduction_P Parameter: Treatment Value: Drought vs. No Drought
  misc_feature: MA Experiment ID: 20001905 Result: Down-regulated in Transcription
  misc_feature: MA Experiment 20001905 PARAMETER Experiment Name: At_Drought_Reproduction_P Parameter: Age (day) Value: 40
  misc_feature: MA Experiment 20001905 PARAMETER Experiment Name: At_Drought_Reproduction_P Parameter: Organism Value: A. thaliana
  misc_feature: MA Experiment 20001905 PARAMETER Experiment Name: At_Drought_Reproduction_P Parameter: Plant Line Value: WS
  misc_feature: MA Experiment 20001905 PARAMETER Experiment Name: At_Drought_Reproduction_P Parameter: Timepoint (day) Value: 10
  misc_feature: MA Experiment 20001905 PARAMETER Experiment Name: At_Drought_Reproduction_P Parameter: Tissue Value: Rosettes
  misc_feature: MA Experiment 20001905 PARAMETER Experiment Name: At_Drought_Reproduction_P Parameter: Treatment Value: Drought vs. No Drought
atggcgttattctctccgccgatctcttcctcacttcagaaccctaatctcatccccaagatctcaacctctcttctctccaccaagcgtttctctctaatctccgtccctagagcttcctccgacaatggtacgacttcccccgtcgtggagattccgaagcctgcttctgtggctgtagaggaagttccagttaaatctccagccgaaagctcctccgcttctgaaaacggcgccgttggaggtgaagcgactgattcgagtactgagacggtaatcaaatatcagaatgcgaagtgggttaatggaacttgggatctgaaacagttcgagaaagatggcaaaactgattgggattctgttatcgtttctgaggcaaagaggagaaaatggcttgaagataacccggaaacaacgagtaacgacgagcttgttgtcttcgatacttcgattattccatggtgggcatggatgaagagataccatctacctgaagctgaacttctcaatggtcgtgctgcgatgatagggttcttcatggcttactttgttgatagtcttaccggagtaggacttgttgatcaaatgggaaatttcttctgcaaaacactcttgtttgtggctgtagctggagttctcttcatccgtaagaatgaagatttagacaaacttaaggatctgttcgatgagactacgttatatgacaaacaatggcaagctgcatggaaagagccagattcatcaacagtttcttcaaagaagtga

SEQ ID NO: 73936 - protein, 254 aa, Arabidopsis thaliana; identical to SEQ ID NO: 71158
  peptide (1)..(254): Ceres Seq. ID no. 4985416
  misc_feature (1)..(254): Homolog of NCBI NO: 8978078 NR Description: Lil3 protein [Arabidopsis thaliana]
  misc_feature (1)..(254): Homolog of NCBI NO: 30695110 NR Description: Lil3 protein [Arabidopsis thaliana]
  misc_feature (1)..(254): Homolog of NCBI NO: 21555799 NR Description: Lil3 protein [Arabidopsis thaliana]
  misc_feature (1)..(254): Homolog of NCBI NO: 7485188 NR Description: hypothetical protein - Arabidopsis thaliana hypothetical protein [Arabidopsis thaliana]
  misc_feature (1)..(254): Homolog of NCBI NO: 18414927 NR Description: Lil3 protein; protein id: At4g17600.1, supported cDNA: 29150., supported by cDNA: gi_14030672, supported by cDNA: supported by cDNA: gi_4741965 [Arabidopsis thaliana] thaliana

SEQ ID NO: 73937 - DNA, 564 bp, Arabidopsis thaliana
  misc_feature (1)..(564): Ceres Seq. ID no. 4985417
  misc_feature: MA Experiment ID: 20000182 Result: Up-regulated in Transcription
  misc_feature: MA Experiment 20000182 PARAMETER Experiment Name: At_2mM_SA_P Parameter: Age (day) Value: 14
  misc_feature: MA Experiment 20000182 PARAMETER Experiment Name: At_2mM_SA_P Parameter: Organism Value: A. thaliana
  misc_feature: MA Experiment 20000182 PARAMETER Experiment Name: At_2mM_SA_P Parameter: Plant Line Value: WS
  misc_feature: MA Experiment 20000182 PARAMETER Experiment Name: At_2mM_SA_P Parameter: Timepoint (hr) Value: 6
  misc_feature: MA Experiment 20000182 PARAMETER Experiment Name: At_2mM_SA_P Parameter: Tissue Value: Aerial
  misc_feature: MA Experiment 20000182 PARAMETER Experiment Name: At_2mM_SA_P Parameter: Treatment Value: 2mM SA vs. No Treatment
  misc_feature: MA Experiment ID: 20001558 Result: Down-regulated in Transcription
  misc_feature: MA Experiment 20001558 PARAMETER Experiment Name: At_Drought_Soil_Dry_P Parameter: Age (day) Value: 27
  misc_feature: MA Experiment 20001558 PARAMETER Experiment Name: At_Drought_Soil_Dry_P Parameter: Organism Value: A. thaliana
  misc_feature: MA Experiment 20001558 PARAMETER Experiment Name: At_Drought_Soil_Dry_P Parameter: Plant Line Value: WS
  misc_feature: MA Experiment 20001558 PARAMETER Experiment Name: At_Drought_Soil_Dry_P Parameter: Post Timepoint (hr) Value: 6
  misc_feature: MA Experiment 20001558 PARAMETER Experiment Name: At_Drought_Soil_Dry_P Parameter: Post-Treatment Value: Re-Water vs. No Drought
  misc_feature: MA Experiment 20001558 PARAMETER Experiment Name: At_Drought_Soil_Dry_P Parameter: Timepoint (day) Value: 13
  misc_feature: MA Experiment 20001558 PARAMETER Experiment Name: At_Drought_Soil_Dry_P Parameter: Treatment Value: Drought vs. No Drought
atgcgcttgaatatcggtggaaccattactaagcttggatgggttttaagtttattggagcatgtggtttcttgtcctccatataaacataaaataaggttttcacttctgcttctctttggtgttcttcatggggcttcagttggtccatgtatcaagtccacaatcgatattgattcaagcatccttatcaccgcgttcttaggaactgcggtgatatttttctgtttctcggcagtggcaatgctggcaagacgcagggagtatatctacctcggaggactgctttcgtctggcttttccttgctaacgtggctcaagaattctgatcagtttgcctctgcgacagttgagattcagatgtaccttggactcctgctcttcgtgggatgtatagtggtgaacacacaggagataatagagaaagcacactgtggtgacatggactacgcggtacattcgctgatcctttacattggctttgtacgtgtgttccttcaaattctcagtataatgtggaatacctctgccgatagaataagaagaaataatgaagaaacttag

SEQ ID NO: 73938 - protein, 187 aa, Arabidopsis thaliana
  peptide (1)..(187): Ceres Seq. ID no. 4985418
  misc_feature (36)..(144): Pfam Name: Uncharacterised protein family UPF0005 Pfam Description: Uncharacterised protein family UPF0005
  misc_feature (1)..(187): Homolog of NCBI NO: 15238018 NR Description: putative protein; protein id: At5g47130.1
  misc_feature (4)..(179): Homolog of NCBI NO: 15238017 NR Description: Bax inhibitor-1 like; protein id: At5g47120.1, by cDNA: 36400., supported by cDNA: gi_11493974, supported by
  misc_feature (4)..(179): Homolog of NCBI NO: 21593125 NR Description: Bax inhibitor-1 like [Arabidopsis thaliana]
  misc_feature (4)..(179): Homolog of NCBI NO: 14719274 NR Description: Bax inhibitor 1 [Brassica napus]
  misc_feature (4)..(179): Homolog of NCBI NO: 17981376 NR Description: bax inhibitor-like protein [Brassica oleracea]
  misc_feature (3)..(179): Homolog of NCBI NO: 12229685 NR Description: Bax inhibitor-1 (BI-1) (OsBI-1)
  misc_feature (4)..(179): Homolog of NCBI NO: 14719276 NR Description: Bax inhibitor 1 [Nicotiana tabacum]
  misc_feature (3)..(179): Homolog of NCBI NO: 13940165 NR Description: BAX inhibitor 1 [Hordeum vulgare subsp. vulgare]
  misc_feature (4)..(169): Homolog of NCBI NO: 15236582 NR Description: Bax inhibitor-1-like protein; protein id:
  misc_feature (33)..(169): Homolog of NCBI NO: 7485137 NR Description: hypothetical protein - Arabidopsis thaliana
MRLNIGGTITKLGWVLSLLEHVVSCPPYKHKIRFSLLLLFGVLHGASVGPCIKSTIDIDSSILITAFLGTAVIFFCFSAVAMLARRREYIYLGGLLSSGFSLLTWLKNSDQFASATVEIQMYLGLLLFVGCIVVNTQEIIEKAHCGDMDYAVHSLILYIGFVRVFLQILSIMWNTSADRIRRNNEET

SEQ ID NO: 73939 - protein, 106 aa, Arabidopsis thaliana
  peptide (1)..(106): Ceres Seq. ID no. 4985419
  misc_feature (1)..(63): Pfam Name: Uncharacterised protein family UPF0005 Pfam Description: Uncharacterised protein family UPF0005
  misc_feature (1)..(106): Homolog of NCBI NO: 15238018 NR Description: putative protein; protein id: At5g47130.1
  misc_feature (1)..(98): Homolog of NCBI NO: 15238017 NR Description: Bax inhibitor-1 like; protein id: At5g47120.1, by cDNA: 36400., supported by cDNA: gi_11493974, supported by
  misc_feature (1)..(98): Homolog of NCBI NO: 21593125 NR Description: Bax inhibitor-1 like [Arabidopsis thaliana]
  misc_feature (1)..(98): Homolog of NCBI NO: 14719274 NR Description: Bax inhibitor 1 [Brassica napus]
  misc_feature (1)..(98): Homolog of NCBI NO: 17981376 NR Description: bax inhibitor-like protein [Brassica oleracea]
  misc_feature (1)..(98): Homolog of NCBI NO: 12229685 NR Description: Bax inhibitor-1 (BI-1) (OsBI-1)
  misc_feature (1)..(98): Homolog of NCBI NO: 14719276 NR Description: Bax inhibitor 1 [Nicotiana tabacum]
  misc_feature (1)..(98): Homolog of NCBI NO: 13940165 NR Description: BAX inhibitor 1 [Hordeum vulgare subsp. vulgare]
  misc_feature (1)..(88): Homolog of NCBI NO: 15236582 NR Description: Bax inhibitor-1-like protein; protein id:
  misc_feature (1)..(88): Homolog of NCBI NO: 7485137 NR Description: hypothetical protein - Arabidopsis thaliana
MLARRREYIYLGGLLSSGFSLLTWLKNSDQFASATVEIQMYLGLLLFVGCIVVNTQEIIEKAHCGDMDYAVHSLILYIGFVRVFLQILSIMWNTSADRIRRNNEET

SEQ ID NO: 73940 - DNA, 1554 bp, Arabidopsis thaliana
  misc_feature (1)..(1554): Ceres Seq. ID no. 4985632
  misc_feature: MA Experiment ID: 20000234 Result: Up-regulated in Transcription
  misc_feature: MA Experiment 20000234 PARAMETER Experiment Name: At_Siliques_P Parameter: Age (day) Value: 21
  misc_feature: MA Experiment 20000234 PARAMETER Experiment Name: At_Siliques_P Parameter: Organism Value: A. thaliana
  misc_feature: MA Experiment 20000234 PARAMETER Experiment Name: At_Siliques_P Parameter: Plant Line Value: WS
  misc_feature: MA Experiment 20000234 PARAMETER Experiment Name: At_Siliques_P Parameter: Tissue Value: Less Than 5mm Siliques vs. Whole Plant
  misc_feature: MA Experiment ID: 20000264 Result: Up-regulated in Transcription
  misc_feature: MA Experiment 20000264 PARAMETER Experiment Name: At_Open_Flower_P Parameter: Age (day) Value: 21
  misc_feature: MA Experiment 20000264 PARAMETER Experiment Name: At_Open_Flower_P Parameter: Plant Line Value: WS
  misc_feature: MA Experiment 20000264 PARAMETER Experiment Name: At_Open_Flower_P Parameter: Tissue Value: Open Flower vs. Whole Plant
  misc_feature: MA Experiment ID: 20000265 Result: Up-regulated in Transcription
  misc_feature: MA Experiment 20000265 PARAMETER Experiment Name: At_Open_Flower_P Parameter: Age (day) Value: 21
  misc_feature: MA Experiment 20000265 PARAMETER Experiment Name: At_Open_Flower_P Parameter: Plant Line Value: WS
  misc_feature: MA Experiment 20000265 PARAMETER Experiment Name: At_Open_Flower_P Parameter: Tissue Value: Closed Flower vs. Whole Plant
  misc_feature: MA Experiment ID: 20000574 Result: Up-regulated in Transcription
  misc_feature: MA Experiment 20000574 PARAMETER Experiment Name: At_100uM_ABA_Mutants__P Parameter: Organism Value: A. thaliana
  misc_feature: MA Experiment 20000574 PARAMETER Experiment Name: At_100uM_ABA_Mutants__P Parameter: Plant Line Value: CS23 vs. Ler wt
  misc_feature: MA Experiment 20000574 PARAMETER Experiment Name: At_100uM_ABA_Mutants__P Parameter: Timepoint (hr) Value: N/A
  misc_feature: MA Experiment 20000574 PARAMETER Experiment Name: At_100uM_ABA_Mutants__P Parameter: Tissue Value: Whole Plant
  misc_feature: MA Experiment 20000574 PARAMETER Experiment Name: At_100uM_ABA_Mutants__P Parameter: Treatment Value: None
  misc_feature: MA Experiment ID: 20000794 Result: Up-regulated in Transcription
  misc_feature: MA Experiment 20000794 PARAMETER Experiment Name: At_Petals_P Parameter: Age (day) Value: 23-25 days
  misc_feature: MA Experiment 20000794 PARAMETER Experiment Name: At_Petals_P Parameter: Plant Line Value: WS
  misc_feature: MA Experiment 20000794 PARAMETER Experiment Name: At_Petals_P Parameter: Tissue Value: Petals vs. Whole plant
atgactgatgcaatgttctcttcttcggccaagccacacttcatcaagcctatgcttccaggcttcgaaacctatattgttattcctaaagctttttactcgaactacttagagggaagacaagagggaaacgctgcagaactgagatcagacgccacggagatcacttggaaaataaagatagacggccgaagaatgaccaaagggtgggaagaatttgcggtggctcacaatcttcaggtcgacgacattcttgttttcagacacgaaggaaatctcttgtttcatgtcacaccttttggactgagtttttgtgagatactttactcacagagagacgagaaagatgtcaaagacacgacgggaaaggttacaagatctagaacggtgaagaaaaacggaaaaaatgagtgttcatcagtggacactgattttgtggtccctgttacagcctcaaaccaacgagttgattcattttatcttccaagaggttttaccacatcaagtggttcgagtaaactgtgcaatgagataattctaatagatgaaaaagacaggccatcgacgctaaaactgcgttacaataaatcaagtaatcggttttgtgttagccgaggttggagagctttctgctgcaggaatggttatagaactggttgtttcttgagaatcatattggtccgaaaaggaaaaacacccgtgctccggatttttcctttggagagggatgaggacaacattgagcatgaggagtctgtgaaagaagagacgaatgtggaatcaggaaagcttaaaagagatagattactgcagaaagatcccaaaaatttgtgttctacatcacaagacactaattttgtggtccctgtcacagcttcaaaccaacgacatgattcatttcatcttccaaaaggtttaaccacctcaagtggtctgagtaaactgtgcaagaagattatttttatggatcaaaaaggtaggtcatcgatactagacttgagctacagtatatcagatgatcggtttactgtcaggcgaggctggaaagctttctgctgcaggaatgagcataaaactggttgtttcttgaggctcatattggtccaaaatggaaaaacacccgaatgcaatgtttatgagggaaccttttctattccagcgaagaactctaagaagattaagcaagaagtagaatatgagtctgcgaaagaagagaagaacctggaatcattgtctttgtcagataattctagctttgtggtatctgtcacagtttctaatctaagtgaagatatactgcatcttccaataaggctttcaagatcaaacttactggacaaaaaaattcacgagatagttttgatgaacaaagagggaagaacatggatattaagtttaaaatacagcaagtactccggtaggtttagaatcacacgcggctggaaaagtttctgcgaggcgaacggtcaaaaacctggatgtaccttcttactcaagctgcatctttcgatgactcggtttgaccaagacggagtagcatgggacaagaagtga

SEQ ID NO: 73941 - protein, 517 aa, Arabidopsis thaliana
  peptide (1)..(517): Ceres Seq. ID no. 4985633
  misc_feature (13)..(105): Pfam Name: B3 DNA binding domain Pfam Description: B3 DNA binding domain
  misc_feature (1)..(517): Homolog of NCBI NO: 15242700 NR Description: meristem protein - like; protein id: At5g32460.1
  misc_feature (5)..(397): Homolog of NCBI NO: 15224180 NR Description: hypothetical protein; protein id: At2g24650.1
  misc_feature (406)..(500): Homolog of NCBI NO: 15224180 NR Description: hypothetical protein; protein id: At2g24650.1
  misc_feature (246)..(500): Homolog of NCBI NO: 15224604 NR Description: hypothetical protein; protein id: At2g24700.1
  misc_feature (1)..(111): Homolog of NCBI NO: 15224604 NR Description: hypothetical protein; protein id: At2g24700.1
  misc_feature (91)..(374): Homolog of NCBI NO: 15224604 NR Description: hypothetical protein; protein id: At2g24700.1
  misc_feature (411)..(500): Homolog of NCBI NO: 15224180 NR Description: hypothetical protein; protein id: At2g24650.1
  misc_feature (7)..(406): Homolog of NCBI NO: 7486326 NR Description: hypothetical protein F28M20.190 - Arabidopsis >gi|3281865|emb|CAA19761.1| putative protein [Arabidopsis >gi|7270065|emb|CAB79880.1| putative protein [Arabidopsis
  misc_feature (402)..(500): Homolog of NCBI NO: 7486326 NR Description: hypothetical protein F28M20.190 - Arabidopsis >gi|3281865|emb|CAA19761.1| putative protein [Arabidopsis >gi|7270065|emb|CAB79880.1| putative protein [Arabidopsis
  misc_feature (1)..(500): Homolog of NCBI NO: 27754629 NR Description: unknown protein [Arabidopsis thaliana]
MTDAMFSSSAKPHFIKPMLPGFETYIVIPKAFYSNYLEGRQEGNAAELRSDATEITWKIKIDGRRMTKGWEEFAVAHNLQVDDILVFRHEGNLLFHVTPFGLSFCEILYSQRDEKDVKDTTGKVTRSRTVKKNGKNECSSVDTDFVVPVTASNQRVDSFYLPRGFTTSSGSSKLCNEIILIDEKDRPSTLKLRYNKSSNRFCVSRGWRAFCCRNGYRTGCFLRIILVRKGKTPVLRIFPLERDEDNIEHEESVKEETNVESGKLKRDRLLQKDPKNLCSTSQDTNFVVPVTASNQRHDSFHLPKGLTTSSGLSKLCKKIIFMDQKGRSSILDLSYSISDDRFTVRRGWKAFCCRNEHKTGCFLRLILVQNGKTPECNVYEGTFSIPAKNSKKIKQEVEYESAKEEKNLESLSLSDNSSFVVSVTVSNLSEDILHLPIRLSRSNLLDKKIHEIVLMNKEGRTWILSLKYSKYSGRFRITRGWKSFCEANGQKPGCTFLLKLHLSMTRFDQDGVAWDKK

SEQ ID NO: 73942 - protein, 513 aa, Arabidopsis thaliana
  peptide (1)..(513): Ceres Seq. ID no. 4985634
  misc_feature (9)..(101): Pfam Name: B3 DNA binding domain Pfam Description: B3 DNA binding domain
  misc_feature (1)..(513): Homolog of NCBI NO: 15242700 NR Description: meristem protein - like; protein id: At5g32460.1
  misc_feature (1)..(393): Homolog of NCBI NO: 15224180 NR Description: hypothetical protein; protein id: At2g24650.1
  misc_feature (402)..(496): Homolog of NCBI NO: 15224180 NR Description: hypothetical protein; protein id: At2g24650.1
  misc_feature (242)..(496): Homolog of NCBI NO: 15224604 NR Description: hypothetical protein; protein id: At2g24700.1
  misc_feature (1)..(107): Homolog of NCBI NO: 15224604 NR Description: hypothetical protein; protein id: At2g24700.1
  misc_feature (87)..(370): Homolog of NCBI NO: 15224604 NR Description: hypothetical protein; protein id: At2g24700.1
  misc_feature (407)..(496): Homolog of NCBI NO: 15224180 NR Description: hypothetical protein; protein id: At2g24650.1
  misc_feature (3)..(402): Homolog of NCBI NO: 7486326 NR Description: hypothetical protein F28M20.190 - Arabidopsis >gi|3281865|emb|CAA19761.1| putative protein [Arabidopsis >gi|7270065|emb|CAB79880.1| putative protein [Arabidopsis
  misc_feature (398)..(496): Homolog of NCBI NO: 7486326 NR Description: hypothetical protein F28M20.190 - Arabidopsis >gi|3281865|emb|CAA19761.1| putative protein [Arabidopsis >gi|7270065|emb|CAB79880.1| putative protein [Arabidopsis
  misc_feature (1)..(496): Homolog of NCBI NO: 27754629 NR Description: unknown protein [Arabidopsis thaliana]
MFSSSAKPHFIKPMLPGFETYIVIPKAFYSNYLEGRQEGNAAELRSDATEITWKIKIDGRRMTKGWEEFAVAHNLQVDDILVFRHEGNLLFHVTPFGLSFCEILYSQRDEKDVKDTTGKVTRSRTVKKNGKNECSSVDTDFVVPVTASNQRVDSFYLPRGFTTSSGSSKLCNEIILIDEKDRPSTLKLRYNKSSNRFCVSRGWRAFCCRNGYRTGCFLRIILVRKGKTPVLRIFPLERDEDNIEHEESVKEETNVESGKLKRDRLLQKDPKNLCSTSQDTNFVVPVTASNQRHDSFHLPKGLTTSSGLSKLCKKIIFMDQKGRSSILDLSYSISDDRFTVRRGWKAFCCRNEHKTGCFLRLILVQNGKTPECNVYEGTFSIPAKNSKKIKQEVEYESAKEEKNLESLSLSDNSSFVVSVTVSNLSEDILHLPIRLSRSNLLDKKIHEIVLMNKEGRTWILSLKYSKYSGRFRITRGWKSFCEANGQKPGCTFLLKLHLSMTRFDQDGVAWDKK

SEQ ID NO: 73943 - protein, 500 aa, Arabidopsis thaliana
  peptide (1)..(500): Ceres Seq. ID no. 4985635
  misc_feature (1)..(88): Pfam Name: B3 DNA binding domain Pfam Description: B3 DNA binding domain
  misc_feature (1)..(500): Homolog of NCBI NO: 15242700 NR Description: meristem protein - like; protein id: At5g32460.1
  misc_feature (1)..(380): Homolog of NCBI NO: 15224180 NR Description: hypothetical protein; protein id: At2g24650.1
  misc_feature (389)..(483): Homolog of NCBI NO: 15224180 NR Description: hypothetical protein; protein id: At2g24650.1
  misc_feature (229)..(483): Homolog of NCBI NO: 15224604 NR Description: hypothetical protein; protein id: At2g24700.1
  misc_feature (1)..(94): Homolog of NCBI NO: 15224604 NR Description: hypothetical protein; protein id: At2g24700.1
  misc_feature (74)..(357): Homolog of NCBI NO: 15224604 NR Description: hypothetical protein; protein id: At2g24700.1
  misc_feature (394)..(483): Homolog of NCBI NO: 15224180 NR Description: hypothetical protein; protein id: At2g24650.1
  misc_feature (1)..(389): Homolog of NCBI NO: 7486326 NR Description: hypothetical protein F28M20.190 - Arabidopsis >gi|3281865|emb|CAA19761.1| putative protein [Arabidopsis >gi|7270065|emb|CAB79880.1| putative protein [Arabidopsis
  misc_feature (385)..(483): Homolog of NCBI NO: 7486326 NR Description: hypothetical protein F28M20.190 - Arabidopsis >gi|3281865|emb|CAA19761.1| putative protein [Arabidopsis >gi|7270065|emb|CAB79880.1| putative protein [Arabidopsis
  misc_feature (1)..(483): Homolog of NCBI NO: 27754629 NR Description: unknown protein [Arabidopsis thaliana]
MLPGFETYIVIPKAFYSNYLEGRQEGNAAELRSDATEITWKIKIDGRRMTKGWEEFAVAHNLQVDDILVFRHEGNLLFHVTPFGLSFCEILYSQRDEKDVKDTTGKVTRSRTVKKNGKNECSSVDTDFVVPVTASNQRVDSFYLPRGFTTSSGSSKLCNEIILIDEKDRPSTLKLRYNKSSNRFCVSRGWRAFCCRNGYRTGCFLRIILVRKGKTPVLRIFPLERDEDNIEHEESVKEETNVESGKLKRDRLLQKDPKNLCSTSQDTNFVVPVTASNQRHDSFHLPKGLTTSSGLSKLCKKIIFMDQKGRSSILDLSYSISDDRFTVRRGWKAFCCRNEHKTGCFLRLILVQNGKTPECNVYEGTFSIPAKNSKKIKQEVEYESAKEEKNLESLSLSDNSSFVVSVTVSNLSEDILHLPIRLSRSNLLDKKIHEIVLMNKEGRTWILSLKYSKYSGRFRITRGWKSFCEANGQKPGCTFLLKLHLSMTRFDQDGVAWDKK

SEQ ID NO: 73944 - DNA, 1066 bp, Arabidopsis thaliana
  misc_feature (1)..(1066): Ceres Seq. ID no. 4985686
  misc_feature: MA Experiment ID: 108434 Result: Down-regulated in Transcription
  misc_feature: MA Experiment 108434 PARAMETER Experiment Name: At_Root_Tips_cDNA_P Parameter: Tissue Value: Root Tips
  misc_feature: MA Experiment ID: 108574 Result: Down-regulated in Transcription
  misc_feature: MA Experiment 108574 PARAMETER Experiment Name: At_Wounding__cDNA_P Parameter: Timepoint (hr) Value: 1
  misc_feature: MA Experiment 108574 PARAMETER Experiment Name: At_Wounding__cDNA_P Parameter: Tissue Value: Aerial
  misc_feature: MA Experiment 108574 PARAMETER Experiment Name: At_Wounding__cDNA_P Parameter: Treatment Value: Wounding vs. No Wounding
  misc_feature: MA Experiment ID: 108579 Result: Down-regulated in Transcription
  misc_feature: MA Experiment 108579 PARAMETER Experiment Name: At_4deg_Cold_cDNA_P Parameter: Temperature (deg C) Value: 4 vs. 22
  misc_feature: MA Experiment 108579 PARAMETER Experiment Name: At_4deg_Cold_cDNA_P Parameter: Timepoint (hr) Value: 6
  misc_feature: MA Experiment 108579 PARAMETER Experiment Name: At_4deg_Cold_cDNA_P Parameter: Tissue Value: Aerial
  misc_feature: MA Experiment ID: 108585 Result: Up-regulated in Transcription
  misc_feature: MA Experiment 108585 PARAMETER Experiment Name: At_5mM_NaNP_cDNA_P Parameter: Timepoint (hr) Value: 6
  misc_feature: MA Experiment 108585 PARAMETER Experiment Name: At_5mM_NaNP_cDNA_P Parameter: Tissue Value: Aerial
  misc_feature: MA Experiment 108585 PARAMETER Experiment Name: At_5mM_NaNP_cDNA_P Parameter: Treatment Value: null
  misc_feature: MA Experiment ID: 108595 Result: Down-regulated in Transcription
  misc_feature: MA Experiment 108595 PARAMETER Experiment Name: At_Ler-pi_Ovule_cDNA_P Parameter: Plant Line Value: null
  misc_feature: MA Experiment ID: 20000072 Result: Down-regulated in Transcription
  misc_feature: MA Experiment 20000072 PARAMETER Experiment Name: At_100uM_ABA_Mutants_cDNA_P Parameter: Plant Line Value: CS8105
  misc_feature: MA Experiment 20000072 PARAMETER Experiment Name: At_100uM_ABA_Mutants_cDNA_P Parameter: Timepoint (hr) Value: 6
  misc_feature: MA Experiment 20000072 PARAMETER Experiment Name: At_100uM_ABA_Mutants_cDNA_P Parameter: Tissue Value: Aerial
  misc_feature: MA Experiment 20000072 PARAMETER Experiment Name: At_100uM_ABA_Mutants_cDNA_P Parameter: Treatment Value: 100uM ABA vs. No Treatment
  misc_feature: MA Experiment ID: 20000111 Result: Down-regulated in Transcription
  misc_feature: MA Experiment 20000111 PARAMETER Experiment Name: At_42deg_Heat_cDNA_P Parameter: Temperature (deg C) Value: 42 vs. 22
  misc_feature: MA Experiment 20000111 PARAMETER Experiment Name: At_42deg_Heat_cDNA_P Parameter: Timepoint (hr) Value: 6
  misc_feature: MA Experiment 20000111 PARAMETER Experiment Name: At_42deg_Heat_cDNA_P Parameter: Tissue Value: Aerial
  misc_feature: MA Experiment ID: 20000171 Result: Down-regulated in Transcription
  misc_feature: MA Experiment 20000171 PARAMETER Experiment Name: At_42deg_Heat_P Parameter: Age (day) Value: 14
  misc_feature: MA Experiment 20000171 PARAMETER Experiment Name: At_42deg_Heat_P Parameter: Organism Value: A. thaliana
  misc_feature: MA Experiment 20000171 PARAMETER Experiment Name: At_42deg_Heat_P Parameter: Plant Line Value: WS
  misc_feature: MA Experiment 20000171 PARAMETER Experiment Name: At_42deg_Heat_P Parameter: Temperature (deg C) Value: 42 vs. 22
  misc_feature: MA Experiment 20000171 PARAMETER Experiment Name: At_42deg_Heat_P Parameter: Timepoint (hr) Value: 1
  misc_feature: MA Experiment 20000171 PARAMETER Experiment Name: At_42deg_Heat_P Parameter: Tissue Value: Aerial
  misc_feature: MA Experiment ID: 20000173 Result: Down-regulated in Transcription
  misc_feature: MA Experiment 20000173 PARAMETER Experiment Name: At_42deg_Heat_P Parameter: Age (day) Value: 14
  misc_feature: MA Experiment 20000173 PARAMETER Experiment Name: At_42deg_Heat_P Parameter: Organism Value: A. thaliana
  misc_feature: MA Experiment 20000173 PARAMETER Experiment Name: At_42deg_Heat_P Parameter: Plant Line Value: WS
  misc_feature: MA Experiment 20000173 PARAMETER Experiment Name: At_42deg_Heat_P Parameter: Temperature (deg C) Value: 42 vs. 22
  misc_feature: MA Experiment 20000173 PARAMETER Experiment Name: At_42deg_Heat_P Parameter: Timepoint (hr) Value: 6
  misc_feature: MA Experiment 20000173 PARAMETER Experiment Name: At_42deg_Heat_P Parameter: Tissue Value: Aerial
  misc_feature: MA Experiment ID: 20000213 Result: Down-regulated in Transcription
  misc_feature: MA Experiment 20000213 PARAMETER Experiment Name: At_4deg_Cold_P Parameter: Timepoint (hr) Value: 2
  misc_feature: MA Experiment ID: 20000234 Result: Down-regulated in Transcription
  misc_feature: MA Experiment 20000234 PARAMETER Experiment Name: At_Siliques_P Parameter: Age (day) Value: 21
  misc_feature: MA Experiment 20000234 PARAMETER Experiment Name: At_Siliques_P Parameter: Organism Value: A. thaliana
  misc_feature: MA Experiment 20000234 PARAMETER Experiment Name: At_Siliques_P Parameter: Plant Line Value: WS
  misc_feature: MA Experiment 20000234 PARAMETER Experiment Name: At_Siliques_P Parameter: Tissue Value: Less Than 5mm Siliques vs. Whole Plant
  misc_feature: MA Experiment ID: 20000235 Result: Down-regulated in Transcription
  misc_feature: MA Experiment 20000235 PARAMETER Experiment Name: At_Siliques_P Parameter: Age (day) Value: 21
  misc_feature: MA Experiment 20000235 PARAMETER Experiment Name: At_Siliques_P Parameter: Organism Value: A. thaliana
  misc_feature: MA Experiment 20000235 PARAMETER Experiment Name: At_Siliques_P Parameter: Plant Line Value: WS
  misc_feature: MA Experiment 20000235 PARAMETER Experiment Name: At_Siliques_P Parameter: Tissue Value: 5-10mm Siliques vs. Whole Plant
  misc_feature: MA Experiment ID: 20000264 Result: Down-regulated in Transcription
  misc_feature: MA Experiment 20000264 PARAMETER Experiment Name: At_Open_Flower_P Parameter: Age (day) Value: 21
  misc_feature: MA Experiment 20000264 PARAMETER Experiment Name: At_Open_Flower_P Parameter: Plant Line Value: WS
  misc_feature: MA Experiment 20000264 PARAMETER Experiment Name: At_Open_Flower_P Parameter: Tissue Value: Open Flower vs. Whole Plant
  misc_feature: MA Experiment ID: 20000265 Result: Down-regulated in Transcription
  misc_feature: MA Experiment 20000265 PARAMETER Experiment Name: At_Open_Flower_P Parameter: Age (day) Value: 21
  misc_feature: MA Experiment 20000265 PARAMETER Experiment Name: At_Open_Flower_P Parameter: Plant Line Value: WS
  misc_feature: MA Experiment 20000265 PARAMETER Experiment Name: At_Open_Flower_P Parameter: Tissue Value: Closed Flower vs. Whole Plant
  misc_feature: MA Experiment ID: 20000286 Result: Down-regulated in Transcription
  misc_feature: MA Experiment 20000286 PARAMETER Experiment Name: At_Open_Flower_P Parameter: Age (day) Value: 21
  misc_feature: MA Experiment 20000286 PARAMETER Experiment Name: At_Open_Flower_P Parameter: Plant Line Value: WS
  misc_feature: MA Experiment 20000286 PARAMETER Experiment Name: At_Open_Flower_P Parameter: Tissue Value: Half Open vs. Whole Plant
  misc_feature: MA Experiment ID: 20000327 Result: Down-regulated in Transcription
  misc_feature: MA Experiment 20000327 PARAMETER Experiment Name: At_42deg_Heat_Sub_P Parameter: Age (day) Value: 14
  misc_feature: MA Experiment 20000327 PARAMETER Experiment Name: At_42deg_Heat_Sub_P Parameter: Organism Value: A. thaliana
  misc_feature: MA Experiment 20000327 PARAMETER Experiment Name: At_42deg_Heat_Sub_P Parameter: Plant Line Value: WS
  misc_feature: MA Experiment 20000327 PARAMETER Experiment Name: At_42deg_Heat_Sub_P Parameter: Temperature (deg C) Value: 42 vs. 22
  misc_feature: MA Experiment 20000327 PARAMETER Experiment Name: At_42deg_Heat_Sub_P Parameter: Timepoint (hr) Value: 1
  misc_feature: MA Experiment 20000327 PARAMETER Experiment Name: At_42deg_Heat_Sub_P Parameter: Tissue Value: Aerial
  misc_feature: MA Experiment ID: 20000328 Result: Down-regulated in Transcription
  misc_feature: MA Experiment 20000328 PARAMETER Experiment Name: At_42deg_Heat_Sub_P Parameter: Age (day) Value: 14
  misc_feature: MA Experiment 20000328 PARAMETER Experiment Name: At_42deg_Heat_Sub_P Parameter: Organism Value: A. thaliana
  misc_feature: MA Experiment 20000328 PARAMETER Experiment Name: At_42deg_Heat_Sub_P Parameter: Plant Line Value: WS
  misc_feature: MA Experiment 20000328 PARAMETER Experiment Name: At_42deg_Heat_Sub_P Parameter: Temperature (deg C) Value: 42 vs. 22
  misc_feature: MA Experiment 20000328 PARAMETER Experiment Name: At_42deg_Heat_Sub_P Parameter: Timepoint (hr) Value: 6
  misc_feature: MA Experiment 20000328 PARAMETER Experiment Name: At_42deg_Heat_Sub_P Parameter: Tissue Value: Aerial
  misc_feature: MA Experiment ID: 20000332 Result: Down-regulated in Transcription
  misc_feature: MA Experiment 20000332 PARAMETER Experiment Name: At_4deg_Cold_Sub_P Parameter: Age (day) Value: 14
  misc_feature: MA Experiment 20000332 PARAMETER Experiment Name: At_4deg_Cold_Sub_P Parameter: Organism Value: A. thaliana
  misc_feature: MA Experiment 20000332 PARAMETER Experiment Name: At_4deg_Cold_Sub_P Parameter: Plant Line Value: WS
  misc_feature: MA Experiment 20000332 PARAMETER Experiment Name: At_4deg_Cold_Sub_P Parameter: Temperature (deg C) Value: 4 vs. 22
  misc_feature: MA Experiment 20000332 PARAMETER Experiment Name: At_4deg_Cold_Sub_P Parameter: Timepoint (hr) Value: 2
  misc_feature: MA Experiment 20000332 PARAMETER Experiment Name: At_4deg_Cold_Sub_P Parameter: Tissue Value: Aerial
  misc_feature: MA Experiment ID: 20000355 Result: Down-regulated in Transcription
  misc_feature: MA Experiment 20000355 PARAMETER Experiment Name: At_Siliques_Sub_P Parameter: Age (day) Value: 21
  misc_feature: MA Experiment 20000355 PARAMETER Experiment Name: At_Siliques_Sub_P Parameter: Organism Value: A. thaliana
  misc_feature: MA Experiment 20000355 PARAMETER Experiment Name: At_Siliques_Sub_P Parameter: Plant Line Value: WS
  misc_feature: MA Experiment 20000355 PARAMETER Experiment Name: At_Siliques_Sub_P Parameter: Tissue Value: Less Than 5mm Siliques vs. Whole Plant
  misc_feature: MA Experiment ID: 20000440 Result: Down-regulated in Transcription
  misc_feature: MA Experiment 20000440 PARAMETER Experiment Name: At_Closed-Flower__Sub_P Parameter: Tissue Value: Closed Flower vs. Whole Plant
  misc_feature: MA Experiment ID: 20000794 Result: Down-regulated in Transcription
  misc_feature: MA Experiment 20000794 PARAMETER Experiment Name: At_Petals_P Parameter: Age (day) Value: 23-25 days
  misc_feature: MA Experiment 20000794 PARAMETER Experiment Name: At_Petals_P Parameter: Plant Line Value: WS
  misc_feature: MA Experiment 20000794 PARAMETER Experiment Name: At_Petals_P Parameter: Tissue Value: Petals vs. Whole plant
  misc_feature: MA Experiment ID: 20001450 Result: Up-regulated in Transcription
  misc_feature: MA Experiment 20001450 PARAMETER Experiment Name: At_Far-red-induction_P Parameter: Age (day) Value: 7
  misc_feature: MA Experiment 20001450 PARAMETER Experiment Name: At_Far-red-induction_P Parameter: Light Value: Far-red vs. White
  misc_feature: MA Experiment 20001450 PARAMETER Experiment Name: At_Far-red-induction_P Parameter: Organism Value: A. thaliana
  misc_feature: MA Experiment 20001450 PARAMETER Experiment Name: At_Far-red-induction_P Parameter: Plant Line Value: Columbia
  misc_feature: MA Experiment 20001450 PARAMETER Experiment Name: At_Far-red-induction_P Parameter: Timepoint (hr) Value: 8
  misc_feature: MA Experiment 20001450 PARAMETER Experiment Name: At_Far-red-induction_P Parameter: Tissue Value: Whole Plant
  misc_feature: MA Experiment ID: 20001451 Result: Up-regulated in Transcription
  misc_feature: MA Experiment 20001451 PARAMETER Experiment Name: At_Far-red-induction_P Parameter: Age (day) Value: 7
  misc_feature: MA Experiment 20001451 PARAMETER Experiment Name: At_Far-red-induction_P Parameter: Light Value: Far-red vs. White
  misc_feature: MA Experiment 20001451 PARAMETER Experiment Name: At_Far-red-induction_P Parameter: Organism Value: A. thaliana
  misc_feature: MA Experiment 20001451 PARAMETER Experiment Name: At_Far-red-induction_P Parameter: Plant Line Value: Columbia
  misc_feature: MA Experiment 20001451 PARAMETER Experiment Name: At_Far-red-induction_P Parameter: Timepoint (hr) Value: 24
  misc_feature: MA Experiment 20001451 PARAMETER Experiment Name: At_Far-red-induction_P Parameter: Tissue Value: Whole Plant
  misc_feature: MA Experiment ID: 20001555 Result: Down-regulated in Transcription
  misc_feature: MA Experiment 20001555 PARAMETER Experiment Name: At_Drought_Soil_Dry_P Parameter: Age (day) Value: 24
  misc_feature: MA Experiment 20001555 PARAMETER Experiment Name: At_Drought_Soil_Dry_P Parameter: Organism Value: A. thaliana
  misc_feature: MA Experiment 20001555 PARAMETER Experiment Name: At_Drought_Soil_Dry_P Parameter: Plant Line Value: WS
  misc_feature: MA Experiment 20001555 PARAMETER Experiment Name: At_Drought_Soil_Dry_P Parameter: Post Timepoint (hr) Value: None
  misc_feature: MA Experiment 20001555 PARAMETER Experiment Name: At_Drought_Soil_Dry_P Parameter: Post-Treatment Value: None
  misc_feature: MA Experiment 20001555 PARAMETER Experiment Name: At_Drought_Soil_Dry_P Parameter: Timepoint (day) Value: 10
  misc_feature: MA Experiment 20001555 PARAMETER Experiment Name: At_Drought_Soil_Dry_P Parameter: Treatment Value: Drought vs. No Drought
  misc_feature: MA Experiment ID: 20001556 Result: Down-regulated in Transcription
  misc_feature: MA Experiment 20001556 PARAMETER Experiment Name: At_Drought_Soil_Dry_P Parameter: Age (day) Value: 26
  misc_feature: MA Experiment 20001556 PARAMETER Experiment Name: At_Drought_Soil_Dry_P Parameter: Organism Value: A. thaliana
  misc_feature: MA Experiment 20001556 PARAMETER Experiment Name: At_Drought_Soil_Dry_P Parameter: Plant Line Value: WS
  misc_feature: MA Experiment 20001556 PARAMETER Experiment Name: At_Drought_Soil_Dry_P Parameter: Post Timepoint (hr) Value: None
  misc_feature: MA Experiment 20001556 PARAMETER Experiment Name: At_Drought_Soil_Dry_P Parameter: Post-Treatment Value: None
  misc_feature: MA Experiment 20001556 PARAMETER Experiment Name: At_Drought_Soil_Dry_P Parameter: Timepoint (day) Value: 12
  misc_feature: MA Experiment 20001556 PARAMETER Experiment Name: At_Drought_Soil_Dry_P Parameter: Treatment Value: Drought vs. No Drought
  misc_feature: MA Experiment ID: 20001557 Result: Down-regulated in Transcription
  misc_feature: MA Experiment 20001557 PARAMETER Experiment Name: At_Drought_Soil_Dry_P Parameter: Age (day) Value: 27
  misc_feature: MA Experiment 20001557 PARAMETER Experiment Name: At_Drought_Soil_Dry_P Parameter: Organism Value: A. thaliana
  misc_feature: MA Experiment 20001557 PARAMETER Experiment Name: At_Drought_Soil_Dry_P Parameter: Plant Line Value: WS
  misc_feature: MA Experiment 20001557 PARAMETER Experiment Name: At_Drought_Soil_Dry_P Parameter: Post Timepoint (hr) Value: 3
  misc_feature: MA Experiment 20001557 PARAMETER Experiment Name: At_Drought_Soil_Dry_P Parameter: Post-Treatment Value: Re-Water vs. No Drought
  misc_feature: MA Experiment 20001557 PARAMETER Experiment Name: At_Drought_Soil_Dry_P Parameter: Timepoint (day) Value: 13
  misc_feature: MA Experiment 20001557 PARAMETER Experiment Name: At_Drought_Soil_Dry_P Parameter: Treatment Value: Drought vs. No Drought
  misc_feature: MA Experiment ID: 20001558 Result: Down-regulated in Transcription
  misc_feature: MA Experiment 20001558 PARAMETER Experiment Name: At_Drought_Soil_Dry_P Parameter: Age (day) Value: 27
  misc_feature: MA Experiment 20001558 PARAMETER Experiment Name: At_Drought_Soil_Dry_P Parameter: Organism Value: A. thaliana
  misc_feature: MA Experiment 20001558 PARAMETER Experiment Name: At_Drought_Soil_Dry_P Parameter: Plant Line Value: WS
  misc_feature: MA Experiment 20001558 PARAMETER Experiment Name: At_Drought_Soil_Dry_P Parameter: Post Timepoint (hr) Value: 6
  misc_feature: MA Experiment 20001558 PARAMETER Experiment Name: At_Drought_Soil_Dry_P Parameter: Post-Treatment Value: Re-Water vs. No Drought
  misc_feature: MA Experiment 20001558 PARAMETER Experiment Name: At_Drought_Soil_Dry_P Parameter: Timepoint (day) Value: 13
  misc_feature: MA Experiment 20001558 PARAMETER Experiment Name: At_Drought_Soil_Dry_P Parameter: Treatment Value: Drought vs. No Drought
  misc_feature: MA Experiment ID: 20001559 Result: Down-regulated in Transcription
  misc_feature: MA Experiment 20001559 PARAMETER Experiment Name: At_Drought_Soil_Dry_P Parameter: Age (day) Value: 28
  misc_feature: MA Experiment 20001559 PARAMETER Experiment Name: At_Drought_Soil_Dry_P Parameter: Organism Value: A. thaliana
  misc_feature: MA Experiment 20001559 PARAMETER Experiment Name: At_Drought_Soil_Dry_P Parameter: Plant Line Value: WS
  misc_feature: MA Experiment 20001559 PARAMETER Experiment Name: At_Drought_Soil_Dry_P Parameter: Post Timepoint (hr) Value: 29
  misc_feature: MA Experiment 20001559 PARAMETER Experiment Name: At_Drought_Soil_Dry_P Parameter: Post-Treatment Value: Re-Water vs. No Drought
  misc_feature: MA Experiment 20001559 PARAMETER Experiment Name: At_Drought_Soil_Dry_P Parameter: Timepoint (day) Value: 14
  misc_feature: MA Experiment 20001559 PARAMETER Experiment Name: At_Drought_Soil_Dry_P Parameter: Treatment Value: Drought vs. No Drought
  misc_feature: MA Experiment ID: 20001904 Result: Down-regulated in Transcription
  misc_feature: MA Experiment 20001904 PARAMETER Experiment Name: At_Drought_Reproduction_P Parameter: Age (day) Value: 37
  misc_feature: MA Experiment 20001904 PARAMETER Experiment Name: At_Drought_Reproduction_P Parameter: Organism Value: A. thaliana
  misc_feature: MA Experiment 20001904 PARAMETER Experiment Name: At_Drought_Reproduction_P Parameter: Plant Line Value: WS
  misc_feature: MA Experiment 20001904 PARAMETER Experiment Name: At_Drought_Reproduction_P Parameter: Timepoint (day) Value: 7
  misc_feature: MA Experiment 20001904 PARAMETER Experiment Name: At_Drought_Reproduction_P Parameter: Tissue Value: Rosettes
  misc_feature: MA Experiment 20001904 PARAMETER Experiment Name: At_Drought_Reproduction_P Parameter: Treatment Value: Drought vs. No Drought
  misc_feature: MA Experiment ID: 20001905 Result: Down-regulated in Transcription
  misc_feature: MA Experiment 20001905 PARAMETER Experiment Name: At_Drought_Reproduction_P Parameter: Age (day) Value: 40
  misc_feature: MA Experiment 20001905 PARAMETER Experiment Name: At_Drought_Reproduction_P Parameter: Organism Value: A. thaliana
  misc_feature: MA Experiment 20001905 PARAMETER Experiment Name: At_Drought_Reproduction_P Parameter: Plant Line Value: WS
  misc_feature: MA Experiment 20001905 PARAMETER Experiment Name: At_Drought_Reproduction_P Parameter: Timepoint (day) Value: 10
  misc_feature: MA Experiment 20001905 PARAMETER Experiment Name: At_Drought_Reproduction_P Parameter: Tissue Value: Rosettes
  misc_feature: MA Experiment 20001905 PARAMETER Experiment Name: At_Drought_Reproduction_P Parameter: Treatment Value: Drought vs. No Drought
  misc_feature: MA Experiment ID: 20001906 Result: Down-regulated in Transcription
  misc_feature: MA Experiment 20001906 PARAMETER Experiment Name: At_Drought_Reproduction_P Parameter: Age (day) Value: 35
  misc_feature: MA Experiment 20001906 PARAMETER Experiment Name: At_Drought_Reproduction_P Parameter: Organism Value: A. thaliana
  misc_feature: MA Experiment 20001906 PARAMETER Experiment Name: At_Drought_Reproduction_P Parameter: Plant Line Value: WS
  misc_feature: MA Experiment 20001906 PARAMETER Experiment Name: At_Drought_Reproduction_P Parameter: Timepoint (day) Value: 5
  misc_feature: MA Experiment 20001906 PARAMETER Experiment Name: At_Drought_Reproduction_P Parameter: Tissue Value: Siliques
  misc_feature: MA Experiment 20001906 PARAMETER Experiment Name: At_Drought_Reproduction_P Parameter: Treatment Value: Drought vs. No Drought
  misc_feature: MA Experiment ID: 20001908 Result: Down-regulated in Transcription
  misc_feature: MA Experiment 20001908 PARAMETER Experiment Name: At_Drought_Reproduction_P Parameter: Age (day) Value: 40
  misc_feature: MA Experiment 20001908 PARAMETER Experiment Name: At_Drought_Reproduction_P Parameter: Organism Value: A. thaliana
  misc_feature: MA Experiment 20001908 PARAMETER Experiment Name: At_Drought_Reproduction_P Parameter: Plant Line Value: WS
  misc_feature: MA Experiment 20001908 PARAMETER Experiment Name: At_Drought_Reproduction_P Parameter: Timepoint (day) Value: 10
  misc_feature: MA Experiment 20001908 PARAMETER Experiment Name: At_Drought_Reproduction_P Parameter: Tissue Value: Siliques
  misc_feature: MA Experiment 20001908 PARAMETER Experiment Name: At_Drought_Reproduction_P Parameter: Treatment Value: Drought vs. No Drought
attctcagaaatcttgaccatgaaggaggatcgtcgtcttcctcacaaacgcgacgccttccaattcttgaaaaccaaggctgcgtacgttatcgtcatagttctaacctacgcctttggttacttctccgcctaccactatcatcaaccgctgcagcagcagctgccaccgtctacgacagccgtggaaacgacaaaacctcaagtttgttcaatcgacaacttccgagttacgactccatgcggcaatcttgttccgccggaattgattcgccagactgttattgaccggatctttaacggaacttctccgtacatcgatttcccaccaccgcacgccaagaagtttctccggccaaaaagaatcaaaggttggggatcatacggggccgttttcgagaatctaatccgccgagtcaaacctaagacgatcgtcgaagtcgggagttttctcggcgcgtcggcgatacacatggcgaatctcacgcgccgacttgggctcgaggagactcagattctatgcgtcgacgacttccgtggctggcccggttttcgagaccggtttaaggacatggctttggttaacggtgacgttctgcttatgtaccagtttatgcaaaacgtggttatctcggatttttccggttcgatattgccggttcctttctcgaccggttcggctttggagaagctgtgtgagtggggagtgacggcggacctggtggagatagacgcgggtcacgattttaattcggcatgggcggatataaaccgggcggttcggatactccgacccggcggtgttatatttggtcacgattatttcacggcggcggataatagaggagtgaggagagccgtgaatctgttcgcagagattaaccggttaaaggtcaaaaccgatggtcaacattgggttattgattcggtcaaagtaacctgattccctttttcccataaggaatgaaaaaattcgatgtataaataataagaaaatgtgtaatattgcatagtcaattcatattttttttccatcttttgaaaattaatggatttgaggtttttg

SEQ ID NO: 73945 - protein, 313 aa, Arabidopsis thaliana
  peptide (1)..(313): Ceres Seq. ID no. 4985687
  misc_feature (7)..(312): Homolog of NCBI NO: 15223338 NR Description: hypothetical protein; protein id: At1g01180.1
FSEILTMKEDRRLPHKRDAFQFLKTKAAYVIVIVLTYAFGYFSAYHYHQPLQQQLPPSTTAVETTKPQVCSIDNFRVTTPCGNLVPPELIRQTVIDRIFNGTSPYIDFPPPHAKKFLRPKRIKGWGSYGAVFENLIRRVKPKTIVEVGSFLGASAIHMANLTRRLGLEETQILCVDDFRGWPGFRDRFKDMALVNGDVLLMYQFMQNVVISDFSGSILPVPFSTGSALEKLCEWGVTADLVEIDAGHDFNSAWADINRAVRILRPGGVIFGHDYFTAADNRGVRRAVNLFAEINRLKVKTDGQHWVIDSVKVT

SEQ ID NO: 73946 - protein, 307 aa, Arabidopsis thaliana
  peptide (1)..(307): Ceres Seq. ID no. 4985688
  misc_feature (1)..(306): Homolog of NCBI NO: 15223338 NR Description: hypothetical protein; protein id: At1g01180.1
MKEDRRLPHKRDAFQFLKTKAAYVIVIVLTYAFGYFSAYHYHQPLQQQLPPSTTAVETTKPQVCSIDNFRVTTPCGNLVPPELIRQTVIDRIFNGTSPYIDFPPPHAKKFLRPKRIKGWGSYGAVFENLIRRVKPKTIVEVGSFLGASAIHMANLTRRLGLEETQILCVDDFRGWPGFRDRFKDMALVNGDVLLMYQFMQNVVISDFSGSILPVPFSTGSALEKLCEWGVTADLVEIDAGHDFNSAWADINRAVRILRPGGVIFGHDYFTAADNRGVRRAVNLFAEINRLKVKTDGQHWVIDSVKVT

SEQ ID NO: 73947 - protein, 156 aa, Arabidopsis thaliana
  peptide (1)..(156): Ceres Seq. ID no. 4985689
  misc_feature (1)..(155): Homolog of NCBI NO: 15223338 NR Description: hypothetical protein; protein id: At1g01180.1
MANLTRRLGLEETQILCVDDFRGWPGFRDRFKDMALVNGDVLLMYQFMQNVVISDFSGSILPVPFSTGSALEKLCEWGVTADLVEIDAGHDFNSAWADINRAVRILRPGGVIFGHDYFTAADNRGVRRAVNLFAEINRLKVKTDGQHWVIDSVKVT

SEQ ID NO: 73948 - DNA, 1345 bp, Arabidopsis thaliana
  misc_feature (1)..(1345): Ceres Seq. ID no. 4986015
  misc_feature: MA Experiment ID: 20000070 Result: Down-regulated in Transcription
  misc_feature: MA Experiment 20000070 PARAMETER Experiment Name: At_100uM_ABA_Mutants_cDNA_P Parameter: Plant Line Value: CS24
  misc_feature: MA Experiment 20000070 PARAMETER Experiment Name: At_100uM_ABA_Mutants_cDNA_P Parameter: Timepoint (hr) Value: 6
  misc_feature: MA Experiment 20000070 PARAMETER Experiment Name: At_100uM_ABA_Mutants_cDNA_P Parameter: Tissue Value: Aerial
  misc_feature: MA Experiment 20000070 PARAMETER Experiment Name: At_100uM_ABA_Mutants_cDNA_P Parameter: Treatment Value: 100uM ABA vs. No Treatment
  misc_feature: MA Experiment ID: 20000184 Result: Up-regulated in Transcription
  misc_feature: MA Experiment 20000184 PARAMETER Experiment Name: At_Shoots__P Parameter: Age (day) Value: 7
  misc_feature: MA Experiment 20000184 PARAMETER Experiment Name: At_Shoots__P Parameter: Tissue Value: Shoots vs. Whole Plant
  misc_feature: MA Experiment ID: 20000185 Result: Up-regulated in Transcription
  misc_feature: MA Experiment 20000185 PARAMETER Experiment Name: At_Roots__P Parameter: Age (day) Value: 7 vs. 21
  misc_feature: MA Experiment 20000185 PARAMETER Experiment Name: At_Roots__P Parameter: Organism Value: A. thaliana
  misc_feature: MA Experiment 20000185 PARAMETER Experiment Name: At_Roots__P Parameter: Tissue Value: Roots vs. Whole Plant
  misc_feature: MA Experiment ID: 20000227 Result: Up-regulated in Transcription
  misc_feature: MA Experiment 20000227 PARAMETER Experiment Name: At_Root-Tips-vs-Tops_P Parameter: Tissue Value: Root Tips vs. Root Tops
  misc_feature: MA Experiment ID: 20000234 Result: Up-regulated in Transcription
  misc_feature: MA Experiment 20000234 PARAMETER Experiment Name: At_Siliques_P Parameter: Age (day) Value: 21
  misc_feature: MA Experiment 20000234 PARAMETER Experiment Name: At_Siliques_P Parameter: Organism Value: A. thaliana
  misc_feature: MA Experiment 20000234 PARAMETER Experiment Name: At_Siliques_P Parameter: Plant Line Value: WS
  misc_feature: MA Experiment 20000234 PARAMETER Experiment Name: At_Siliques_P Parameter: Tissue Value: Less Than 5mm Siliques vs. Whole Plant
  misc_feature: MA Experiment ID: 20000264 Result: Up-regulated in Transcription
  misc_feature: MA Experiment 20000264 PARAMETER Experiment Name: At_Open_Flower_P Parameter: Age (day) Value: 21
  misc_feature: MA Experiment 20000264 PARAMETER Experiment Name: At_Open_Flower_P Parameter: Plant Line Value: WS
  misc_feature: MA Experiment 20000264 PARAMETER Experiment Name: At_Open_Flower_P Parameter: Tissue Value: Open Flower vs. Whole Plant
  misc_feature: MA Experiment ID: 20000265 Result: Up-regulated in Transcription
  misc_feature: MA Experiment 20000265 PARAMETER Experiment Name: At_Open_Flower_P Parameter: Age (day) Value: 21
  misc_feature: MA Experiment 20000265 PARAMETER Experiment Name: At_Open_Flower_P Parameter: Plant Line Value: WS
  misc_feature: MA Experiment 20000265 PARAMETER Experiment Name: At_Open_Flower_P Parameter: Tissue Value: Closed Flower vs. Whole Plant
  misc_feature: MA Experiment ID: 20000286 Result: Up-regulated in Transcription
  misc_feature: MA Experiment 20000286 PARAMETER Experiment Name: At_Open_Flower_P Parameter: Age (day) Value: 21
  misc_feature: MA Experiment 20000286 PARAMETER Experiment Name: At_Open_Flower_P Parameter: Plant Line Value: WS
  misc_feature: MA Experiment 20000286 PARAMETER Experiment Name: At_Open_Flower_P Parameter: Tissue Value: Half Open vs. Whole Plant
  misc_feature: MA Experiment ID: 20000439 Result: Up-regulated in Transcription
  misc_feature: MA Experiment 20000439 PARAMETER Experiment Name: At_Roots__P Parameter: Age (day) Value: 14 vs. 21
  misc_feature: MA Experiment 20000439 PARAMETER Experiment Name: At_Roots__P Parameter: Organism Value: A. thaliana
  misc_feature: MA Experiment 20000439 PARAMETER Experiment Name: At_Roots__P Parameter: Tissue Value: Roots vs. Whole Plant
  misc_feature: MA Experiment ID: 20000441 Result: Down-regulated in Transcription
  misc_feature: MA Experiment 20000441 PARAMETER Experiment Name: At_1uM_BR-BRZ__P Parameter: Tissue Value: Shoot Apices
  misc_feature: MA Experiment 20000441 PARAMETER Experiment Name: At_1uM_BR-BRZ__P Parameter: Treatment Value: 1uM BR vs. No Treatment
  misc_feature: MA Experiment ID: 20000527 Result: Down-regulated in Transcription
  misc_feature: MA Experiment 20000527 PARAMETER Experiment Name: At_10percent_PEG_P Parameter: Age (day) Value: 20
  misc_feature: MA Experiment 20000527 PARAMETER Experiment Name: At_10percent_PEG_P Parameter: Organism Value: A. thaliana
  misc_feature: MA Experiment 20000527 PARAMETER Experiment Name: At_10percent_PEG_P Parameter: Plant Line Value: WS
  misc_feature: MA Experiment 20000527 PARAMETER Experiment Name: At_10percent_PEG_P Parameter: Timepoint (day) Value: 20
  misc_feature: MA Experiment 20000527 PARAMETER Experiment Name: At_10percent_PEG_P Parameter: Tissue Value: Whole Plant
  misc_feature: MA Experiment 20000527 PARAMETER Experiment Name: At_10percent_PEG_P Parameter: Treatment Value: 10percent PEG vs. No Treatment
  misc_feature: MA Experiment ID: 20001451 Result: Down-regulated in Transcription
  misc_feature: MA Experiment 20001451 PARAMETER Experiment Name: At_Far-red-induction_P Parameter: Age (day) Value: 7
  misc_feature: MA Experiment 20001451 PARAMETER Experiment Name: At_Far-red-induction_P Parameter: Light Value: Far-red vs. White
  misc_feature: MA Experiment 20001451 PARAMETER Experiment Name: At_Far-red-induction_P Parameter: Organism Value: A. thaliana
  misc_feature: MA Experiment 20001451 PARAMETER Experiment Name: At_Far-red-induction_P Parameter: Plant Line Value: Columbia
  misc_feature: MA Experiment 20001451 PARAMETER Experiment Name: At_Far-red-induction_P Parameter: Timepoint (hr) Value: 24
  misc_feature: MA Experiment 20001451 PARAMETER Experiment Name: At_Far-red-induction_P Parameter: Tissue Value: Whole Plant
  misc_feature: MA Experiment ID: 20001558 Result: Up-regulated in Transcription
  misc_feature: MA Experiment 20001558 PARAMETER Experiment Name: At_Drought_Soil_Dry_P Parameter: Age (day) Value: 27
  misc_feature: MA Experiment 20001558 PARAMETER Experiment Name: At_Drought_Soil_Dry_P Parameter: Organism Value: A. thaliana
  misc_feature: MA Experiment 20001558 PARAMETER Experiment Name: At_Drought_Soil_Dry_P Parameter: Plant Line Value: WS
  misc_feature: MA Experiment 20001558 PARAMETER Experiment Name: At_Drought_Soil_Dry_P Parameter: Post Timepoint (hr) Value: 6
  misc_feature: MA Experiment 20001558 PARAMETER Experiment Name: At_Drought_Soil_Dry_P Parameter: Post-Treatment Value: Re-Water vs. No Drought
  misc_feature: MA Experiment 20001558 PARAMETER Experiment Name: At_Drought_Soil_Dry_P Parameter: Timepoint (day) Value: 13
  misc_feature: MA Experiment 20001558 PARAMETER Experiment Name: At_Drought_Soil_Dry_P Parameter: Treatment Value: Drought vs. No Drought
  misc_feature: MA Experiment ID: 20001560 Result: Up-regulated in Transcription
  misc_feature: MA Experiment 20001560 PARAMETER Experiment Name: At_Drought_Soil_Dry_P Parameter: Age (day) Value: 28
  misc_feature: MA Experiment 20001560 PARAMETER Experiment Name: At_Drought_Soil_Dry_P Parameter: Organism Value: A. thaliana
  misc_feature: MA Experiment 20001560 PARAMETER Experiment Name: At_Drought_Soil_Dry_P Parameter: Plant Line Value: WS
  misc_feature: MA Experiment 20001560 PARAMETER Experiment Name: At_Drought_Soil_Dry_P Parameter: Post Timepoint (hr) Value: None
  misc_feature: MA Experiment 20001560 PARAMETER Experiment Name: At_Drought_Soil_Dry_P Parameter: Post-Treatment Value: None
  misc_feature: MA Experiment 20001560 PARAMETER Experiment Name: At_Drought_Soil_Dry_P Parameter: Timepoint (day) Value: 14
  misc_feature: MA Experiment 20001560 PARAMETER Experiment Name: At_Drought_Soil_Dry_P Parameter: Treatment Value: Drought vs. No Drought
aacaacaacaacaacaatgtcttcttctctccgatctaccaccgccgcttctcttctcctccgctcctcctcctcctcctccagatccactctcactctctccgcttcctcctctctctccttcgtcagatctctcgtctcttctccacgtctctcttcttcttcatccctctctcagaaatatcgaattgcgtcggtgaatcggagtttcaactccaccaccgccgctactaaatcttcatcttcagatcctgatcagttgaagaacgctagagaagatatcaaagagcttctcagcaccaaattctgccatccgattttggttagattaggttggcatgatgctggtacgtataacaagaacattaaggaatggccacaaagaggtggagctaatggaagtttgagattcgatattgagcttaaacatgctgctaacgctggtcttgtgaatgctttaaacttgattaaggatatcaaagagaaatactctgggatcagttatgctgatttgttccagttagctagtgctactgctatagaggaagctggaggaccgaaaataccgatgaaatatggtagagttgatgcctctggtcctgaggattgtccagaagaaggaaggcttccagatgctggtcctccttcacctgctactcatctcagagaagttttttacagaatgggattagatgacaaggacatagttgcattatctggtgctcacacgttaggaagatctaggccagaacgtagtggttgggggaagcctgagacgaagtacacgaaagaaggacctggagcaccaggaggacagtcatggacaccagagtggctgaagtttgataattcttacttcaaggagatcaaggaaaagagagatgaagatctccttgtcctacccactgatgctgccatcttcgaagattcttctttcaaggtctatgctgaaaagtatgctgcagatcaggatgcatttttcaaggattacgctgtagcccatgcgaagctcagcaatcttggagcagaatttaaccctccggagggtatcgttatctaatgggggcacataatttactcaaccagacttatgattttagagaaacgtagttcaataatgaaagagaagaaaaagttgacggagaacttttcatgcgagtacttttcgagataccttttggacaatgtttctggctgttcaaaggattttgtttagccgaaagtatttgatcgttttcatggttttgggctttcatgttttttcttgtaataaattgcggaagtgattattcaaaatctatacaaattttgtctgggattgaattattttatcgatgttataact

SEQ ID NO: 73949 - protein, 352 aa, Arabidopsis thaliana
  peptide (1)..(352): Ceres Seq. ID no. 4986016
  misc_feature (90)..(322): Pfam Name: Peroxidase Pfam Description: Peroxidase
  misc_feature (1)..(352): Homolog of NCBI NO: 15236483 NR Description: stromal ascorbate peroxidase, putative (sAPX); id: At4g08390.1, supported by cDNA: gi_15810560, supported by
  misc_feature (1)..(352): Homolog of NCBI NO: 1419388 NR Description: stromal ascorbate peroxidase [Arabidopsis
  misc_feature (1)..(352): Homolog of NCBI NO: 2146725 NR Description: L-ascorbate peroxidase (EC 1.11.1.11) precursor -
  misc_feature (6)..(352): Homolog of NCBI NO: 1369920 NR Description: stromal ascorbate peroxidase [Spinacia oleracea]
  misc_feature (6)..(352): Homolog of NCBI NO: 1944507 NR Description: thylakoid-bound ascorbate peroxidase [Spinacia
  misc_feature (6)..(352): Homolog of NCBI NO: 2832920 NR Description: thylakoid-bound ascorbate peroxidase [Spinacia
  misc_feature (6)..(352): Homolog of NCBI NO: 2832921 NR Description: stromal ascorbate peroxidase [Spinacia oleracea]
  misc_feature (3)..(352): Homolog of NCBI NO: 7484621 NR Description: L-ascorbate peroxidase (EC 1.11.1.11) precursor -
  misc_feature (3)..(349): Homolog of NCBI NO: 3202026 NR Description: stromal L-ascorbate peroxidase precursor
  misc_feature (15)..(352): Homolog of NCBI NO: 24496465 NR Description: stromal ascorbate peroxidase [Retama raetam]
TTTTTMSSSLRSTTAASLLLRSSSSSSRSTLTLSASSSLSFVRSLVSSPRLSSSSSLSQKYRIASVNRSFNSTTAATKSSSSDPDQLKNAREDIKELLSTKFCHPILVRLGWHDAGTYNKNIKEWPQRGGANGSLRFDIELKHAANAGLVNALNLIKDIKEKYSGISYADLFQLASATAIEEAGGPKIPMKYGRVDASGPEDCPEEGRLPDAGPPSPATHLREVFYRMGLDDKDIVALSGAHTLGRSRPERSGWGKPETKYTKEGPGAPGGQSWTPEWLKFDNSYFKEIKEKRDEDLLVLPTDAAIFEDSSFKVYAEKYAADQDAFFKDYAVAHAKLSNLGAEFNPPEGIVI

SEQ ID NO: 73950 - protein, 347 aa, Arabidopsis thaliana
  peptide (1)..(347): Ceres Seq. ID no. 4986017
  misc_feature (85)..(317): Pfam Name: Peroxidase Pfam Description: Peroxidase
  misc_feature (1)..(347): Homolog of NCBI NO: 15236483 NR Description: stromal ascorbate peroxidase, putative (sAPX); id: At4g08390.1, supported by cDNA: gi_15810560, supported by
  misc_feature (1)..(347): Homolog of NCBI NO: 1419388 NR Description: stromal ascorbate peroxidase [Arabidopsis
  misc_feature (1)..(347): Homolog of NCBI NO: 2146725 NR Description: L-ascorbate peroxidase (EC 1.11.1.11) precursor -
  misc_feature (1)..(347): Homolog of NCBI NO: 1369920 NR Description: stromal ascorbate peroxidase [Spinacia oleracea]
  misc_feature (1)..(347): Homolog of NCBI NO: 1944507 NR Description: thylakoid-bound ascorbate peroxidase [Spinacia
  misc_feature (1)..(347): Homolog of NCBI NO: 2832920 NR Description: thylakoid-bound ascorbate peroxidase [Spinacia
  misc_feature (1)..(347): Homolog of NCBI NO: 2832921 NR Description: stromal ascorbate peroxidase [Spinacia oleracea]
  misc_feature (1)..(347): Homolog of NCBI NO: 7484621 NR Description: L-ascorbate peroxidase (EC 1.11.1.11) precursor -
  misc_feature (1)..(344): Homolog of NCBI NO: 3202026 NR Description: stromal L-ascorbate peroxidase precursor
  misc_feature (10)..(347): Homolog of NCBI NO: 24496465 NR Description: stromal ascorbate peroxidase [Retama raetam]
MSSSLRSTTAASLLLRSSSSSSRSTLTLSASSSLSFVRSLVSSPRLSSSSSLSQKYRIASVNRSFNSTTAATKSSSSDPDQLKNAREDIKELLSTKFCHPILVRLGWHDAGTYNKNIKEWPQRGGANGSLRFDIELKHAANAGLVNALNLIKDIKEKYSGISYADLFQLASATAIEEAGGPKIPMKYGRVDASGPEDCPEEGRLPDAGPPSPATHLREVFYRMGLDDKDIVALSGAHTLGRSRPERSGWGKPETKYTKEGPGAPGGQSWTPEWLKFDNSYFKEIKEKRDEDLLVLPTDAAIFEDSSFKVYAEKYAADQDAFFKDYAVAHAKLSNLGAEFNPPEGIVI

SEQ ID NO: 73951 - DNA, 633 bp, Arabidopsis thaliana
  misc_feature (1)..(633): Ceres Seq. ID no. 4986087
  misc_feature: MA Experiment ID: 108434 Result: Up-regulated in Transcription
  misc_feature: MA Experiment 108434 PARAMETER Experiment Name: At_Root_Tips_cDNA_P Parameter: Tissue Value: Root Tips
  misc_feature: MA Experiment ID: 108595 Result: Up-regulated in Transcription
  misc_feature: MA Experiment 108595 PARAMETER Experiment Name: At_Ler-pi_Ovule_cDNA_P Parameter: Plant Line Value: null
  misc_feature: Pfam Name: Pro_isomerase Pfam Description: Cyclophilin type peptidyl-prolyl cis-trans isomerase/CLD
atcatcactttcacaatcttcttcatcgatttctctcttccaaatctcccaaaagatgtcgaaccctagagttttcttcgacatgagtctcagcggtactcccatcggacggatcgagatggagcttttcgctgatacaaccccaaacacggcggagaatttccgtgctctctgtaccggcgagaaaggaatgggaaagctaagttcaaggacgagaactttatcaagaagcatacaggagctgggattctctcaatggctaactctggtcctaacactaacggatctcagttcttcatctgtaccgataagacgtcgtggttagatggtaagcacgttgtgtttggacaagttgttaaaggcttggacgtcgtgaaggcgattgagaaagttggatctgattctggaaagacttccaaagtcgttaccatcactgattgtggtcagctttcttagatctgagtgagaaagtgagagactttgatctttatgagtaataatggtgtcttttgctttcggttgttcttcctcttaccttaatggattattctgtttagggtttgagttttcgtttcagagtttgtaacaaaacccttttgtgttttctggggtttgaaataattatgagcttac

SEQ ID NO: 73952 - protein, 107 aa, Arabidopsis thaliana; identical to SEQ ID NO: 28754
  peptide (1)..(107): Ceres Seq. ID no. 4986088
  misc_feature: Pfam Name: Pro_isomerase Pfam Description: Cyclophilin type peptidyl-prolyl cis-trans isomerase/CLD
  misc_feature (19)..(67): Homolog of NCBI NO: 15236211 NR Description: peptidylprolyl isomerase (cyclophilin); protein At4g34870.1, supported by cDNA: 37., supported by cDNA: supported by cDNA: gi_460967 [Arabidopsis thaliana]
  misc_feature (19)..(66): Homolog of NCBI NO: 3334157 NR Description: Peptidyl-prolyl cis-trans isomerase (PPIase)
  misc_feature (20)..(66): Homolog of NCBI NO: 21886603 NR Description: peptidylprolyl isomerase (cyclophilin) [Betula
  misc_feature (19)..(66): Homolog of NCBI NO: 11270316 NR Description: peptidylprolyl isomerase (EC 5.2.1.8) - Digitalis lanata >gi|1563719|emb|CAA69622.1| cyclophylin
  misc_feature (20)..(66): Homolog of NCBI NO: 18076088 NR Description: cyclophilin [Ricinus communis]
  misc_feature (19)..(67): Homolog of NCBI NO: 11270322 NR Description: peptidylprolyl isomerase (EC 5.2.1.8) - potato >gi|4559302|gb|AAD22975.1|AF126551_1 cyclophilin
  misc_feature (19)..(66): Homolog of NCBI NO: 18146786 NR Description: CYP1 [Vigna radiata]
  misc_feature (19)..(63): Homolog of NCBI NO: 29124975 NR Description: cyclophilin [Populus tremuloides]
  misc_feature (20)..(66): Homolog of NCBI NO: 15227259 NR Description: cytosolic cyclophilin (ROC3); protein id: supported by cDNA: 23995., supported by cDNA: gi_1305454, by cDNA: gi_15081645, supported by cDNA: gi_20147152 [Arabidopsis
  misc_feature (19)..(66): Homolog of NCBI NO: 11270318 NR Description: peptidylprolyl isomerase (EC 5.2.1.8) CYP18 - Digitalis lanata >gi|1561575|emb|CAA69598.1| cyclophilin

SEQ ID NO: 73953 - protein, 89 aa, Arabidopsis thaliana; identical to SEQ ID NO: 28755
  peptide (1)..(89): Ceres Seq. ID no. 4986089
  misc_feature: Pfam Name: Pro_isomerase Pfam Description: Cyclophilin type peptidyl-prolyl cis-trans isomerase/CLD
  misc_feature (1)..(49): Homolog of NCBI NO: 15236211 NR Description: peptidylprolyl isomerase (cyclophilin); protein At4g34870.1, supported by cDNA: 37., supported by cDNA: supported by cDNA: gi_460967 [Arabidopsis thaliana]
  misc_feature (1)..(48): Homolog of NCBI NO: 3334157 NR Description: Peptidyl-prolyl cis-trans isomerase (PPIase)
  misc_feature (2)..(48): Homolog of NCBI NO: 21886603 NR Description: peptidylprolyl isomerase (cyclophilin) [Betula
  misc_feature (1)..(48): Homolog of NCBI NO: 11270316 NR Description: peptidylprolyl isomerase (EC 5.2.1.8) - Digitalis lanata >gi|1563719|emb|CAA69622.1| cyclophylin
  misc_feature (2)..(48): Homolog of NCBI NO: 18076088 NR Description: cyclophilin [Ricinus communis]
  misc_feature (1)..(49): Homolog of NCBI NO: 11270322 NR Description: peptidylprolyl isomerase (EC 5.2.1.8) - potato >gi|4559302|gb|AAD22975.1|AF126551_1 cyclophilin
  misc_feature (1)..(48): Homolog of NCBI NO: 18146786 NR Description: CYP1 [Vigna radiata]
  misc_feature (1)..(45): Homolog of NCBI NO: 29124975 NR Description: cyclophilin [Populus tremuloides]
  misc_feature (2)..(48): Homolog of NCBI NO: 15227259 NR Description: cytosolic cyclophilin (ROC3); protein id: supported by cDNA: 23995., supported by cDNA: gi_1305454, by cDNA: gi_15081645, supported by cDNA: gi_20147152 [Arabidopsis
  misc_feature (1)..(48): Homolog of NCBI NO: 11270318 NR Description: peptidylprolyl isomerase (EC 5.2.1.8) CYP18 - Digitalis lanata >gi|1561575|emb|CAA69598.1| cyclophilin

SEQ ID NO: 73954 - protein, 80 aa, Arabidopsis thaliana; identical to SEQ ID NO: 28756
  peptide (1)..(80): Ceres Seq. ID no. 4986090
  misc_feature: Pfam Name: Pro_isomerase Pfam Description: Cyclophilin type peptidyl-prolyl cis-trans isomerase/CLD
  misc_feature (1)..(40): Homolog of NCBI NO: 15236211 NR Description: peptidylprolyl isomerase (cyclophilin); protein At4g34870.1, supported by cDNA: 37., supported by cDNA: supported by cDNA: gi_460967 [Arabidopsis thaliana]
  misc_feature (1)..(39): Homolog of NCBI NO: 3334157 NR Description: Peptidyl-prolyl cis-trans isomerase (PPIase)
  misc_feature (1)..(39): Homolog of NCBI NO: 21886603 NR Description: peptidylprolyl isomerase (cyclophilin) [Betula
  misc_feature (1)..(39): Homolog of NCBI NO: 11270316 NR Description: peptidylprolyl isomerase (EC 5.2.1.8) - Digitalis lanata >gi|1563719|emb|CAA69622.1| cyclophylin
  misc_feature (1)..(39): Homolog of NCBI NO: 18076088 NR Description: cyclophilin [Ricinus communis]
  misc_feature (1)..(40): Homolog of NCBI NO: 11270322 NR Description: peptidylprolyl isomerase (EC 5.2.1.8) - potato >gi|4559302|gb|AAD22975.1|AF126551_1 cyclophilin
  misc_feature (1)..(39): Homolog of NCBI NO: 18146786 NR Description: CYP1 [Vigna radiata]
  misc_feature (1)..(36): Homolog of NCBI NO: 29124975 NR Description: cyclophilin [Populus tremuloides]
  misc_feature (1)..(39): Homolog of NCBI NO: 15227259 NR Description: cytosolic cyclophilin (ROC3); protein id: supported by cDNA: 23995., supported by cDNA: gi_1305454, by cDNA: gi_15081645, supported by cDNA: gi_20147152 [Arabidopsis
  misc_feature (1)..(39): Homolog of NCBI NO: 11270318 NR Description: peptidylprolyl isomerase (EC 5.2.1.8) CYP18 - Digitalis lanata >gi|1561575|emb|CAA69598.1| cyclophilin

SEQ ID NO: 73955 - DNA, 726 bp, Arabidopsis thaliana
  misc_feature (1)..(726): Ceres Seq. ID no. 4986452
  misc_feature: MA Experiment ID: 20000185 Result: Down-regulated in Transcription
  misc_feature: MA Experiment 20000185 PARAMETER Experiment Name: At_Roots__P Parameter: Age (day) Value: 7 vs. 21
  misc_feature: MA Experiment 20000185 PARAMETER Experiment Name: At_Roots__P Parameter: Organism Value: A. thaliana
  misc_feature: MA Experiment 20000185 PARAMETER Experiment Name: At_Roots__P Parameter: Tissue Value: Roots vs. Whole Plant
  misc_feature: MA Experiment ID: 20000234 Result: Up-regulated in Transcription
  misc_feature: MA Experiment 20000234 PARAMETER Experiment Name: At_Siliques_P Parameter: Age (day) Value: 21
  misc_feature: MA Experiment 20000234 PARAMETER Experiment Name: At_Siliques_P Parameter: Organism Value: A. thaliana
  misc_feature: MA Experiment 20000234 PARAMETER Experiment Name: At_Siliques_P Parameter: Plant Line Value: WS
  misc_feature: MA Experiment 20000234 PARAMETER Experiment Name: At_Siliques_P Parameter: Tissue Value: Less Than 5mm Siliques vs. Whole Plant
  misc_feature: MA Experiment ID: 20000264 Result: Up-regulated in Transcription
  misc_feature: MA Experiment 20000264 PARAMETER Experiment Name: At_Open_Flower_P Parameter: Age (day) Value: 21
  misc_feature: MA Experiment 20000264 PARAMETER Experiment Name: At_Open_Flower_P Parameter: Plant Line Value: WS
  misc_feature: MA Experiment 20000264 PARAMETER Experiment Name: At_Open_Flower_P Parameter: Tissue Value: Open Flower vs. Whole Plant
  misc_feature: MA Experiment ID: 20000265 Result: Up-regulated in Transcription
  misc_feature: MA Experiment 20000265 PARAMETER Experiment Name: At_Open_Flower_P Parameter: Age (day) Value: 21
  misc_feature: MA Experiment 20000265 PARAMETER Experiment Name: At_Open_Flower_P Parameter: Plant Line Value: WS
  misc_feature: MA Experiment 20000265 PARAMETER Experiment Name: At_Open_Flower_P Parameter: Tissue Value: Closed Flower vs. Whole Plant
  misc_feature: MA Experiment ID: 20000286 Result: Up-regulated in Transcription
  misc_feature: MA Experiment 20000286 PARAMETER Experiment Name: At_Open_Flower_P Parameter: Age (day) Value: 21
  misc_feature: MA Experiment 20000286 PARAMETER Experiment Name: At_Open_Flower_P Parameter: Plant Line Value: WS
  misc_feature: MA Experiment 20000286 PARAMETER Experiment Name: At_Open_Flower_P Parameter: Tissue Value: Half Open vs. Whole Plant
  misc_feature: MA Experiment ID: 20000438 Result: Down-regulated in Transcription
  misc_feature: MA Experiment 20000438 PARAMETER Experiment Name: At_Shoots__P Parameter: Age (day) Value: 14
  misc_feature: MA Experiment 20000438 PARAMETER Experiment Name: At_Shoots__P Parameter: Tissue Value: Shoots vs. Whole Plant
  misc_feature: MA Experiment ID: 20000439 Result: Down-regulated in Transcription
  misc_feature: MA Experiment 20000439 PARAMETER Experiment Name: At_Roots__P Parameter: Age (day) Value: 14 vs. 21
  misc_feature: MA Experiment 20000439 PARAMETER Experiment Name: At_Roots__P Parameter: Organism Value: A. thaliana
  misc_feature: MA Experiment 20000439 PARAMETER Experiment Name: At_Roots__P Parameter: Tissue Value: Roots vs. Whole Plant
  misc_feature: MA Experiment ID: 20000794 Result: Up-regulated in Transcription
  misc_feature: MA Experiment 20000794 PARAMETER Experiment Name: At_Petals_P Parameter: Age (day) Value: 23-25 days
  misc_feature: MA Experiment 20000794 PARAMETER Experiment Name: At_Petals_P Parameter: Plant Line Value: WS
  misc_feature: MA Experiment 20000794 PARAMETER Experiment Name: At_Petals_P Parameter: Tissue Value: Petals vs. Whole plant
  misc_feature: MA Experiment ID: 20001910 Result: Up-regulated in Transcription
  misc_feature: MA Experiment 20001910 PARAMETER Experiment Name: At_Drought_Reproduction_P Parameter: Age (day) Value: 37
  misc_feature: MA Experiment 20001910 PARAMETER Experiment Name: At_Drought_Reproduction_P Parameter: Organism Value: A. thaliana
  misc_feature: MA Experiment 20001910 PARAMETER Experiment Name: At_Drought_Reproduction_P Parameter: Plant Line Value: WS
  misc_feature: MA Experiment 20001910 PARAMETER Experiment Name: At_Drought_Reproduction_P Parameter: Timepoint (day) Value: 7
  misc_feature: MA Experiment 20001910 PARAMETER Experiment Name: At_Drought_Reproduction_P Parameter: Tissue Value: Flowers
  misc_feature: MA Experiment 20001910 PARAMETER Experiment Name: At_Drought_Reproduction_P Parameter: Treatment Value: Drought vs. No Drought
atggagcttcgtaaacggaaaatacgagctccattacatatcttcgtcggcataacgttcttcctccttcagctttggtcgggaacggcccaaattaaccatgaagactcttccacaaaaccctccgttaaaaactctccgtcagcgacgagtactcggcttctgttgtcaccaccttcgttcaccggaaaccgattctcgttcaggttcaggtggaggagaatacgacgtcgtaacagagtcaacagagcgagcagagagtttttaatcgcacataacctcgtaagagcgcgcgtgggagaaccaccgtttcaatgggacggaagattagcggcgtacgcgcgcacgtgggcgaatcagcgcgtgggtgattgtaggcttgttcactctaacgggccgtatggagaaaacatattttgggccggaaagaataactggagccccagagatattgttaatgtgtgggccgatgaggataaattctacgacgtgaaaggtaacacgtgtgagccgcaacacatgtgtgggcactacacgcagatcgtgtggagagatagtaccaaggtcggatgcgcaagtgtggattgttcgaacggcggcgtttatgcgatttgtgtttataacccaccgggaaattacgaaggtgaaaatccgtttggaagttatgatgatcagattggtcttgcccgggatgatccaccggcggtgatcggaggaatggcttga

SEQ ID NO: 73956 - protein, 241 aa, Arabidopsis thaliana
  peptide (1)..(241): Ceres Seq. ID no. 4986453
  misc_feature (89)..(206): Pfam Name: SCP-like extracellular protein Pfam Description: SCP-like extracellular protein
  misc_feature (25)..(241): Homolog of NCBI NO: 25518458 NR Description: hypothetical protein F6F3.11 - Arabidopsis
  misc_feature (43)..(241): Homolog of NCBI NO: 15223370 NR Description: pathogenesis related protein, putative; protein
  misc_feature (79)..(219): Homolog of NCBI NO: 15232719 NR Description: putative pathogenesis-related protein; protein At3g09590.1 [Arabidopsis thaliana]
  misc_feature (85)..(219): Homolog of NCBI NO: 15235992 NR Description: putative pathogenesis-related protein; protein id:
  misc_feature (74)..(219): Homolog of NCBI NO: 15241922 NR Description: pathogenesis related protein - like; protein id:
  misc_feature (85)..(219): Homolog of NCBI NO: 22327916 NR Description: similar to putative pathogenesis-related protein; id: At5g57625.1 [Arabidopsis thaliana]
  misc_feature (86)..(219): Homolog of NCBI NO: 100907 NR Description: pathogenesis-related protein 1 - maize
  misc_feature (86)..(219): Homolog of NCBI NO: 7442179 NR Description: pathogenesis related protein-1 - maize
  misc_feature (86)..(219): Homolog of NCBI NO: 3702665 NR Description: pathogenisis-related protein 1.2 [Triticum
  misc_feature (88)..(225): Homolog of NCBI NO: 17221641 NR Description: PR-1 [Solanum torvum]
MELRKRKIRAPLHIFVGITFFLLQLWSGTAQINHEDSSTKPSVKNSPSATSTRLLLSPPSFTGNRFSFRFRWRRIRRRNRVNRASREFLIAHNLVRARVGEPPFQWDGRLAAYARTWANQRVGDCRLVHSNGPYGENIFWAGKNNWSPRDIVNVWADEDKFYDVKGNTCEPQHMCGHYTQIVWRDSTKVGCASVDCSNGGVYAICVYNPPGNYEGENPFGSYDDQIGLARDDPPAVIGGMA

SEQ ID NO: 73957 - DNA, 3123 bp, Arabidopsis thaliana
  misc_feature (1)..(3123): Ceres Seq. ID no. 4986522
  misc_feature: MA Experiment ID: 20000227 Result: Up-regulated in Transcription
  misc_feature: MA Experiment 20000227 PARAMETER Experiment Name: At_Root-Tips-vs-Tops_P Parameter: Tissue Value: Root Tips vs. Root Tops
  misc_feature: MA Experiment ID: 20000235 Result: Up-regulated in Transcription
  misc_feature: MA Experiment 20000235 PARAMETER Experiment Name: At_Siliques_P Parameter: Age (day) Value: 21
  misc_feature: MA Experiment 20000235 PARAMETER Experiment Name: At_Siliques_P Parameter: Organism Value: A. thaliana
  misc_feature: MA Experiment 20000235 PARAMETER Experiment Name: At_Siliques_P Parameter: Plant Line Value: WS
  misc_feature: MA Experiment 20000235 PARAMETER Experiment Name: At_Siliques_P Parameter: Tissue Value: 5-10mm Siliques vs. Whole Plant
  misc_feature: MA Experiment ID: 20000264 Result: Up-regulated in Transcription
  misc_feature: MA Experiment 20000264 PARAMETER Experiment Name: At_Open_Flower_P Parameter: Age (day) Value: 21
  misc_feature: MA Experiment 20000264 PARAMETER Experiment Name: At_Open_Flower_P Parameter: Plant Line Value: WS
  misc_feature: MA Experiment 20000264 PARAMETER Experiment Name: At_Open_Flower_P Parameter: Tissue Value: Open Flower vs. Whole Plant
  misc_feature: MA Experiment ID: 20000286 Result: Up-regulated in Transcription
  misc_feature: MA Experiment 20000286 PARAMETER Experiment Name: At_Open_Flower_P Parameter: Age (day) Value: 21
  misc_feature: MA Experiment 20000286 PARAMETER Experiment Name: At_Open_Flower_P Parameter: Plant Line Value: WS
  misc_feature: MA Experiment 20000286 PARAMETER Experiment Name: At_Open_Flower_P Parameter: Tissue Value: Half Open vs. Whole Plant
  misc_feature: MA Experiment ID: 20000439 Result: Up-regulated in Transcription
  misc_feature: MA Experiment 20000439 PARAMETER Experiment Name: At_Roots__P Parameter: Age (day) Value: 14 vs. 21
  misc_feature: MA Experiment 20000439 PARAMETER Experiment Name: At_Roots__P Parameter: Organism Value: A. thaliana
  misc_feature: MA Experiment 20000439 PARAMETER Experiment Name: At_Roots__P Parameter: Tissue Value: Roots vs. Whole Plant
  misc_feature: MA Experiment ID: 20001757 Result: Down-regulated in Transcription
  misc_feature: MA Experiment 20001757 PARAMETER Experiment Name: At_50mM_NH4NO3_L-to-H_P Parameter: Timepoint (hr) Value: 6
  misc_feature: MA Experiment 20001757 PARAMETER Experiment Name: At_50mM_NH4NO3_L-to-H_P Parameter: Tissue Value: Leaf
  misc_feature: MA Experiment 20001757 PARAMETER Experiment Name: At_50mM_NH4NO3_L-to-H_P Parameter: Treatment Value: 50mM NH4NO3 vs 100mM Mannitol
  misc_feature: MA Experiment ID: 20001910 Result: Up-regulated in Transcription
  misc_feature: MA Experiment 20001910 PARAMETER Experiment Name: At_Drought_Reproduction_P Parameter: Age (day) Value: 37
  misc_feature: MA Experiment 20001910 PARAMETER Experiment Name: At_Drought_Reproduction_P Parameter: Organism Value: A. thaliana
  misc_feature: MA Experiment 20001910 PARAMETER Experiment Name: At_Drought_Reproduction_P Parameter: Plant Line Value: WS
  misc_feature: MA Experiment 20001910 PARAMETER Experiment Name: At_Drought_Reproduction_P Parameter: Timepoint (day) Value: 7
  misc_feature: MA Experiment 20001910 PARAMETER Experiment Name: At_Drought_Reproduction_P Parameter: Tissue Value: Flowers
  misc_feature: MA Experiment 20001910 PARAMETER Experiment Name: At_Drought_Reproduction_P Parameter: Treatment Value: Drought vs. No Drought
atggagtttcctggcagctccaatcagcatttaggtagggataggttcaatggagaagttggttgcggtaataactgttctcagacaggagaggaattttcaaatgagtttttgagggattttggtgctcaacgaagactacaacatggtggtgttaacagaaatgttgagggtaattataataatcgccatcttgtttacgaggatttcaacagaattcttggccttcaaagagttgattccaacatgtcagaaggtattaattcctcgaatggttactttgctgagtcaaatgttgcagactcacctcggaagatgtttcaaactgcaatatcagatgtttatttgcctgaagtattgaagcttctttgtagcttcgggggaaggatcttacagcggcctggtgatggcaagcttagatacattggaggggagactcggattatctcaatacgcaaacatgttggattaaacgaattgatgcacaagacttatgctttgtgcaaccatccgcatacaatcaagtatcaattaccaggagaagatcttgatgcccttatatcggtttgctcagatgaggatcttcttcatatgattgaagagtatcaagaagctgaaacaaaggctggatcccagaggattagggtctttcttgtaccttccacagaatcatcagagagtcctaaaattttccatgaaaggaatatgaacataaaccgaaacacgaaccagcagacggatatagatcattatcagtatgtttcagctcttaatggtattgtagatgtgagtcctcaaaagagttccagcggccaaagtggaacaagtcagaccacacaatttgggaatgcttcagaatttagccctacatttcatcttcgagactcgcctacttctgttcatacatgggaacacaaagacagcaacagtccaaccttcatgaaaccatatgggaacacgaatgctgttcattttatgccgaaaatgcagattcccaggaactcgtttggtcaacaatctcctccaacatctcctttttcagtccacaagagagcaaacaccgacgttccttattttgccgatcaaaatggtttctttgacccttacttggctgctccaaacttcccacagcaaaataggttcttttttgagactactacacaaaagcagaagcatccagaagtgaatcttcatgaccggaggccaagcgatgatatttacccccatggccaagcttatatcggagccgagaaaatgacgcttaagaaaaacgctctttctgatccgcagctgcatgatgagagccaaatcaacaatgggttagaagcatttaccaaacaaccatggaaaatattgagaaagaatctacgtgttgtggctacatcaaagtgggaagatagtgatgatatctatttcaataatccagaaggcaagagatgcaaggagcttgaactcaccaaggaagttcctaatagttggatcaatcgcgataataatcccgattcttttgatcaggcaacaaagaaacaggatggtagtaacagtaatagctccttcagtccgaattatttcagtccgaatcatcaaccagctgctcagattacttcaagtgattcacaagattcaggaagctcagtgttctctttatcagttaacaccaacgaaaattatcttgattgttcgagggaaaaatttaatggtttccagcatgacatgtcactagatattctcatcagaagccacacttcagctacagatcaactatgtagtacaaccaagtcaagtgataaagcagattactcctcacccaatacaaatttccccgtggtatttctgagacaggaacctatgattccgagacatgatttggagacaaatagcgatgattcagatactcaaaaatctcttcctagagaagagagtattcactatagtggattgccacttaggaaggtgggaagtagagaaactacttttatgcacacgcaggggtcagatgatttcttcaaaagcaagctgcttggtccacagttgatagttgaggatgtgacgaacgaagtaatttcagataatctcttatcagctactattgtccctcaagtaaatagggagtccgatgatgatcacaaatcctacacaagggagaaagagattacaaatgcggatcatgaatcagaaatggaggaaaagtacaagaaaagcagaaacaccgatgattcattcagcgaagctgcaatggttgaaatcgaagctggaatatatggcttacagataattaaaaacactgatcttgaagacttacacgagcttggatctggtacatttggaactgtttactatgggaagtggagaggaactgatgttgctatcaagaggataaagaatagttgtttctctggtggatcatccgagcaagcacggcagactaaagatttctggagagaagctcggatattggcgaatcttcaccatcctaacgtagtggccttttatggagttgtaccagatggacctggtggaacaatggcaacagtgactgagtatatggtgaacggatctttgaggcatgtcttgcagagaaaagacagattacttgataggcgcaaaaaactgatgataactcttgattctgcatttggcatggagtatctacatatgaaaaatattgttcattttgatcttaaatgcgataacttgcttgtaaacttgagggatccacaacgacccatttgcaaggttggagatttcggattgtcgagaataaaacgaaacacgcttgtctctggtggagtaagaggaacccttccatggatggcaccagagctgctaaacggaagcagcaatcgggtctcagagaaagtcgatgttttctcatttggtatcgtgatgtgggagatcttgacaggcgaagaaccctatgcgaatctgcattgcggtgccatcattggtggaattgtgaacaatacgttaagacctccggtgcctgaacggtgtgaagctgagtggaggaagttgatggagcaatgctggtcattcgatccaggagtacggccatcgtttacggagattgttgaacgacttcgatcaatgactgttgccttgcaacccaagcgaagaacctaa

SEQ ID NO: 73958 - protein, 1040 aa, Arabidopsis thaliana; identical to SEQ ID NO: 73861
  peptide (1)..(1040): Ceres Seq. ID no. 4986523
  misc_feature (764)..(1027): Pfam Name: Protein kinase domain Pfam Description: Protein kinase domain
  misc_feature (650)..(1033): Homolog of NCBI NO: 15219417 NR Description: hypothetical protein; protein id: At1g79570.1
  misc_feature (120)..(270): Homolog of NCBI NO: 15219417 NR Description: hypothetical protein; protein id: At1g79570.1
  misc_feature (120)..(442): Homolog of NCBI NO: 15219183 NR Description: putative Ser/Thr protein kinase; protein id:
  misc_feature (724)..(1033): Homolog of NCBI NO: 15219183 NR Description: putative Ser/Thr protein kinase; protein id:
  misc_feature (689)..(1031): Homolog of NCBI NO: 15226883 NR Description: putative protein kinase; protein id: At2g35050.1
  misc_feature (80)..(273): Homolog of NCBI NO: 15226883 NR Description: putative protein kinase; protein id: At2g35050.1
  misc_feature (715)..(1037): Homolog of NCBI NO: 15242791 NR Description: putative protein; protein id: At5g57610.1 thaliana] >gi|9758322|dbj|BAB08796.1| contains similarity to
  misc_feature (117)..(262): Homolog of NCBI NO: 15242791 NR Description: putative protein; protein id: At5g57610.1 thaliana] >gi|9758322|dbj|BAB08796.1| contains similarity to
  misc_feature (708)..(1039): Homolog of NCBI NO: 15232679 NR Description: protein kinase - like protein; protein id:
  misc_feature (69)..(273): Homolog of NCBI NO: 15232679 NR Description: protein kinase - like protein; protein id:

SEQ ID NO: 73959 - protein, 958 aa, Arabidopsis thaliana; identical to SEQ ID NO: 73862
  peptide (1)..(958): Ceres Seq. ID no. 4986524
  misc_feature (682)..(945): Pfam Name: Protein kinase domain Pfam Description: Protein kinase domain
  misc_feature (568)..(951): Homolog of NCBI NO: 15219417 NR Description: hypothetical protein; protein id: At1g79570.1
  misc_feature (38)..(188): Homolog of NCBI NO: 15219417 NR Description: hypothetical protein; protein id: At1g79570.1
  misc_feature (38)..(360): Homolog of NCBI NO: 15219183 NR Description: putative Ser/Thr protein kinase; protein id:
  misc_feature (642)..(951): Homolog of NCBI NO: 15219183 NR Description: putative Ser/Thr protein kinase; protein id:
  misc_feature (607)..(949): Homolog of NCBI NO: 15226883 NR Description: putative protein kinase; protein id: At2g35050.1
  misc_feature (1)..(191): Homolog of NCBI NO: 15226883 NR Description: putative protein kinase; protein id: At2g35050.1
  misc_feature (633)..(955): Homolog of NCBI NO: 15242791 NR Description: putative protein; protein id: At5g57610.1 thaliana] >gi|9758322|dbj|BAB08796.1| contains similarity to
  misc_feature (35)..(180): Homolog of NCBI NO: 15242791 NR Description: putative protein; protein id: At5g57610.1 thaliana] >gi|9758322|dbj|BAB08796.1| contains similarity to
  misc_feature (626)..(957): Homolog of NCBI NO: 15232679 NR Description: protein kinase - like protein; protein id:
  misc_feature (1)..(191): Homolog of NCBI NO: 15232679 NR Description: protein kinase - like protein; protein id:

SEQ ID NO: 73960 - protein, 935 aa, Arabidopsis thaliana
  peptide (1)..(935): Ceres Seq. ID no. 4986525
  misc_feature (659)..(922): Pfam Name: Protein kinase domain Pfam Description: Protein kinase domain
  misc_feature (545)..(928): Homolog of NCBI NO: 15219417 NR Description: hypothetical protein; protein id: At1g79570.1
  misc_feature (15)..(165): Homolog of NCBI NO: 15219417 NR Description: hypothetical protein; protein id: At1g79570.1
  misc_feature (15)..(337): Homolog of NCBI NO: 15219183 NR Description: putative Ser/Thr protein kinase; protein id:
  misc_feature (619)..(928): Homolog of NCBI NO: 15219183 NR Description: putative Ser/Thr protein kinase; protein id:
  misc_feature (584)..(926): Homolog of NCBI NO: 15226883 NR Description: putative protein kinase; protein id: At2g35050.1
  misc_feature (1)..(168): Homolog of NCBI NO: 15226883 NR Description: putative protein kinase; protein id: At2g35050.1
  misc_feature (610)..(932): Homolog of NCBI NO: 15242791 NR Description: putative protein; protein id: At5g57610.1 thaliana] >gi|9758322|dbj|BAB08796.1| contains similarity to
  misc_feature (12)..(157): Homolog of NCBI NO: 15242791 NR Description: putative protein; protein id: At5g57610.1 thaliana] >gi|9758322|dbj|BAB08796.1| contains similarity to
  misc_feature (603)..(934): Homolog of NCBI NO: 15232679 NR Description: protein kinase - like protein; protein id:
  misc_feature (1)..(168): Homolog of NCBI NO: 15232679 NR Description: protein kinase - like protein; protein id:
MFQTAISDVYLPEVLKLLCSFGGRILQRPGDGKLRYIGGETRIISIRKHVGLNELMHKTYALCNHPHTIKYQLPGEDLDALISVCSDEDLLHMIEEYQEAETKAGSQRIRVFLVPSTESSESPKIFHERNMNINRNTNQQTDIDHYQYVSALNGIVDVSPQKSSSGQSGTSQTTQFGNASEFSPTFHLRDSPTSVHTWEHKDSNSPTFMKPYGNTNAVHFMPKMQIPRNSFGQQSPPTSPFSVHKRANTDVPYFADQNGFFDPYLAAPNFPQQNRFFFETTTQKQKHPEVNLHDRRPSDDIYPHGQAYIGAEKMTLKKNALSDPQLHDESQINNGLEAFTKQPWKILRKNLRVVATSKWEDSDDIYFNNPEGKRCKELELTKEVPNSWINRDNNPDSFDQATKKQDGSNSNSSFSPNYFSPNHQPAAQITSSDSQDSGSSVFSLSVNTNENYLDCSREKFNGFQHDMSLDILIRSHTSATDQLCSTTKSSDKADYSSPNTNFPVVFLRQEPMIPRHDLETNSDDSDTQKSLPREESIHYSGLPLRKVGSRETTFMHTQGSDDFFKSKLLGPQLIVEDVTNEVISDNLLSATIVPQVNRESDDDHKSYTREKEITNADHESEMEEKYKKSRNTDDSFSEAAMVEIEAGIYGLQIIKNTDLEDLHELGSGTFGTVYYGKWRGTDVAIKRIKNSCFSGGSSEQARQTKDFWREARILANLHHPNVVAFYGVVPDGPGGTMATVTEYMVNGSLRHVLQRKDRLLDRRKKLMITLDSAFGMEYLHMKNIVHFDLKCDNLLVNLRDPQRPICKVGDFGLSRIKRNTLVSGGVRGTLPWMAPELLNGSSNRVSEKVDVFSFGIVMWEILTGEEPYANLHCGAIIGGIVNNTLRPPVPERCEAEWRKLMEQCWSFDPGVRPSFTEIVERLRSMTVALQPKRRT

SEQ ID NO: 73961 - DNA, 1017 bp, Arabidopsis thaliana
  misc_feature (1)..(1017): Ceres Seq. ID no. 4986727
  misc_feature: MA Experiment ID: 20000180 Result: Down-regulated in Transcription
  misc_feature: MA Experiment 20000180 PARAMETER Experiment Name: At_Germinating_Seeds_P Parameter: Age (hr) Value: 24 vs. 0
  misc_feature: MA Experiment 20000180 PARAMETER Experiment Name: At_Germinating_Seeds_P Parameter: Tissue Value: Germinating Seeds
  misc_feature: MA Experiment ID: 20000184 Result: Down-regulated in Transcription
  misc_feature: MA Experiment 20000184 PARAMETER Experiment Name: At_Shoots__P Parameter: Age (day) Value: 7
  misc_feature: MA Experiment 20000184 PARAMETER Experiment Name: At_Shoots__P Parameter: Tissue Value: Shoots vs. Whole Plant
  misc_feature: MA Experiment ID: 20001247 Result: Down-regulated in Transcription
  misc_feature: MA Experiment 20001247 PARAMETER Experiment Name: At_Far-red-induction_P Parameter: Age (day) Value: 7
  misc_feature: MA Experiment 20001247 PARAMETER Experiment Name: At_Far-red-induction_P Parameter: Light Value: Far-red vs. White
  misc_feature: MA Experiment 20001247 PARAMETER Experiment Name: At_Far-red-induction_P Parameter: Organism Value: A. thaliana
  misc_feature: MA Experiment 20001247 PARAMETER Experiment Name: At_Far-red-induction_P Parameter: Plant Line Value: Columbia
  misc_feature: MA Experiment 20001247 PARAMETER Experiment Name: At_Far-red-induction_P Parameter: Timepoint (hr) Value: 1
  misc_feature: MA Experiment 20001247 PARAMETER Experiment Name: At_Far-red-induction_P Parameter: Tissue Value: Whole Plant
atgtatcttgttggtggaaacatgattgatgctcacaaagtgtttgatgaaatgcctgagagaaatccggtaacttggaatgtgatgatcactggccttactaatttgggagatttcgaaaaagctctttgctttttggagaagatgccgaatcggacggtagtgtcttggaccactatcattgatgggtatgcacgagtagataaacccaaggaagctatactcttgttttcaagaatggttgcttgcgacgcaataaagcccaacgagataaccattctcgccattctcccagctgtttggaacttgggagacttaaagatgtgcggatcagttcatgcttatgttgggaaaagagggtttgttccatgtgatatccgtgtgactaactctctcatcgacgcttatgcaaaatgtgggtgtattcaaagcgcgttcaagtttttcatagagattccaaacggaaggaagaatcttgtatcgtggacaacgatgatctcggcgtttgcaattcacggaatgggaaaagaagcggtcagtatgtttaaagacatggaaagattaggattgaagccgaacagagtgaccatgatcagtgttttgaacgcttgcagccatggaggtttagcagaagaagagtttctagagtttttcaacacgatggtaaacgagtacaagatcacgccggatgtgaagcactatggatgtctagtagatatgttgagaagaaaaggaagattagaagaagcagagaagattgctttggagattccaatagaagaaaaagctgtggtttggagaatgctgcttggagcttgtagcgtttatgatgatgctgaattggctgagagggttactagaaagctaatggagctagagagaagccatggaggagactatgtgcttatgtccaacatcttttgtggtactggaagatttttagatgcgcagagatttcggaaacagatggatgttagaggagtagctaaacttccaggacattcacaagtaacatag

SEQ ID NO: 73962 - protein, 338 aa, Arabidopsis thaliana
  peptide (1)..(338): Ceres Seq. ID no. 4986728
  misc_feature (55)..(89): Pfam Name: PPR repeat Pfam Description: PPR repeat
  misc_feature (1)..(338): Homolog of NCBI NO: 15217460 NR Description: hypothetical protein; protein id: At1g09220.1
  misc_feature (1)..(338): Homolog of NCBI NO: 25402526 NR Description: protein T12M4.7 [imported] - Arabidopsis thaliana
  misc_feature (1)..(337): Homolog of NCBI NO: 15241180 NR Description: putative protein; protein id: At5g56310.1 thaliana] >gi|10177829|dbj|BAB11258.1|
  misc_feature (1)..(337): Homolog of NCBI NO: 15225375 NR Description: unknown protein; protein id: At2g20540.1
  misc_feature (2)..(337): Homolog of NCBI NO: 34902972 NR Description: unnamed protein product [Oryza sativa (japonica group)] >gi|9558518|dbj|BAB03436.1| unnamed protein product
  misc_feature (2)..(338): Homolog of NCBI NO: 15239979 NR Description: selenium-binding protein-like; protein id:
  misc_feature (2)..(337): Homolog of NCBI NO: 9958072 NR Description: Hypothetical protein [Arabidopsis thaliana]
  misc_feature (2)..(337): Homolog of NCBI NO: 15222280 NR Description: hypothetical protein; protein id: At1g13410.1
  misc_feature (6)..(335): Homolog of NCBI NO: 15241651 NR Description: putative protein; protein id: At5g08510.1 thaliana] >gi|9759345|dbj|BAB10000.1|
  misc_feature (11)..(337): Homolog of NCBI NO: 37534772 NR Description: putative selenium-binding protein [Oryza sativa
MYLVGGNMIDAHKVFDEMPERNPVTWNVMITGLTNLGDFEKALCFLEKMPNRTVVSWTTIIDGYARVDKPKEAILLFSRMVACDAIKPNEITILAILPAVWNLGDLKMCGSVHAYVGKRGFVPCDIRVTNSLIDAYAKCGCIQSAFKFFIEIPNGRKNLVSWTTMISAFAIHGMGKEAVSMFKDMERLGLKPNRVTMISVLNACSHGGLAEEEFLEFFNTMVNEYKITPDVKHYGCLVDMLRRKGRLEEAEKIALEIPIEEKAVVWRMLLGACSVYDDAELAERVTRKLMELERSHGGDYVLMSNIFCGTGRFLDAQRFRKQMDVRGVAKLPGHSQVT

SEQ ID NO: 73963 - protein, 331 aa, Arabidopsis thaliana
  peptide (1)..(331): Ceres Seq. ID no. 4986729
  misc_feature (48)..(82): Pfam Name: PPR repeat Pfam Description: PPR repeat
  misc_feature (1)..(331): Homolog of NCBI NO: 15217460 NR Description: hypothetical protein; protein id: At1g09220.1
  misc_feature (1)..(331): Homolog of NCBI NO: 25402526 NR Description: protein T12M4.7 [imported] - Arabidopsis thaliana
  misc_feature (1)..(330): Homolog of NCBI NO: 15241180 NR Description: putative protein; protein id: At5g56310.1 thaliana] >gi|10177829|dbj|BAB11258.1|
  misc_feature (1)..(330): Homolog of NCBI NO: 15225375 NR Description: unknown protein; protein id: At2g20540.1
  misc_feature (1)..(330): Homolog of NCBI NO: 34902972 NR Description: unnamed protein product [Oryza sativa (japonica group)] >gi|9558518|dbj|BAB03436.1| unnamed protein product
  misc_feature (1)..(331): Homolog of NCBI NO: 15239979 NR Description: selenium-binding protein-like; protein id:
  misc_feature (1)..(330): Homolog of NCBI NO: 9958072 NR Description: Hypothetical protein [Arabidopsis thaliana]
  misc_feature (1)..(330): Homolog of NCBI NO: 15222280 NR Description: hypothetical protein; protein id: At1g13410.1
  misc_feature (1)..(328): Homolog of NCBI NO: 15241651 NR Description: putative protein; protein id: At5g08510.1 thaliana] >gi|9759345|dbj|BAB10000.1|
  misc_feature (4)..(330): Homolog of NCBI NO: 37534772 NR Description: putative selenium-binding protein [Oryza sativa
MIDAHKVFDEMPERNPVTWNVMITGLTNLGDFEKALCFLEKMPNRTVVSWTTIIDGYARVDKPKEAILLFSRMVACDAIKPNEITILAILPAVWNLGDLKMCGSVHAYVGKRGFVPCDIRVTNSLIDAYAKCGCIQSAFKFFIEIPNGRKNLVSWTTMISAFAIHGMGKEAVSMFKDMERLGLKPNRVTMISVLNACSHGGLAEEEFLEFFNTMVNEYKITPDVKHYGCLVDMLRRKGRLEEAEKIALEIPIEEKAVVWRMLLGACSVYDDAELAERVTRKLMELERSHGGDYVLMSNIFCGTGRFLDAQRFRKQMDVRGVAKLPGHSQVT

SEQ ID NO: 73964 - protein, 321 aa, Arabidopsis thaliana
  peptide (1)..(321): Ceres Seq. ID no. 4986730
  misc_feature (38)..(72): Pfam Name: PPR repeat Pfam Description: PPR repeat
  misc_feature (1)..(321): Homolog of NCBI NO: 15217460 NR Description: hypothetical protein; protein id: At1g09220.1
  misc_feature (1)..(321): Homolog of NCBI NO: 25402526 NR Description: protein T12M4.7 [imported] - Arabidopsis thaliana
  misc_feature (1)..(320): Homolog of NCBI NO: 15241180 NR Description: putative protein; protein id: At5g56310.1 thaliana] >gi|10177829|dbj|BAB11258.1|
  misc_feature (1)..(320): Homolog of NCBI NO: 15225375 NR Description: unknown protein; protein id: At2g20540.1
  misc_feature (1)..(320): Homolog of NCBI NO: 34902972 NR Description: unnamed protein product [Oryza sativa (japonica group)] >gi|9558518|dbj|BAB03436.1| unnamed protein product
  misc_feature (1)..(321): Homolog of NCBI NO: 15239979 NR Description: selenium-binding protein-like; protein id:
  misc_feature (1)..(320): Homolog of NCBI NO: 9958072 NR Description: Hypothetical protein [Arabidopsis thaliana]
  misc_feature (1)..(320): Homolog of NCBI NO: 15222280 NR Description: hypothetical protein; protein id: At1g13410.1
  misc_feature (1)..(318): Homolog of NCBI NO: 15241651 NR Description: putative protein; protein id: At5g08510.1 thaliana] >gi|9759345|dbj|BAB10000.1|
  misc_feature (1)..(320): Homolog of NCBI NO: 37534772 NR Description: putative selenium-binding protein [Oryza sativa
MPERNPVTWNVMITGLTNLGDFEKALCFLEKMPNRTVVSWTTIIDGYARVDKPKEAILLFSRMVACDAIKPNEITILAILPAVWNLGDLKMCGSVHAYVGKRGFVPCDIRVTNSLIDAYAKCGCIQSAFKFFIEIPNGRKNLVSWTTMISAFAIHGMGKEAVSMFKDMERLGLKPNRVTMISVLNACSHGGLAEEEFLEFFNTMVNEYKITPDVKHYGCLVDMLRRKGRLEEAEKIALEIPIEEKAVVWRMLLGACSVYDDAELAERVTRKLMELERSHGGDYVLMSNIFCGTGRFLDAQRFRKQMDVRGVAKLPGHSQVT

SEQ ID NO: 73965 - DNA, 684 bp, Arabidopsis thaliana
  misc_feature (1)..(684): Ceres Seq. ID no. 4986868
  misc_feature: MA Experiment ID: 20000180 Result: Down-regulated in Transcription
  misc_feature: MA Experiment 20000180 PARAMETER Experiment Name: At_Germinating_Seeds_P Parameter: Age (hr) Value: 24 vs. 0
  misc_feature: MA Experiment 20000180 PARAMETER Experiment Name: At_Germinating_Seeds_P Parameter: Tissue Value: Germinating Seeds
  misc_feature: MA Experiment ID: 20000184 Result: Down-regulated in Transcription
  misc_feature: MA Experiment 20000184 PARAMETER Experiment Name: At_Shoots__P Parameter: Age (day) Value: 7
  misc_feature: MA Experiment 20000184 PARAMETER Experiment Name: At_Shoots__P Parameter: Tissue Value: Shoots vs. Whole Plant
  misc_feature: MA Experiment ID: 20000234 Result: Down-regulated in Transcription
  misc_feature: MA Experiment 20000234 PARAMETER Experiment Name: At_Siliques_P Parameter: Age (day) Value: 21
  misc_feature: MA Experiment 20000234 PARAMETER Experiment Name: At_Siliques_P Parameter: Organism Value: A. thaliana
  misc_feature: MA Experiment 20000234 PARAMETER Experiment Name: At_Siliques_P Parameter: Plant Line Value: WS
  misc_feature: MA Experiment 20000234 PARAMETER Experiment Name: At_Siliques_P Parameter: Tissue Value: Less Than 5mm Siliques vs. Whole Plant
  misc_feature: MA Experiment ID: 20000264 Result: Down-regulated in Transcription
  misc_feature: MA Experiment 20000264 PARAMETER Experiment Name: At_Open_Flower_P Parameter: Age (day) Value: 21
  misc_feature: MA Experiment 20000264 PARAMETER Experiment Name: At_Open_Flower_P Parameter: Plant Line Value: WS
  misc_feature: MA Experiment 20000264 PARAMETER Experiment Name: At_Open_Flower_P Parameter: Tissue Value: Open Flower vs. Whole Plant
  misc_feature: MA Experiment ID: 20000265 Result: Down-regulated in Transcription
  misc_feature: MA Experiment 20000265 PARAMETER Experiment Name: At_Open_Flower_P Parameter: Age (day) Value: 21
  misc_feature: MA Experiment 20000265 PARAMETER Experiment Name: At_Open_Flower_P Parameter: Plant Line Value: WS
  misc_feature: MA Experiment 20000265 PARAMETER Experiment Name: At_Open_Flower_P Parameter: Tissue Value: Closed Flower vs. Whole Plant
  misc_feature: MA Experiment ID: 20001248 Result: Up-regulated in Transcription
  misc_feature: MA Experiment 20001248 PARAMETER Experiment Name: At_Far-red-induction_P Parameter: Age (day) Value: 7
  misc_feature: MA Experiment 20001248 PARAMETER Experiment Name: At_Far-red-induction_P Parameter: Light Value: Far-red vs. White
  misc_feature: MA Experiment 20001248 PARAMETER Experiment Name: At_Far-red-induction_P Parameter: Organism Value: A. thaliana
  misc_feature: MA Experiment 20001248 PARAMETER Experiment Name: At_Far-red-induction_P Parameter: Plant Line Value: Columbia
  misc_feature: MA Experiment 20001248 PARAMETER Experiment Name: At_Far-red-induction_P Parameter: Timepoint (hr) Value: 4
  misc_feature: MA Experiment 20001248 PARAMETER Experiment Name: At_Far-red-induction_P Parameter: Tissue Value: Whole Plant
  misc_feature: MA Experiment ID: 20001904 Result: Down-regulated in Transcription
  misc_feature: MA Experiment 20001904 PARAMETER Experiment Name: At_Drought_Reproduction_P Parameter: Age (day) Value: 37
  misc_feature: MA Experiment 20001904 PARAMETER Experiment Name: At_Drought_Reproduction_P Parameter: Organism Value: A. thaliana
  misc_feature: MA Experiment 20001904 PARAMETER Experiment Name: At_Drought_Reproduction_P Parameter: Plant Line Value: WS
  misc_feature: MA Experiment 20001904 PARAMETER Experiment Name: At_Drought_Reproduction_P Parameter: Timepoint (day) Value: 7
  misc_feature: MA Experiment 20001904 PARAMETER Experiment Name: At_Drought_Reproduction_P Parameter: Tissue Value: Rosettes
  misc_feature: MA Experiment 20001904 PARAMETER Experiment Name: At_Drought_Reproduction_P Parameter: Treatment Value: Drought vs. No Drought
  misc_feature: MA Experiment ID: 20001905 Result: Down-regulated in Transcription
  misc_feature: MA Experiment 20001905 PARAMETER Experiment Name: At_Drought_Reproduction_P Parameter: Age (day) Value: 40
  misc_feature: MA Experiment 20001905 PARAMETER Experiment Name: At_Drought_Reproduction_P Parameter: Organism Value: A. thaliana
  misc_feature: MA Experiment 20001905 PARAMETER Experiment Name: At_Drought_Reproduction_P Parameter: Plant Line Value: WS
  misc_feature: MA Experiment 20001905 PARAMETER Experiment Name: At_Drought_Reproduction_P Parameter: Timepoint (day) Value: 10
  misc_feature: MA Experiment 20001905 PARAMETER Experiment Name: At_Drought_Reproduction_P Parameter: Tissue Value: Rosettes
  misc_feature: MA Experiment 20001905 PARAMETER Experiment Name: At_Drought_Reproduction_P Parameter: Treatment Value: Drought vs. No Drought
atggcgatcgaggatcaagagaacacaatccgtgaaatcaaacctaagaacagaagaatcatgggagctggtggtccggaggaagaggagaaccggtggccgccatggttgaaacctttgcttaaagagcaattctttgttcattgcaagtttcatggagactctcataagagtgaatgcaatatgtattgcttagactgcaccaatggcccactttgctctctttgtcttgctcatcacaaggatcatcgcaccattcagataaggagatcttcttatcatgatgttataagggtgaatgagatacaaaagtatcttgatataggtgggatccaaacctatgtgatcaatagtgctaaagtcgtcttcctgaatgagaggcctcagcctaggcctgggaaaggagtgaccaatacctgcaaggtttgctatcgtagcctcgttgatgatagcttccgcttctgctctcttggctgcaagattgctggaacatcaagaggctttgaaaagggaagggagaacctgctaatggaaacagaggattcaagtagcagcattgcaattgggaagaacattacaaatctccagagtttcagcccatcaacacctccacttactacatctagtaactgcagaatcgtcaagcgaagaaagggaattcctcaccgatctccaatgggataa

SEQ ID NO: 73966 - protein, 227 aa, Arabidopsis thaliana; identical to SEQ ID NO: 28831
  peptide (1)..(227): Ceres Seq. ID no. 4986869
  misc_feature (31)..(165): Pfam Name: Protein of unknown function, DUF597 Pfam Description: Protein of unknown function, DUF597
  misc_feature (1)..(165): Homolog of NCBI NO: 15236696 NR Description: putative protein; protein id: At4g17900.1
  misc_feature (1)..(227): Homolog of NCBI NO: 6714272 NR Description: F6N18.8 [Arabidopsis thaliana]
  misc_feature (25)..(227): Homolog of NCBI NO: 18398555 NR Description: expressed protein; protein id: At1g32700.1,
  misc_feature (25)..(227): Homolog of NCBI NO: 21554139 NR Description: unknown [Arabidopsis thaliana]
  misc_feature (1)..(225): Homolog of NCBI NO: 15237491 NR Description: putative protein; protein id: At5g46710.1, by cDNA: 42747. [Arabidopsis thaliana] gene_id:MZA15.12~pir||T05076~similar to unknown protein
  misc_feature (17)..(227): Homolog of NCBI NO: 38346725 NR Description: OSJNBa0086O06.23 [Oryza sativa (japonica
  misc_feature (1)..(227): Homolog of NCBI NO: 37537092 NR Description: unknown protein [Oryza sativa (japonica
  misc_feature (27)..(167): Homolog of NCBI NO: 18394936 NR Description: expressed protein; protein id: At1g21000.1, by cDNA: 119384., supported by cDNA: gi_14030626, supported by gi_16226406 [Arabidopsis thaliana]
  misc_feature (27)..(167): Homolog of NCBI NO: 25337907 NR Description: hypothetical protein F9H16.1 - Arabidopsis >gi|4836888|gb|AAD30591.1|AC007369_1 Unknown protein [Arabidopsis >gi|13877713|gb|AAK43934.1|AF370615_1 Unknown protein
  misc_feature (27)..(167): Homolog of NCBI NO: 21537073 NR Description: unknown [Arabidopsis thaliana]

SEQ ID NO: 73967 - protein, 207 aa, Arabidopsis thaliana; identical to SEQ ID NO: 28832
  peptide (1)..(207): Ceres Seq. ID no. 4986870
  misc_feature (11)..(145): Pfam Name: Protein of unknown function, DUF597 Pfam Description: Protein of unknown function, DUF597
  misc_feature (1)..(145): Homolog of NCBI NO: 15236696 NR Description: putative protein; protein id: At4g17900.1
  misc_feature (1)..(207): Homolog of NCBI NO: 6714272 NR Description: F6N18.8 [Arabidopsis thaliana]
  misc_feature (5)..(207): Homolog of NCBI NO: 18398555 NR Description: expressed protein; protein id: At1g32700.1,
  misc_feature (5)..(207): Homolog of NCBI NO: 21554139 NR Description: unknown [Arabidopsis thaliana]
  misc_feature (1)..(205): Homolog of NCBI NO: 15237491 NR Description: putative protein; protein id: At5g46710.1, by cDNA: 42747. [Arabidopsis thaliana] gene_id:MZA15.12~pir||T05076~similar to unknown protein
  misc_feature (1)..(207): Homolog of NCBI NO: 38346725 NR Description: OSJNBa0086O06.23 [Oryza sativa (japonica
  misc_feature (1)..(207): Homolog of NCBI NO: 37537092 NR Description: unknown protein [Oryza sativa (japonica
  misc_feature (7)..(147): Homolog of NCBI NO: 18394936 NR Description: expressed protein; protein id: At1g21000.1, by cDNA: 119384., supported by cDNA: gi_14030626, supported by gi_16226406 [Arabidopsis thaliana]
  misc_feature (7)..(147): Homolog of NCBI NO: 25337907 NR Description: hypothetical protein F9H16.1 - Arabidopsis >gi|4836888|gb|AAD30591.1|AC007369_1 Unknown protein [Arabidopsis >gi|13877713|gb|AAK43934.1|AF370615_1 Unknown protein
  misc_feature (7)..(147): Homolog of NCBI NO: 21537073 NR Description: unknown [Arabidopsis thaliana]

SEQ ID NO: 73968 - protein, 166 aa, Arabidopsis thaliana; identical to SEQ ID NO: 28833
  peptide (1)..(166): Ceres Seq. ID no. 4986871
  misc_feature (1)..(104): Pfam Name: Protein of unknown function, DUF597 Pfam Description: Protein of unknown function, DUF597
  misc_feature (1)..(104): Homolog of NCBI NO: 15236696 NR Description: putative protein; protein id: At4g17900.1
  misc_feature (1)..(166): Homolog of NCBI NO: 6714272 NR Description: F6N18.8 [Arabidopsis thaliana]
  misc_feature (1)..(166): Homolog of NCBI NO: 18398555 NR Description: expressed protein; protein id: At1g32700.1,
  misc_feature (1)..(166): Homolog of NCBI NO: 21554139 NR Description: unknown [Arabidopsis thaliana]
  misc_feature (1)..(164): Homolog of NCBI NO: 15237491 NR Description: putative protein; protein id: At5g46710.1, by cDNA: 42747. [Arabidopsis thaliana] gene_id:MZA15.12~pir||T05076~similar to unknown protein
  misc_feature (1)..(166): Homolog of NCBI NO: 38346725 NR Description: OSJNBa0086O06.23 [Oryza sativa (japonica
  misc_feature (1)..(166): Homolog of NCBI NO: 37537092 NR Description: unknown protein [Oryza sativa (japonica
  misc_feature (1)..(106): Homolog of NCBI NO: 18394936 NR Description: expressed protein; protein id: At1g21000.1, by cDNA: 119384., supported by cDNA: gi_14030626, supported by gi_16226406 [Arabidopsis thaliana]
  misc_feature (1)..(106): Homolog of NCBI NO: 25337907 NR Description: hypothetical protein F9H16.1 - Arabidopsis >gi|4836888|gb|AAD30591.1|AC007369_1 Unknown protein [Arabidopsis >gi|13877713|gb|AAK43934.1|AF370615_1 Unknown protein
  misc_feature (1)..(106): Homolog of NCBI NO: 21537073 NR Description: unknown [Arabidopsis thaliana]

SEQ ID NO: 73969 - DNA, 1758 bp, Arabidopsis thaliana
  misc_feature (1)..(1758): Ceres Seq. ID no. 4987023
  misc_feature: MA Experiment ID: 108573 Result: Down-regulated in Transcription
  misc_feature: MA Experiment 108573 PARAMETER Experiment Name: At_Drought_cDNA_P Parameter: Timepoint (hr) Value: 6
  misc_feature: MA Experiment 108573 PARAMETER Experiment Name: At_Drought_cDNA_P Parameter: Tissue Value: Aerial
  misc_feature: MA Experiment 108573 PARAMETER Experiment Name: At_Drought_cDNA_P Parameter: Treatment Value: Drought vs. No Drought
atggaggaagctcaccagctggagtcgagatccgatgacctaagtcaacggagaagctactggagatggaggaagcaggattttttcccggaattctcttttcagagcttctctacctacaaatcagctctctccgccacttgtccacgcctcgccgatcgtcttctctctcgctcttccgatgcgtacgagctcgatgcagcccgccgcgaaagcgagaaccctatgcgtcgttgtctcacttggtgggacttgctctggcttagctttggttctgttgttggttcgggtgtgttcgtgatcacgggtcaggaggctcgagttggagctggtcctgctgttgttctctcctacgctatctctggtgtctctgcattgctctcagttctctgttatgctgagtttggagttgagattcctgtcgctggaggttctttctcttatcttagggttgaattgggggattttattgcctttattgctgctgggaatattcttcttgaggctatggttggtgctgctggattagggaggtcatggtcttcgtatctagctagtttggtcaagaatgattctgattattttcggattaaagtcgattcctttgctaaagggtttgatcttttggatccggttgctgttgcagtgcttttagttgctaatggtattgccatgactggaacaaagaggacttcttggttgaatttgattacttccatggtcactgtttgtattattgtgtttatcgtcgttgtggggtttactcattcaaaaacctcaaatttggttccttttttcccttatggagcgaaaggtgtggtgcaatctgctgcagttgtctactggtcatacactggttttgatatggtggctaacatggctgaagaaaccgagaaaccttccagagatattccaattggtttggttggttcgatgtctatgatcactgtggtttactgtttgatggctctggccttgactatgatggtgaaatacactgaaattgatgcgaatgcagcttattctgttgcttttgctcagattgggatgaaatgggcgaagtacttggttggtatatgcgctttaaagggaatgaccacaagcctgcttgttggctctctaggccaagctcggtacaccactcagattgctcggtctcatatgattcctccatggtttgctttggttcatccaaaaacaggaacccctatttatgctactctccttgtaaccatactcagttcaataatatccttcttcaccagcttagaggttttatcaagcgttttctcctttgctaccctcttcattttcatgctcgtggcagtagcattgcttgtgagacgttactacgtgaaggatgtcactcctgaggccggtttgttgaagtttcttggttttctgtttttgataattgcttcctccattggagtatcagcgctttggaactcaggcgttaaaggttggatcgcttacacagtgactggagttatttggtttataggcactttagggttggcattgcttccgaaatatcgtgttcctaaggtatggggagtcccactagttccgtggttgccatcgttttcaatcgccatgaatctattccttatcggatcactcggttatgtagcattcttgagattcattatctgcaccatggtgatgcttttgtactacctattcgttggtcttcatgcaacctatgatgtagctcatcagcctttggaggaagcaaagtttgagggagagagataa

SEQ ID NO: 73970 - protein, 585 aa, Arabidopsis thaliana; identical to SEQ ID NO: 41877
  peptide (1)..(585): Ceres Seq. ID no. 4987024
  misc_feature (1)..(585): Homolog of NCBI NO: 15220035 NR Description: putative amino acid transporter; protein id: supported by cDNA: gi_18176203 [Arabidopsis thaliana] amino acid transporter homolog [imported] similar to amino acid
  misc_feature (16)..(576): Homolog of NCBI NO: 15226868 NR Description: putative amino acid transporter; protein id: supported by cDNA: gi_19699364 [Arabidopsis thaliana]
  misc_feature (15)..(573): Homolog of NCBI NO: 34903850 NR Description: unnamed protein product [Oryza sativa (japonica group)] >gi|8096566|dbj|BAA96139.1| unnamed protein product
  misc_feature (12)..(578): Homolog of NCBI NO: 30685317 NR Description: amino acid transport protein AAT1 [Arabidopsis
  misc_feature (69)..(578): Homolog of NCBI NO: 1076291 NR Description: amino acid transport protein AAT1 - Arabidopsis >gi|2911069|emb|CAA17531.1| amino acid transport protein AAT1 thaliana] >gi|7268909|emb|CAB79112.1| amino acid transport
  misc_feature (126)..(576): Homolog of NCBI NO: 19699365 NR Description: At2g34960/F19I3.19 [Arabidopsis thaliana]
  misc_feature (22)..(570): Homolog of NCBI NO: 15228334 NR Description: putative amino acid transporter; protein id: [Arabidopsis thaliana] >gi|8567793|gb|AAF76365.1| amino acid putative [Arabidopsis thaliana]
  misc_feature (33)..(570): Homolog of NCBI NO: 15238312 NR Description: amino acid transport - like protein; protein id: supported by cDNA: 158156., supported by cDNA: gi_13430547, by cDNA: gi_14532753 [Arabidopsis thaliana]
  misc_feature (43)..(569): Homolog of NCBI NO: 38345948 NR Description: OSJNBb0103I08.20 [Oryza sativa (japonica
  misc_feature (73)..(450): Homolog of NCBI NO: 31211145 NR Description: ENSANGP00000016244 [Anopheles gambiae]

SEQ ID NO: 73971 - protein, 510 aa, Arabidopsis thaliana
  peptide (1)..(510): Ceres Seq. ID no. 4987025
  misc_feature (1)..(510): Homolog of NCBI NO: 15220035 NR Description: putative amino acid transporter; protein id: supported by cDNA: gi_18176203 [Arabidopsis thaliana] amino acid transporter homolog [imported] similar to amino acid
  misc_feature (1)..(501): Homolog of NCBI NO: 15226868 NR Description: putative amino acid transporter; protein id: supported by cDNA: gi_19699364 [Arabidopsis thaliana]
  misc_feature (1)..(498): Homolog of NCBI NO: 34903850 NR Description: unnamed protein product [Oryza sativa (japonica group)] >gi|8096566|dbj|BAA96139.1| unnamed protein product
  misc_feature (1)..(503): Homolog of NCBI NO: 30685317 NR Description: amino acid transport protein AAT1 [Arabidopsis
  misc_feature (1)..(503): Homolog of NCBI NO: 1076291 NR Description: amino acid transport protein AAT1 - Arabidopsis >gi|2911069|emb|CAA17531.1| amino acid transport protein AAT1 thaliana] >gi|7268909|emb|CAB79112.1| amino acid transport
  misc_feature (51)..(501): Homolog of NCBI NO: 19699365 NR Description: At2g34960/F19I3.19 [Arabidopsis thaliana]
  misc_feature (1)..(495): Homolog of NCBI NO: 15228334 NR Description: putative amino acid transporter; protein id: [Arabidopsis thaliana] >gi|8567793|gb|AAF76365.1| amino acid putative [Arabidopsis thaliana]
  misc_feature (1)..(495): Homolog of NCBI NO: 15238312 NR Description: amino acid transport - like protein; protein id: supported by cDNA: 158156., supported by cDNA: gi_13430547, by cDNA: gi_14532753 [Arabidopsis thaliana]
  misc_feature (1)..(494): Homolog of NCBI NO: 38345948 NR Description: OSJNBb0103I08.20 [Oryza sativa (japonica
  misc_feature (1)..(375): Homolog of NCBI NO: 31211145 NR Description: ENSANGP00000016244 [Anopheles gambiae]
MRRCLTWWDLLWLSFGSVVGSGVFVITGQEARVGAGPAVVLSYAISGVSALLSVLCYAEFGVEIPVAGGSFSYLRVELGDFIAFIAAGNILLEAMVGAAGLGRSWSSYLASLVKNDSDYFRIKVDSFAKGFDLLDPVAVAVLLVANGIAMTGTKRTSWLNLITSMVTVCIIVFIVVVGFTHSKTSNLVPFFPYGAKGVVQSAAVVYWSYTGFDMVANMAEETEKPSRDIPIGLVGSMSMITVVYCLMALALTMMVKYTEIDANAAYSVAFAQIGMKWAKYLVGICALKGMTTSLLVGSLGQARYTTQIARSHMIPPWFALVHPKTGTPIYATLLVTILSSIISFFTSLEVLSSVFSFATLFIFMLVAVALLVRRYYVKDVTPEAGLLKFLGFLFLIIASSIGVSALWNSGVKGWIAYTVTGVIWFIGTLGLALLPKYRVPKVWGVPLVPWLPSFSIAMNLFLIGSLGYVAFLRFIICTMVMLLYYLFVGLHATYDVAHQPLEEAKFEGER

SEQ ID NO: 73972 - protein, 416 aa, Arabidopsis thaliana
  peptide (1)..(416): Ceres Seq. ID no. 4987026
  misc_feature (1)..(416): Homolog of NCBI NO: 15220035 NR Description: putative amino acid transporter; protein id: supported by cDNA: gi_18176203 [Arabidopsis thaliana] amino acid transporter homolog [imported] similar to amino acid
  misc_feature (1)..(407): Homolog of NCBI NO: 15226868 NR Description: putative amino acid transporter; protein id: supported by cDNA: gi_19699364 [Arabidopsis thaliana]
  misc_feature (1)..(404): Homolog of NCBI NO: 34903850 NR Description: unnamed protein product [Oryza sativa (japonica group)] >gi|8096566|dbj|BAA96139.1| unnamed protein product
  misc_feature (1)..(409): Homolog of NCBI NO: 30685317 NR Description: amino acid transport protein AAT1 [Arabidopsis
  misc_feature (1)..(409): Homolog of NCBI NO: 1076291 NR Description: amino acid transport protein AAT1 - Arabidopsis >gi|2911069|emb|CAA17531.1| amino acid transport protein AAT1 thaliana] >gi|7268909|emb|CAB79112.1| amino acid transport
  misc_feature (1)..(407): Homolog of NCBI NO: 19699365 NR Description: At2g34960/F19I3.19 [Arabidopsis thaliana]
  misc_feature (1)..(401): Homolog of NCBI NO: 15228334 NR Description: putative amino acid transporter; protein id: [Arabidopsis thaliana] >gi|8567793|gb|AAF76365.1| amino acid putative [Arabidopsis thaliana]
  misc_feature (1)..(401): Homolog of NCBI NO: 15238312 NR Description: amino acid transport - like protein; protein id: supported by cDNA: 158156., supported by cDNA: gi_13430547, by cDNA: gi_14532753 [Arabidopsis thaliana]
  misc_feature (1)..(400): Homolog of NCBI NO: 38345948 NR Description: OSJNBb0103I08.20 [Oryza sativa (japonica
  misc_feature (1)..(281): Homolog of NCBI NO: 31211145 NR Description: ENSANGP00000016244 [Anopheles gambiae]
MVGAAGLGRSWSSYLASLVKNDSDYFRIKVDSFAKGFDLLDPVAVAVLLVANGIAMTGTKRTSWLNLITSMVTVCIIVFIVVVGFTHSKTSNLVPFFPYGAKGVVQSAAVVYWSYTGFDMVANMAEETEKPSRDIPIGLVGSMSMITVVYCLMALALTMMVKYTEIDANAAYSVAFAQIGMKWAKYLVGICALKGMTTSLLVGSLGQARYTTQIARSHMIPPWFALVHPKTGTPIYATLLVTILSSIISFFTSLEVLSSVFSFATLFIFMLVAVALLVRRYYVKDVTPEAGLLKFLGFLFLIIASSIGVSALWNSGVKGWIAYTVTGVIWFIGTLGLALLPKYRVPKVWGVPLVPWLPSFSIAMNLFLIGSLGYVAFLRFIICTMVMLLYYLFVGLHATYDVAHQPLEEAKFEGER

SEQ ID NO: 73973 - DNA, 2253 bp, Arabidopsis thaliana
  misc_feature (1)..(2253): Ceres Seq. ID no. 4987027
  misc_feature: MA Experiment ID: 20000173 Result: Down-regulated in Transcription
  misc_feature: MA Experiment 20000173 PARAMETER Experiment Name: At_42deg_Heat_P Parameter: Age (day) Value: 14
  misc_feature: MA Experiment 20000173 PARAMETER Experiment Name: At_42deg_Heat_P Parameter: Organism Value: A. thaliana
  misc_feature: MA Experiment 20000173 PARAMETER Experiment Name: At_42deg_Heat_P Parameter: Plant Line Value: WS
  misc_feature: MA Experiment 20000173 PARAMETER Experiment Name: At_42deg_Heat_P Parameter: Temperature (deg C) Value: 42 vs. 22
  misc_feature: MA Experiment 20000173 PARAMETER Experiment Name: At_42deg_Heat_P Parameter: Timepoint (hr) Value: 6
  misc_feature: MA Experiment 20000173 PARAMETER Experiment Name: At_42deg_Heat_P Parameter: Tissue Value: Aerial
  misc_feature: MA Experiment ID: 20000180 Result: Up-regulated in Transcription
  misc_feature: MA Experiment 20000180 PARAMETER Experiment Name: At_Germinating_Seeds_P Parameter: Age (hr) Value: 24 vs. 0
  misc_feature: MA Experiment 20000180 PARAMETER Experiment Name: At_Germinating_Seeds_P Parameter: Tissue Value: Germinating Seeds
  misc_feature: MA Experiment ID: 20000264 Result: Down-regulated in Transcription
  misc_feature: MA Experiment 20000264 PARAMETER Experiment Name: At_Open_Flower_P Parameter: Age (day) Value: 21
  misc_feature: MA Experiment 20000264 PARAMETER Experiment Name: At_Open_Flower_P Parameter: Plant Line Value: WS
  misc_feature: MA Experiment 20000264 PARAMETER Experiment Name: At_Open_Flower_P Parameter: Tissue Value: Open Flower vs. Whole Plant
  misc_feature: MA Experiment ID: 20000452 Result: Up-regulated in Transcription
  misc_feature: MA Experiment 20000452 PARAMETER Experiment Name: At_CS6879_Shoots-Roots_P Parameter: Age (day) Value: 14
  misc_feature: MA Experiment 20000452 PARAMETER Experiment Name: At_CS6879_Shoots-Roots_P Parameter: Organism Value: A. thaliana
  misc_feature: MA Experiment 20000452 PARAMETER Experiment Name: At_CS6879_Shoots-Roots_P Parameter: Plant Line Value: CS6879 vs. WS
  misc_feature: MA Experiment 20000452 PARAMETER Experiment Name: At_CS6879_Shoots-Roots_P Parameter: Tissue Value: Shoots
  misc_feature: MA Experiment ID: 20000794 Result: Down-regulated in Transcription
  misc_feature: MA Experiment 20000794 PARAMETER Experiment Name: At_Petals_P Parameter: Age (day) Value: 23-25 days
  misc_feature: MA Experiment 20000794 PARAMETER Experiment Name: At_Petals_P Parameter: Plant Line Value: WS
  misc_feature: MA Experiment 20000794 PARAMETER Experiment Name: At_Petals_P Parameter: Tissue Value: Petals vs. Whole plant
  misc_feature: MA Experiment ID: 20001451 Result: Up-regulated in Transcription
  misc_feature: MA Experiment 20001451 PARAMETER Experiment Name: At_Far-red-induction_P Parameter: Age (day) Value: 7
  misc_feature: MA Experiment 20001451 PARAMETER Experiment Name: At_Far-red-induction_P Parameter: Light Value: Far-red vs. White
  misc_feature: MA Experiment 20001451 PARAMETER Experiment Name: At_Far-red-induction_P Parameter: Organism Value: A. thaliana
  misc_feature: MA Experiment 20001451 PARAMETER Experiment Name: At_Far-red-induction_P Parameter: Plant Line Value: Columbia
  misc_feature: MA Experiment 20001451 PARAMETER Experiment Name: At_Far-red-induction_P Parameter: Timepoint (hr) Value: 24
  misc_feature: MA Experiment 20001451 PARAMETER Experiment Name: At_Far-red-induction_P Parameter: Tissue Value: Whole Plant
atggcgccgtgcattgattttgtgttcatggcttttggtttgcttctcttgctcatcgccgtcacaacaagtcgcccaatcactcggccaaaagtattcgacgttcgaagttatggtgctaaaggtgacggtaaaatggataacaccaatgcgttcacaaatgcatggaaagatgcatgcagatggaatggaccaagcaaaatgtacataccactaggaacattctatcttggtggtgtaacgtttgtaggaccatgcgatggtaagatctcgtttgtcattgatggaactttgttggctcctccgaacaacgacgacattaaaaaggaaatatggataaacttccgctacatcaactatctcacggtcttcggggatggcaccctcgacggccaaggaaaaaagtcatggtcactaattgattgccagaaggacaataattgtcccaaactcgctataaatatggggttcgatttcgtaaaaaactcaagcatgaatgggataacatcactcaacagtaaagccggacacttcaatttcttatccgttgaccacttcagcatcactagagtcaacataatagctcccagcaatagtcccaacactgacggaatcaaaatagctttatcaagtaacatgcaaatctcaaacactcacatcagcaccggagacgattgtatcgcaatgctctctggaaacacaaattttgatatctataatgtcaagtgcggaccgggacatggaattagtattggaagcttaggaaaaaacaaagacgaaaagaatgttaatggtttaatggttagaaattcggtctttaccggtacgaccaacggtatacggatcaagacatgggaatcttcagcttcaacaatccgaattatcaatttagtgtatgagaatctacagatgataaatgttgaaaatcctatcggcattgatcaaaaatactgtccttacccgccatgcagcaatatgggagattctcacattcagatccgaaacgtgacactaaagaacatttggggaacatcaaagaataaagtggctgtgaaatttcaatgtagcaaaacctttccttgcaaagatgttcagttaattgacattaacttaactcaccatggagtcgacggtcctgcaagtgcgttgtgtgagaacgttgatggatctgctactgggaagatgcttcagatcagtactgtgaatcccaatccagctcaatctcgattttcccgccctcgatccctccgtgttctctcactctccgccgatccatcggcaaatcggaatcctaaatcagccgttgacgcacacgcgccgccactggtggttgtgggatctgcgaacgccgatatctatgtggagatcgagagattacccaaggaaggggaaacgatttcggccaagacagggcaaacgctcgccggaggaaaaggcgcgaatcaggcggcgtgtggagcgaagctaatgtatccgacttacttcgttggtcgtttgggagaggacgcgcacgggaagctaatagctgaggcgttgggcgatgatgggtgtggggttcacttggactacgtgagatctgtgaataatgagccgacgggacacgcggtggtgatgcttcagtcggacggtcagaattcgatcattatcgttggtggtgcaaatatgaaagcttggcctgagattatgagcgatgatgatcttgagattgtgaggaatgctggtattgtgcttctgcaaagggagatcccagattccatcaatattcaagttgctaaggctgtgaagaaagcaggtgttccagtcatccttgatgtgggaggaatggatacgcctataccaaatgagctattggattccattgatatcttgagccccaatgaaactgagctcagtcgcttgacaggaatgccaactgaaacttttgaacagattagccaagctgttgcaaagtgccataagttgggagttaagcaagttctagtaaaactcgggtccaaaggatctgcactattcatacaaggggaaaaaccaatccagcagtctatcataccggctgcacaagtggttgatactacaggagctggggatactttcactgcagcatttgcagtcgctatggtagagggcaagtcccatgaggaatgcttgagatttgctgctgcagctgcctctctttgtgtccaagtaaagggtgcaataccgagcatgcctgaccgaaaatctgttttgaagctccttaaatttagtatctaa

SEQ ID NO: 73974 - protein, 750 aa, Arabidopsis thaliana
  peptide (1)..(750): Ceres Seq. ID no. 4987028
  misc_feature (84)..(396): Pfam Name: Glycosyl hydrolases family 28 Pfam Description: Glycosyl hydrolases family 28
  misc_feature (1)..(396): Homolog of NCBI NO: 15220038 NR Description: polygalacturonase, putative; protein id:
  misc_feature (84)..(396): Homolog of NCBI NO: 25289347 NR Description: Similar to polygalacturonase [imported] - thaliana >gi|5734763|gb|AAD50028.1|AC007651_23 Similar to
  misc_feature (1)..(52): Homolog of NCBI NO: 25289347 NR Description: Similar to polygalacturonase [imported] - thaliana >gi|5734763|gb|AAD50028.1|AC007651_23 Similar to
  misc_feature (396)..(750): Homolog of NCBI NO: 15220039 NR Description: putative ribokinase; protein id: At1g17160.1
  misc_feature (396)..(750): Homolog of NCBI NO: 25518633 NR Description: hypothetical protein F20D23.14 - Arabidopsis >gi|5734752|gb|AAD50017.1|AC007651_12 Similar to ribokinase
  misc_feature (4)..(402): Homolog of NCBI NO: 15225765 NR Description: polygalacturonase, putative; protein id: [Arabidopsis thaliana] >gi|7435399|pir||T00995 probable
  misc_feature (9)..(396): Homolog of NCBI NO: 15218263 NR Description: polygalacturonase, putative; protein id: [Arabidopsis thaliana] >gi|25289350|pir||A96498 probable
  misc_feature (4)..(402): Homolog of NCBI NO: 15226527 NR Description: polygalacturonase, putative; protein id: [Arabidopsis thaliana] >gi|25289364|pir||B84529 probable
  misc_feature (4)..(395): Homolog of NCBI NO: 15226529 NR Description: polygalacturonase, putative; protein id: [Arabidopsis thaliana] >gi|25289365|pir||C84529 probable
  misc_feature (9)..(394): Homolog of NCBI NO: 15218265 NR Description: polygalacturonase, putative; protein id: [Arabidopsis thaliana] >gi|25289351|pir||B96498 probable
MAPCIDFVFMAFGLLLLLIAVTTSRPITRPKVFDVRSYGAKGDGKMDNTNAFTNAWKDACRWNGPSKMYIPLGTFYLGGVTFVGPCDGKISFVIDGTLLAPPNNDDIKKEIWINFRYINYLTVFGDGTLDGQGKKSWSLIDCQKDNNCPKLAINMGFDFVKNSSMNGITSLNSKAGHFNFLSVDHFSITRVNIIAPSNSPNTDGIKIALSSNMQISNTHISTGDDCIAMLSGNTNFDIYNVKCGPGHGISIGSLGKNKDEKNVNGLMVRNSVFTGTTNGIRIKTWESSASTIRIINLVYENLQMINVENPIGIDQKYCPYPPCSNMGDSHIQIRNVTLKNIWGTSKNKVAVKFQCSKTFPCKDVQLIDINLTHHGVDGPASALCENVDGSATGKMLQISTVNPNPAQSRFSRPRSLRVLSLSADPSANRNPKSAVDAHAPPLVVVGSANADIYVEIERLPKEGETISAKTGQTLAGGKGANQAACGAKLMYPTYFVGRLGEDAHGKLIAEALGDDGCGVHLDYVRSVNNEPTGHAVVMLQSDGQNSIIIVGGANMKAWPEIMSDDDLEIVRNAGIVLLQREIPDSINIQVAKAVKKAGVPVILDVGGMDTPIPNELLDSIDILSPNETELSRLTGMPTETFEQISQAVAKCHKLGVKQVLVKLGSKGSALFIQGEKPIQQSIIPAAQVVDTTGAGDTFTAAFAVAMVEGKSHEECLRFAAAAASLCVQVKGAIPSMPDRKSVLKLLKFSI

SEQ ID NO: 73975 - protein, 741 aa, Arabidopsis thaliana
  peptide (1)..(741): Ceres Seq. ID no. 4987029
  misc_feature (75)..(387): Pfam Name: Glycosyl hydrolases family 28 Pfam Description: Glycosyl hydrolases family 28
  misc_feature (1)..(387): Homolog of NCBI NO: 15220038 NR Description: polygalacturonase, putative; protein id:
  misc_feature (75)..(387): Homolog of NCBI NO: 25289347 NR Description: Similar to polygalacturonase [imported] - thaliana >gi|5734763|gb|AAD50028.1|AC007651_23 Similar to
  misc_feature (1)..(43): Homolog of NCBI NO: 25289347 NR Description: Similar to polygalacturonase [imported] - thaliana >gi|5734763|gb|AAD50028.1|AC007651_23 Similar to
  misc_feature (387)..(741): Homolog of NCBI NO: 15220039 NR Description: putative ribokinase; protein id: At1g17160.1
  misc_feature (387)..(741): Homolog of NCBI NO: 25518633 NR Description: hypothetical protein F20D23.14 - Arabidopsis >gi|5734752|gb|AAD50017.1|AC007651_12 Similar to ribokinase
  misc_feature (1)..(393): Homolog of NCBI NO: 15225765 NR Description: polygalacturonase, putative; protein id: [Arabidopsis thaliana] >gi|7435399|pir||T00995 probable
  misc_feature (1)..(387): Homolog of NCBI NO: 15218263 NR Description: polygalacturonase, putative; protein id: [Arabidopsis thaliana] >gi|25289350|pir||A96498 probable
  misc_feature (1)..(393): Homolog of NCBI NO: 15226527 NR Description: polygalacturonase, putative; protein id: [Arabidopsis thaliana] >gi|25289364|pir||B84529 probable
  misc_feature (1)..(386): Homolog of NCBI NO: 15226529 NR Description: polygalacturonase, putative; protein id: [Arabidopsis thaliana] >gi|25289365|pir||C84529 probable
  misc_feature (1)..(385): Homolog of NCBI NO: 15218265 NR Description: polygalacturonase, putative; protein id: [Arabidopsis thaliana] >gi|25289351|pir||B96498 probable
MAFGLLLLLIAVTTSRPITRPKVFDVRSYGAKGDGKMDNTNAFTNAWKDACRWNGPSKMYIPLGTFYLGGVTFVGPCDGKISFVIDGTLLAPPNNDDIKKEIWINFRYINYLTVFGDGTLDGQGKKSWSLIDCQKDNNCPKLAINMGFDFVKNSSMNGITSLNSKAGHFNFLSVDHFSITRVNIIAPSNSPNTDGIKIALSSNMQISNTHISTGDDCIAMLSGNTNFDIYNVKCGPGHGISIGSLGKNKDEKNVNGLMVRNSVFTGTTNGIRIKTWESSASTIRIINLVYENLQMINVENPIGIDQKYCPYPPCSNMGDSHIQIRNVTLKNIWGTSKNKVAVKFQCSKTFPCKDVQLIDINLTHHGVDGPASALCENVDGSATGKMLQISTVNPNPAQSRFSRPRSLRVLSLSADPSANRNPKSAVDAHAPPLVVVGSANADIYVEIERLPKEGETISAKTGQTLAGGKGANQAACGAKLMYPTYFVGRLGEDAHGKLIAEALGDDGCGVHLDYVRSVNNEPTGHAVVMLQSDGQNSIIIVGGANMKAWPEIMSDDDLEIVRNAGIVLLQREIPDSINIQVAKAVKKAGVPVILDVGGMDTPIPNELLDSIDILSPNETELSRLTGMPTETFEQISQAVAKCHKLGVKQVLVKLGSKGSALFIQGEKPIQQSIIPAAQVVDTTGAGDTFTAAFAVAMVEGKSHEECLRFAAAAASLCVQVKGAIPSMPDRKSVLKLLKFSI

SEQ ID NO: 73976 - protein, 705 aa, Arabidopsis thaliana
  peptide (1)..(705): Ceres Seq. ID no. 4987030
  misc_feature (39)..(351): Pfam Name: Glycosyl hydrolases family 28 Pfam Description: Glycosyl hydrolases family 28
  misc_feature (1)..(351): Homolog of NCBI NO: 15220038 NR Description: polygalacturonase, putative; protein id:
  misc_feature (39)..(351): Homolog of NCBI NO: 25289347 NR Description: Similar to polygalacturonase [imported] - thaliana >gi|5734763|gb|AAD50028.1|AC007651_23 Similar to
  misc_feature (351)..(705): Homolog of NCBI NO: 15220039 NR Description: putative ribokinase; protein id: At1g17160.1
  misc_feature (351)..(705): Homolog of NCBI NO: 25518633 NR Description: hypothetical protein F20D23.14 - Arabidopsis >gi|5734752|gb|AAD50017.1|AC007651_12 Similar to ribokinase
  misc_feature (1)..(357): Homolog of NCBI NO: 15225765 NR Description: polygalacturonase, putative; protein id: [Arabidopsis thaliana] >gi|7435399|pir||T00995 probable
  misc_feature (1)..(351): Homolog of NCBI NO: 15218263 NR Description: polygalacturonase, putative; protein id: [Arabidopsis thaliana] >gi|25289350|pir||A96498 probable
  misc_feature (1)..(357): Homolog of NCBI NO: 15226527 NR Description: polygalacturonase, putative; protein id: [Arabidopsis thaliana] >gi|25289364|pir||B84529 probable
  misc_feature (1)..(350): Homolog of NCBI NO: 15226529 NR Description: polygalacturonase, putative; protein id: [Arabidopsis thaliana] >gi|25289365|pir||C84529 probable
  misc_feature (1)..(349): Homolog of NCBI NO: 15218265 NR Description: polygalacturonase, putative; protein id: [Arabidopsis thaliana] >gi|25289351|pir||B96498 probable
  misc_feature (1)..(357): Homolog of NCBI NO: 15226644 NR Description: polygalacturonase, putative; protein id: [Arabidopsis thaliana] >gi|25289360|pir||H84827 probable
MDNTNAFTNAWKDACRWNGPSKMYIPLGTFYLGGVTFVGPCDGKISFVIDGTLLAPPNNDDIKKEIWINFRYINYLTVFGDGTLDGQGKKSWSLIDCQKDNNCPKLAINMGFDFVKNSSMNGITSLNSKAGHFNFLSVDHFSITRVNIIAPSNSPNTDGIKIALSSNMQISNTHISTGDDCIAMLSGNTNFDIYNVKCGPGHGISIGSLGKNKDEKNVNGLMVRNSVFTGTTNGIRIKTWESSASTIRIINLVYENLQMINVENPIGIDQKYCPYPPCSNMGDSHIQIRNVTLKNIWGTSKNKVAVKFQCSKTFPCKDVQLIDINLTHHGVDGPASALCENVDGSATGKMLQISTVNPNPAQSRFSRPRSLRVLSLSADPSANRNPKSAVDAHAPPLVVVGSANADIYVEIERLPKEGETISAKTGQTLAGGKGANQAACGAKLMYPTYFVGRLGEDAHGKLIAEALGDDGCGVHLDYVRSVNNEPTGHAVVMLQSDGQNSIIIVGGANMKAWPEIMSDDDLEIVRNAGIVLLQREIPDSINIQVAKAVKKAGVPVILDVGGMDTPIPNELLDSIDILSPNETELSRLTGMPTETFEQISQAVAKCHKLGVKQVLVKLGSKGSALFIQGEKPIQQSIIPAAQVVDTTGAGDTFTAAFAVAMVEGKSHEECLRFAAAAASLCVQVKGAIPSMPDRKSVLKLLKFSI

SEQ ID NO: 73977 - DNA, 1122 bp, Arabidopsis thaliana
  misc_feature (1)..(1122): Ceres Seq. ID no. 4988145
  misc_feature: MA Experiment ID: 20000169 Result: Down-regulated in Transcription
  misc_feature: MA Experiment 20000169 PARAMETER Experiment Name: At_100uM_ABA_P Parameter: Age (day) Value: 14
  misc_feature: MA Experiment 20000169 PARAMETER Experiment Name: At_100uM_ABA_P Parameter: Organism Value: A. thaliana
  misc_feature: MA Experiment 20000169 PARAMETER Experiment Name: At_100uM_ABA_P Parameter: Plant Line Value: WS
  misc_feature: MA Experiment 20000169 PARAMETER Experiment Name: At_100uM_ABA_P Parameter: Timepoint (hr) Value: 6
  misc_feature: MA Experiment 20000169 PARAMETER Experiment Name: At_100uM_ABA_P Parameter: Tissue Value: Aerial
  misc_feature: MA Experiment 20000169 PARAMETER Experiment Name: At_100uM_ABA_P Parameter: Treatment Value: 100uM ABA vs. No Treatment
  misc_feature: MA Experiment ID: 20000171 Result: Down-regulated in Transcription
  misc_feature: MA Experiment 20000171 PARAMETER Experiment Name: At_42deg_Heat_P Parameter: Age (day) Value: 14
  misc_feature: MA Experiment 20000171 PARAMETER Experiment Name: At_42deg_Heat_P Parameter: Organism Value: A. thaliana
  misc_feature: MA Experiment 20000171 PARAMETER Experiment Name: At_42deg_Heat_P Parameter: Plant Line Value: WS
  misc_feature: MA Experiment 20000171 PARAMETER Experiment Name: At_42deg_Heat_P Parameter: Temperature (deg C) Value: 42 vs. 22
  misc_feature: MA Experiment 20000171 PARAMETER Experiment Name: At_42deg_Heat_P Parameter: Timepoint (hr) Value: 1
  misc_feature: MA Experiment 20000171 PARAMETER Experiment Name: At_42deg_Heat_P Parameter: Tissue Value: Aerial
  misc_feature: MA Experiment ID: 20000173 Result: Down-regulated in Transcription
  misc_feature: MA Experiment 20000173 PARAMETER Experiment Name: At_42deg_Heat_P Parameter: Age (day) Value: 14
  misc_feature: MA Experiment 20000173 PARAMETER Experiment Name: At_42deg_Heat_P Parameter: Organism Value: A. thaliana
  misc_feature: MA Experiment 20000173 PARAMETER Experiment Name: At_42deg_Heat_P Parameter: Plant Line Value: WS
  misc_feature: MA Experiment 20000173 PARAMETER Experiment Name: At_42deg_Heat_P Parameter: Temperature (deg C) Value: 42 vs. 22
  misc_feature: MA Experiment 20000173 PARAMETER Experiment Name: At_42deg_Heat_P Parameter: Timepoint (hr) Value: 6
  misc_feature: MA Experiment 20000173 PARAMETER Experiment Name: At_42deg_Heat_P Parameter: Tissue Value: Aerial
  misc_feature: MA Experiment ID: 20000182 Result: Down-regulated in Transcription
  misc_feature: MA Experiment 20000182 PARAMETER Experiment Name: At_2mM_SA_P Parameter: Age (day) Value: 14
  misc_feature: MA Experiment 20000182 PARAMETER Experiment Name: At_2mM_SA_P Parameter: Organism Value: A. thaliana
  misc_feature: MA Experiment 20000182 PARAMETER Experiment Name: At_2mM_SA_P Parameter: Plant Line Value: WS
  misc_feature: MA Experiment 20000182 PARAMETER Experiment Name: At_2mM_SA_P Parameter: Timepoint (hr) Value: 6
  misc_feature: MA Experiment 20000182 PARAMETER Experiment Name: At_2mM_SA_P Parameter: Tissue Value: Aerial
  misc_feature: MA Experiment 20000182 PARAMETER Experiment Name: At_2mM_SA_P Parameter: Treatment Value: 2mM SA vs. No Treatment
  misc_feature: MA Experiment ID: 20000184 Result: Up-regulated in Transcription
  misc_feature: MA Experiment 20000184 PARAMETER Experiment Name: At_Shoots__P Parameter: Age (day) Value: 7
  misc_feature: MA Experiment 20000184 PARAMETER Experiment Name: At_Shoots__P Parameter: Tissue Value: Shoots vs. Whole Plant
  misc_feature: MA Experiment ID: 20000185 Result: Up-regulated in Transcription
  misc_feature: MA Experiment 20000185 PARAMETER Experiment Name: At_Roots__P Parameter: Age (day) Value: 7 vs. 21
  misc_feature: MA Experiment 20000185 PARAMETER Experiment Name: At_Roots__P Parameter: Organism Value: A. thaliana
  misc_feature: MA Experiment 20000185 PARAMETER Experiment Name: At_Roots__P Parameter: Tissue Value: Roots vs. Whole Plant
  misc_feature: MA Experiment ID: 20000235 Result: Down-regulated in Transcription
  misc_feature: MA Experiment 20000235 PARAMETER Experiment Name: At_Siliques_P Parameter: Age (day) Value: 21
  misc_feature: MA Experiment 20000235 PARAMETER Experiment Name: At_Siliques_P Parameter: Organism Value: A. thaliana
  misc_feature: MA Experiment 20000235 PARAMETER Experiment Name: At_Siliques_P Parameter: Plant Line Value: WS
  misc_feature: MA Experiment 20000235 PARAMETER Experiment Name: At_Siliques_P Parameter: Tissue Value: 5-10mm Siliques vs. Whole Plant
  misc_feature: MA Experiment ID: 20000268 Result: Down-regulated in Transcription
  misc_feature: MA Experiment 20000268 PARAMETER Experiment Name: At_100mM_NaCl__P Parameter: Age (day) Value: 14
  misc_feature: MA Experiment 20000268 PARAMETER Experiment Name: At_100mM_NaCl__P Parameter: Organism Value: A. thaliana
  misc_feature: MA Experiment 20000268 PARAMETER Experiment Name: At_100mM_NaCl__P Parameter: Plant Line Value: WS
  misc_feature: MA Experiment 20000268 PARAMETER Experiment Name: At_100mM_NaCl__P Parameter: Timepoint (hr) Value: 6
  misc_feature: MA Experiment 20000268 PARAMETER Experiment Name: At_100mM_NaCl__P Parameter: Tissue Value: Whole Plant
  misc_feature: MA Experiment 20000268 PARAMETER Experiment Name: At_100mM_NaCl__P Parameter: Treatment Value: 100mM NaCl vs. No Treatment
  misc_feature: MA Experiment ID: 20000436 Result: Down-regulated in Transcription
  misc_feature: MA Experiment 20000436 PARAMETER Experiment Name: At_Drought_P Parameter: Age (day) Value: 7
  misc_feature: MA Experiment 20000436 PARAMETER Experiment Name: At_Drought_P Parameter: Organism Value: A. thaliana
  misc_feature: MA Experiment 20000436 PARAMETER Experiment Name: At_Drought_P Parameter: Plant Line Value: WS
  misc_feature: MA Experiment 20000436 PARAMETER Experiment Name: At_Drought_P Parameter: Timepoint (hr) Value: 12
  misc_feature: MA Experiment 20000436 PARAMETER Experiment Name: At_Drought_P Parameter: Tissue Value: Whole Plant
  misc_feature: MA Experiment 20000436 PARAMETER Experiment Name: At_Drought_P Parameter: Treatment Value: Drought vs. No Drought
  misc_feature: MA Experiment ID: 20000437 Result: Down-regulated in Transcription
  misc_feature: MA Experiment 20000437 PARAMETER Experiment Name: At_Drought_P Parameter: Age (day) Value: 8
  misc_feature: MA Experiment 20000437 PARAMETER Experiment Name: At_Drought_P Parameter: Organism Value: A. thaliana
  misc_feature: MA Experiment 20000437 PARAMETER Experiment Name: At_Drought_P Parameter: Plant Line Value: WS
  misc_feature: MA Experiment 20000437 PARAMETER Experiment Name: At_Drought_P Parameter: Timepoint (hr) Value: 24
  misc_feature: MA Experiment 20000437 PARAMETER Experiment Name: At_Drought_P Parameter: Tissue Value: Whole Plant
  misc_feature: MA Experiment 20000437 PARAMETER Experiment Name: At_Drought_P Parameter: Treatment Value: Drought vs. No Drought
  misc_feature: MA Experiment ID: 20000438 Result: Up-regulated in Transcription
  misc_feature: MA Experiment 20000438 PARAMETER Experiment Name: At_Shoots__P Parameter: Age (day) Value: 14
  misc_feature: MA Experiment 20000438 PARAMETER Experiment Name: At_Shoots__P Parameter: Tissue Value: Shoots vs. Whole Plant
  misc_feature: MA Experiment ID: 20000439 Result: Up-regulated in Transcription
  misc_feature: MA Experiment 20000439 PARAMETER Experiment Name: At_Roots__P Parameter: Age (day) Value: 14 vs. 21
  misc_feature: MA Experiment 20000439 PARAMETER Experiment Name: At_Roots__P Parameter: Organism Value: A. thaliana
  misc_feature: MA Experiment 20000439 PARAMETER Experiment Name: At_Roots__P Parameter: Tissue Value: Roots vs. Whole Plant
  misc_feature: MA Experiment ID: 20000495 Result: Up-regulated in Transcription
  misc_feature: MA Experiment 20000495 PARAMETER Experiment Name: At_Guard_Cells_P Parameter: Harvest Date Value: 8/2/2002
  misc_feature: MA Experiment 20000495 PARAMETER Experiment Name: At_Guard_Cells_P Parameter: Organism Value: A. thaliana
  misc_feature: MA Experiment 20000495 PARAMETER Experiment Name: At_Guard_Cells_P Parameter: Tissue Value: Guard Cells vs. Leaves
  misc_feature: MA Experiment ID: 20000573 Result: Down-regulated in Transcription
  misc_feature: MA Experiment 20000573 PARAMETER Experiment Name: At_100uM_ABA_Mutants__P Parameter: Organism Value: A. thaliana
  misc_feature: MA Experiment 20000573 PARAMETER Experiment Name: At_100uM_ABA_Mutants__P Parameter: Plant Line Value: CS22 vs. Ler wt
  misc_feature: MA Experiment 20000573 PARAMETER Experiment Name: At_100uM_ABA_Mutants__P Parameter: Timepoint (hr) Value: N/A
  misc_feature: MA Experiment 20000573 PARAMETER Experiment Name: At_100uM_ABA_Mutants__P Parameter: Tissue Value: Whole Plant
  misc_feature: MA Experiment 20000573 PARAMETER Experiment Name: At_100uM_ABA_Mutants__P Parameter: Treatment Value: None
  misc_feature: MA Experiment ID: 20000574 Result: Down-regulated in Transcription
  misc_feature: MA Experiment 20000574 PARAMETER Experiment Name: At_100uM_ABA_Mutants__P Parameter: Organism Value: A. thaliana
  misc_feature: MA Experiment 20000574 PARAMETER Experiment Name: At_100uM_ABA_Mutants__P Parameter: Plant Line Value: CS23 vs. Ler wt
  misc_feature: MA Experiment 20000574 PARAMETER Experiment Name: At_100uM_ABA_Mutants__P Parameter: Timepoint (hr) Value: N/A
  misc_feature: MA Experiment 20000574 PARAMETER Experiment Name: At_100uM_ABA_Mutants__P Parameter: Tissue Value: Whole Plant
  misc_feature: MA Experiment 20000574 PARAMETER Experiment Name: At_100uM_ABA_Mutants__P Parameter: Treatment Value: None
  misc_feature: MA Experiment ID: 20000794 Result: Down-regulated in Transcription
  misc_feature: MA Experiment 20000794 PARAMETER Experiment Name: At_Petals_P Parameter: Age (day) Value: 23-25 days
  misc_feature: MA Experiment 20000794 PARAMETER Experiment Name: At_Petals_P Parameter: Plant Line Value: WS
  misc_feature: MA Experiment 20000794 PARAMETER Experiment Name: At_Petals_P Parameter: Tissue Value: Petals vs. Whole plant
  misc_feature: MA Experiment ID: 20001554 Result: Down-regulated in Transcription
  misc_feature: MA Experiment 20001554 PARAMETER Experiment Name: At_Drought_Soil_Dry_P Parameter: Age (day) Value: 21
  misc_feature: MA Experiment 20001554 PARAMETER Experiment Name: At_Drought_Soil_Dry_P Parameter: Organism Value: A. thaliana
  misc_feature: MA Experiment 20001554 PARAMETER Experiment Name: At_Drought_Soil_Dry_P Parameter: Plant Line Value: WS
  misc_feature: MA Experiment 20001554 PARAMETER Experiment Name: At_Drought_Soil_Dry_P Parameter: Post Timepoint (hr) Value: None
  misc_feature: MA Experiment 20001554 PARAMETER Experiment Name: At_Drought_Soil_Dry_P Parameter: Post-Treatment Value: None
  misc_feature: MA Experiment 20001554 PARAMETER Experiment Name: At_Drought_Soil_Dry_P Parameter: Timepoint (day) Value: 7
  misc_feature: MA Experiment 20001554 PARAMETER Experiment Name: At_Drought_Soil_Dry_P Parameter: Treatment Value: Drought vs. No Drought
  misc_feature: MA Experiment ID: 20001555 Result: Down-regulated in Transcription
  misc_feature: MA Experiment 20001555 PARAMETER Experiment Name: At_Drought_Soil_Dry_P Parameter: Age (day) Value: 24
  misc_feature: MA Experiment 20001555 PARAMETER Experiment Name: At_Drought_Soil_Dry_P Parameter: Organism Value: A. thaliana
  misc_feature: MA Experiment 20001555 PARAMETER Experiment Name: At_Drought_Soil_Dry_P Parameter: Plant Line Value: WS
  misc_feature: MA Experiment 20001555 PARAMETER Experiment Name: At_Drought_Soil_Dry_P Parameter: Post Timepoint (hr) Value: None
  misc_feature: MA Experiment 20001555 PARAMETER Experiment Name: At_Drought_Soil_Dry_P Parameter: Post-Treatment Value: None
  misc_feature: MA Experiment 20001555 PARAMETER Experiment Name: At_Drought_Soil_Dry_P Parameter: Timepoint (day) Value: 10
  misc_feature: MA Experiment 20001555 PARAMETER Experiment Name: At_Drought_Soil_Dry_P Parameter: Treatment Value: Drought vs. No Drought
  misc_feature: MA Experiment ID: 20001556 Result: Down-regulated in Transcription
  misc_feature: MA Experiment 20001556 PARAMETER Experiment Name: At_Drought_Soil_Dry_P Parameter: Age (day) Value: 26
  misc_feature: MA Experiment 20001556 PARAMETER Experiment Name: At_Drought_Soil_Dry_P Parameter: Organism Value: A. thaliana
  misc_feature: MA Experiment 20001556 PARAMETER Experiment Name: At_Drought_Soil_Dry_P Parameter: Plant Line Value: WS
  misc_feature: MA Experiment 20001556 PARAMETER Experiment Name: At_Drought_Soil_Dry_P Parameter: Post Timepoint (hr) Value: None
  misc_feature: MA Experiment 20001556 PARAMETER Experiment Name: At_Drought_Soil_Dry_P Parameter: Post-Treatment Value: None
  misc_feature: MA Experiment 20001556 PARAMETER Experiment Name: At_Drought_Soil_Dry_P Parameter: Timepoint (day) Value: 12
  misc_feature: MA Experiment 20001556 PARAMETER Experiment Name: At_Drought_Soil_Dry_P Parameter: Treatment Value: Drought vs. No Drought
  misc_feature: MA Experiment ID: 20001560 Result: Down-regulated in Transcription
  misc_feature: MA Experiment 20001560 PARAMETER Experiment Name: At_Drought_Soil_Dry_P Parameter: Age (day) Value: 28
  misc_feature: MA Experiment 20001560 PARAMETER Experiment Name: At_Drought_Soil_Dry_P Parameter: Organism Value: A. thaliana
  misc_feature: MA Experiment 20001560 PARAMETER Experiment Name: At_Drought_Soil_Dry_P Parameter: Plant Line Value: WS
  misc_feature: MA Experiment 20001560 PARAMETER Experiment Name: At_Drought_Soil_Dry_P Parameter: Post Timepoint (hr) Value: None
  misc_feature: MA Experiment 20001560 PARAMETER Experiment Name: At_Drought_Soil_Dry_P Parameter: Post-Treatment Value: None
  misc_feature: MA Experiment 20001560 PARAMETER Experiment Name: At_Drought_Soil_Dry_P Parameter: Timepoint (day) Value: 14
  misc_feature: MA Experiment 20001560 PARAMETER Experiment Name: At_Drought_Soil_Dry_P Parameter: Treatment Value: Drought vs. No Drought
  misc_feature: MA Experiment ID: 20001757 Result: Up-regulated in Transcription
  misc_feature: MA Experiment 20001757 PARAMETER Experiment Name: At_50mM_NH4NO3_L-to-H_P Parameter: Timepoint (hr) Value: 6
  misc_feature: MA Experiment 20001757 PARAMETER Experiment Name: At_50mM_NH4NO3_L-to-H_P Parameter: Tissue Value: Leaf
  misc_feature: MA Experiment 20001757 PARAMETER Experiment Name: At_50mM_NH4NO3_L-to-H_P Parameter: Treatment Value: 50mM NH4NO3 vs 100mM Mannitol
atggcaaaagaaagaagcatatggtggggggtgttaatggggaggggaccacgtggcggttactgggaacgctgcaaactaaacgatcggtttagattcatagaagaaaacacaaaacttgtagaaaaagaaaccgggaacaaatcaaacaacgatgtaacaacaacgaagaagaaagctcttcaagatatcattatcaacaatggagtaggattgatcaattcatgggttgattcaatgagagcttgttcccctactcatcttaaatctttgttgaaacaaagctcttggctcacggaacatccatcagctttggatatgtttgaagagattcttcacctttctgaaggaaaacaaatcgttatgttcttggattatgatggcactttatctcccattgttgatgatccagatcgagctttcatgtctagaaagatgagaagaactgtgaggaaactagcaaactgtttcccgacggccatagttagtgggagatgcatagaaaagctaattatgatagttttgacaacttttcaggtttataactttgtaaaactaactgagttgtactatgctggaagtcatggaatggacatcaaaggaccagagcaagggtccaaatatgagcaagatagtaaatctcttctttgccaaccagctacagagttcctccccatgatcgacgaggtttatcataaattagtggagaaaacaaaatctactcccggagcccaagtagagaacaacaaattttgtgtctctgttcacttccgacgcgtagatgaaaataactggagtgatttggctaaccaagttcgatcagtaatgaaagactaccctaagctccgtcttactcaaggaagaaaagttttggaggttcgtccgattattaaatgggacaaaggcaaagcactcgagtttttattagagtcacttggatacgctaattgtaccgacgttttccctctttatatcggagatgatcgcaccgacgaagatgcattcaaggtatatacagaatttagttatggagttcttgcaacgtttagtggaatggaaacaattgagatctggagcatgatgagagctataactacagaagaatcgtttcttcttaattag

SEQ ID NO: 73978 - protein, 373 aa, Arabidopsis thaliana
  peptide (1)..(373): Ceres Seq. ID no. 4988146
  misc_feature (123)..(364): Pfam Name: Trehalose-phosphatase Pfam Description: Trehalose-phosphatase
  misc_feature (32)..(360): Homolog of NCBI NO: 30692524 NR Description: trehalose-6-phosphate phosphatase, putative thaliana] >gi|26452744|dbj|BAC43453.1| putative protein thaliana] >gi|28973301|gb|AAO63975.1| unknown protein
  misc_feature (107)..(373): Homolog of NCBI NO: 7487212 NR Description: hypothetical protein T19P19.160 - Arabidopsis >gi|3080446|emb|CAA18763.1| puative protein [Arabidopsis >gi|7270961|emb|CAB80640.1| puative protein [Arabidopsis
  misc_feature (53)..(360): Homolog of NCBI NO: 15238360 NR Description: trehalose-6-phosphate phosphatase; protein id:
  misc_feature (53)..(371): Homolog of NCBI NO: 11282598 NR Description: trehalose-6-phosphate phosphatase-like protein -
  misc_feature (53)..(360): Homolog of NCBI NO: 30683008 NR Description: trehalose-6-phosphate phosphatase, putative
  misc_feature (107)..(360): Homolog of NCBI NO: 15227161 NR Description: putative trehalose-6-phosphate phosphatase;
  misc_feature (53)..(360): Homolog of NCBI NO: 18399940 NR Description: trehalose-phosphatase, putative; protein id:
  misc_feature (53)..(360): Homolog of NCBI NO: 21554408 NR Description: trehalose-phosphatase, putative [Arabidopsis
  misc_feature (53)..(360): Homolog of NCBI NO: 25354597 NR Description: probable trehalose-phosphatase [imported] -
  misc_feature (73)..(360): Homolog of NCBI NO: 15218205 NR Description: trehalose-6-phosphate phosphatase (AtTPPB); id: At1g78090.1, supported by cDNA: gi_2944179 [Arabidopsis
MAKERSIWWGVLMGRGPRGGYWERCKLNDRFRFIEENTKLVEKETGNKSNNDVTTTKKKALQDIIINNGVGLINSWVDSMRACSPTHLKSLLKQSSWLTEHPSALDMFEEILHLSEGKQIVMFLDYDGTLSPIVDDPDRAFMSRKMRRTVRKLANCFPTAIVSGRCIEKLIMIVLTTFQVYNFVKLTELYYAGSHGMDIKGPEQGSKYEQDSKSLLCQPATEFLPMIDEVYHKLVEKTKSTPGAQVENNKFCVSVHFRRVDENNWSDLANQVRSVMKDYPKLRLTQGRKVLEVRPIIKWDKGKALEFLLESLGYANCTDVFPLYIGDDRTDEDAFKVYTEFSYGVLATFSGMETIEIWSMMRAITTEESFLLN

SEQ ID NO: 73979 - protein, 361 aa, Arabidopsis thaliana
  peptide (1)..(361): Ceres Seq. ID no. 4988147
  misc_feature (111)..(352): Pfam Name: Trehalose-phosphatase Pfam Description: Trehalose-phosphatase
  misc_feature (20)..(348): Homolog of NCBI NO: 30692524 NR Description: trehalose-6-phosphate phosphatase, putative thaliana] >gi|26452744|dbj|BAC43453.1| putative protein thaliana] >gi|28973301|gb|AAO63975.1| unknown protein
  misc_feature (95)..(361): Homolog of NCBI NO: 7487212 NR Description: hypothetical protein T19P19.160 - Arabidopsis >gi|3080446|emb|CAA18763.1| puative protein [Arabidopsis >gi|7270961|emb|CAB80640.1| puative protein [Arabidopsis
  misc_feature (41)..(348): Homolog of NCBI NO: 15238360 NR Description: trehalose-6-phosphate phosphatase; protein id:
  misc_feature (41)..(359): Homolog of NCBI NO: 11282598 NR Description: trehalose-6-phosphate phosphatase-like protein -
  misc_feature (41)..(348): Homolog of NCBI NO: 30683008 NR Description: trehalose-6-phosphate phosphatase, putative
  misc_feature (95)..(348): Homolog of NCBI NO: 15227161 NR Description: putative trehalose-6-phosphate phosphatase;
  misc_feature (41)..(348): Homolog of NCBI NO: 18399940 NR Description: trehalose-phosphatase, putative; protein id:
  misc_feature (41)..(348): Homolog of NCBI NO: 21554408 NR Description: trehalose-phosphatase, putative [Arabidopsis
  misc_feature (41)..(348): Homolog of NCBI NO: 25354597 NR Description: probable trehalose-phosphatase [imported] -
  misc_feature (61)..(348): Homolog of NCBI NO: 15218205 NR Description: trehalose-6-phosphate phosphatase (AtTPPB); id: At1g78090.1, supported by cDNA: gi_2944179 [Arabidopsis
MGRGPRGGYWERCKLNDRFRFIEENTKLVEKETGNKSNNDVTTTKKKALQDIIINNGVGLINSWVDSMRACSPTHLKSLLKQSSWLTEHPSALDMFEEILHLSEGKQIVMFLDYDGTLSPIVDDPDRAFMSRKMRRTVRKLANCFPTAIVSGRCIEKLIMIVLTTFQVYNFVKLTELYYAGSHGMDIKGPEQGSKYEQDSKSLLCQPATEFLPMIDEVYHKLVEKTKSTPGAQVENNKFCVSVHFRRVDENNWSDLANQVRSVMKDYPKLRLTQGRKVLEVRPIIKWDKGKALEFLLESLGYANCTDVFPLYIGDDRTDEDAFKVYTEFSYGVLATFSGMETIEIWSMMRAITTEESFLLN

SEQ ID NO: 73980 - protein, 294 aa, Arabidopsis thaliana
  peptide (1)..(294): Ceres Seq. ID no. 4988148
  misc_feature (44)..(285): Pfam Name: Trehalose-phosphatase Pfam Description: Trehalose-phosphatase
  misc_feature (1)..(281): Homolog of NCBI NO: 30692524 NR Description: trehalose-6-phosphate phosphatase, putative thaliana] >gi|26452744|dbj|BAC43453.1| putative protein thaliana] >gi|28973301|gb|AAO63975.1| unknown protein
  misc_feature (28)..(294): Homolog of NCBI NO: 7487212 NR Description: hypothetical protein T19P19.160 - Arabidopsis >gi|3080446|emb|CAA18763.1| puative protein [Arabidopsis >gi|7270961|emb|CAB80640.1| puative protein [Arabidopsis
  misc_feature (1)..(281): Homolog of NCBI NO: 15238360 NR Description: trehalose-6-phosphate phosphatase; protein id:
  misc_feature (1)..(292): Homolog of NCBI NO: 11282598 NR Description: trehalose-6-phosphate phosphatase-like protein -
  misc_feature (1)..(281): Homolog of NCBI NO: 30683008 NR Description: trehalose-6-phosphate phosphatase, putative
  misc_feature (28)..(281): Homolog of NCBI NO: 15227161 NR Description: putative trehalose-6-phosphate phosphatase;
  misc_feature (1)..(281): Homolog of NCBI NO: 18399940 NR Description: trehalose-phosphatase, putative; protein id:
  misc_feature (1)..(281): Homolog of NCBI NO: 21554408 NR Description: trehalose-phosphatase, putative [Arabidopsis
  misc_feature (1)..(281): Homolog of NCBI NO: 25354597 NR Description: probable trehalose-phosphatase [imported] -
  misc_feature (1)..(281): Homolog of NCBI NO: 15218205 NR Description: trehalose-6-phosphate phosphatase (AtTPPB); id: At1g78090.1, supported by cDNA: gi_2944179 [Arabidopsis
MRACSPTHLKSLLKQSSWLTEHPSALDMFEEILHLSEGKQIVMFLDYDGTLSPIVDDPDRAFMSRKMRRTVRKLANCFPTAIVSGRCIEKLIMIVLTTFQVYNFVKLTELYYAGSHGMDIKGPEQGSKYEQDSKSLLCQPATEFLPMIDEVYHKLVEKTKSTPGAQVENNKFCVSVHFRRVDENNWSDLANQVRSVMKDYPKLRLTQGRKVLEVRPIIKWDKGKALEFLLESLGYANCTDVFPLYIGDDRTDEDAFKVYTEFSYGVLATFSGMETIEIWSMMRAITTEESFLLN

SEQ ID NO: 73981 - DNA, 1995 bp, Arabidopsis thaliana
  misc_feature (1)..(1995): Ceres Seq. ID no. 4988544
  misc_feature: MA Experiment ID: 20000307 Result: Up-regulated in Transcription
  misc_feature: MA Experiment 20000307 PARAMETER Experiment Name: At_Germinating_Seeds_Sub_P Parameter: Age (hr) Value: 24 vs. 0
  misc_feature: MA Experiment 20000307 PARAMETER Experiment Name: At_Germinating_Seeds_Sub_P Parameter: Organism Value: A. thaliana
  misc_feature: MA Experiment 20000307 PARAMETER Experiment Name: At_Germinating_Seeds_Sub_P Parameter: Plant Line Value: WS
  misc_feature: MA Experiment 20000307 PARAMETER Experiment Name: At_Germinating_Seeds_Sub_P Parameter: Tissue Value: Germinating Seeds
  misc_feature: MA Experiment ID: 20000314 Result: Up-regulated in Transcription
  misc_feature: MA Experiment 20000314 PARAMETER Experiment Name: At_14day_Shoots-Roots_Sub_P Parameter: Age (day) Value: 14
  misc_feature: MA Experiment 20000314 PARAMETER Experiment Name: At_14day_Shoots-Roots_Sub_P Parameter: Organism Value: A. thaliana
  misc_feature: MA Experiment 20000314 PARAMETER Experiment Name: At_14day_Shoots-Roots_Sub_P Parameter: Plant Line Value: WS
  misc_feature: MA Experiment 20000314 PARAMETER Experiment Name: At_14day_Shoots-Roots_Sub_P Parameter: Tissue Value: Roots vs. Whole Plant
atggggttagggcattgcatggtttacgttgtggtcctaagtgccattgcggctacagtgacatcatacccttactcctctccttactcatcccctcaaaccccacattacaattctcccagccatgaacacaaaagccctaagtacgcgccacatccaaaaccatacgtttatatttctccaccacctccatcatactattctccttctccaaaagtaaactataagtctccaccaccaccaaacgtctacaactctccacctccaccatactattctccttcaccaaaggttgattataagtctccaccaccaccttacgtctacagttccccacctccaccatactattctccttctccgaaggttgactataagtctcctccaccaccatacgtctacagctccccacccccaccatactattctccttcgccaaaggttgaatacaagtctccaccaccaccgtacgtctacaattctccacctccaccatactactctccttctcctaagatagagtacaagtccccaccaccaccatatgtctacagttctccacccccaccgtactactctccatctccaaaggttgactacaagtccccaccaccaccgtacgtctacaactccccacccccaccatactactctccttcgccaaaggttgactacaaatctcccccaccaccgtacgtctacagttccccacccccaccatacttctctccttcgccaaaggttgaatacaagtctcccccaccaccgtacgtctacaattctccacctccaccatactactctccttctcctaaggtagagtacaagtccccaccaccaccatatgtctacagctctccacccccaccgtactactcaccatctccaaaagtttactacaagtccccaccaccaccatacgtctacagctccccacccccaccatactactctccatctccaaaggttgactacaagtccccaccaccaccgtatgtttacagctctccacccccaccatactactctccttcgcctaaggttgactacaagtctcccccaccaccatacgtctacagctccccgcccccacaatactactctccttcgccaaaggttgcgtacaagtctcccccaccaccatacgtctacagctctccgcccccaccttactactctccttcaccaaaggttgcgtacaagtctcccccaccaccatacgtctacagctccccgcccccaccatactactctccttcacctaaggttgattacaagtctcccccaccaccatacgtctacagctcccctcctccaccttactactctccttcaccaaaggttgagtacaagtctcccccaccaccatacgtctacagctcccctcccccaccttactactctccttcaccaaaggttgagtacaagtctccaccaccaccatacgtctacagttcccctcccccaccataccactctccttcgcctaaggtaaactacaaatctccaccaccaccatacgtctacagctcccatcccccaccatactactctccttcgcctaaggtaaactacaaatctccaccaccaccatacgtctacagctccccacccccaccatactactctccttcgcctaaggttaactacaagtctcccccaccaccatacgtttacagttctccgcccccaccatactactctccttctcctatggttgactacaagtctacccccccaccatacgtctatagcttcccacccctaccatattattctccttctccaaaggttgactacaagtctccaccactaccatacgtttacagctccccacccccactatattactctccttctccaaaggttcattacaaatctccaccaccaccatacgtgtataactctccacctccaccatactattctccttctccaaaggtcacttacaagtctccaccacccccatatgtctacaaggcgccttactattga

SEQ ID NO: 73982 - protein, 664 aa, Arabidopsis thaliana
  peptide (1)..(664): Ceres Seq. ID no. 4988545
  misc_feature (203)..(506): Pfam Name: Formin Homology 2 Domain Pfam Description: Formin Homology 2 Domain
  misc_feature (85)..(664): Homolog of NCBI NO: 15233034 NR Description: unknown protein; protein id: At3g28550.1 thaliana] >gi|9294269|dbj|BAB02171.1| gene_id:MZN14.2~unknown
  misc_feature (1)..(567): Homolog of NCBI NO: 15224658 NR Description: unknown protein; protein id: At2g24980.1
  misc_feature (24)..(634): Homolog of NCBI NO: 15220851 NR Description: unknown protein; protein id: At1g23720.1
  misc_feature (132)..(664): Homolog of NCBI NO: 15224658 NR Description: unknown protein; protein id: At2g24980.1
  misc_feature (56)..(592): Homolog of NCBI NO: 15224658 NR Description: unknown protein; protein id: At2g24980.1
  misc_feature (75)..(617): Homolog of NCBI NO: 15224658 NR Description: unknown protein; protein id: At2g24980.1
  misc_feature (107)..(642): Homolog of NCBI NO: 15224658 NR Description: unknown protein; protein id: At2g24980.1
  misc_feature (1)..(509): Homolog of NCBI NO: 15236486 NR Description: extensin-like protein; protein id: At4g08400.1
  misc_feature (56)..(534): Homolog of NCBI NO: 15236486 NR Description: extensin-like protein; protein id: At4g08400.1
  misc_feature (84)..(559): Homolog of NCBI NO: 15236486 NR Description: extensin-like protein; protein id: At4g08400.1
MGLGHCMVYVVVLSAIAATVTSYPYSSPYSSPQTPHYNSPSHEHKSPKYAPHPKPYVYISPPPPSYYSPSPKVNYKSPPPPNVYNSPPPPYYSPSPKVDYKSPPPPYVYSSPPPPYYSPSPKVDYKSPPPPYVYSSPPPPYYSPSPKVEYKSPPPPYVYNSPPPPYYSPSPKIEYKSPPPPYVYSSPPPPYYSPSPKVDYKSPPPPYVYNSPPPPYYSPSPKVDYKSPPPPYVYSSPPPPYFSPSPKVEYKSPPPPYVYNSPPPPYYSPSPKVEYKSPPPPYVYSSPPPPYYSPSPKVYYKSPPPPYVYSSPPPPYYSPSPKVDYKSPPPPYVYSSPPPPYYSPSPKVDYKSPPPPYVYSSPPPQYYSPSPKVAYKSPPPPYVYSSPPPPYYSPSPKVAYKSPPPPYVYSSPPPPYYSPSPKVDYKSPPPPYVYSSPPPPYYSPSPKVEYKSPPPPYVYSSPPPPYYSPSPKVEYKSPPPPYVYSSPPPPYHSPSPKVNYKSPPPPYVYSSHPPPYYSPSPKVNYKSPPPPYVYSSPPPPYYSPSPKVNYKSPPPPYVYSSPPPPYYSPSPMVDYKSTPPPYVYSFPPLPYYSPSPKVDYKSPPLPYVYSSPPPLYYSPSPKVHYKSPPPPYVYNSPPPPYYSPSPKVTYKSPPPPYVYKAPYY

SEQ ID NO: 73983 - protein, 658 aa, Arabidopsis thaliana
  peptide (1)..(658): Ceres Seq. ID no. 4988546
  misc_feature (197)..(500): Pfam Name: Formin Homology 2 Domain Pfam Description: Formin Homology 2 Domain
  misc_feature (79)..(658): Homolog of NCBI NO: 15233034 NR Description: unknown protein; protein id: At3g28550.1 thaliana] >gi|9294269|dbj|BAB02171.1| gene_id:MZN14.2~unknown
  misc_feature (1)..(561): Homolog of NCBI NO: 15224658 NR Description: unknown protein; protein id: At2g24980.1
  misc_feature (18)..(628): Homolog of NCBI NO: 15220851 NR Description: unknown protein; protein id: At1g23720.1
  misc_feature (126)..(658): Homolog of NCBI NO: 15224658 NR Description: unknown protein; protein id: At2g24980.1
  misc_feature (50)..(586): Homolog of NCBI NO: 15224658 NR Description: unknown protein; protein id: At2g24980.1
  misc_feature (69)..(611): Homolog of NCBI NO: 15224658 NR Description: unknown protein; protein id: At2g24980.1
  misc_feature (101)..(636): Homolog of NCBI NO: 15224658 NR Description: unknown protein; protein id: At2g24980.1
  misc_feature (1)..(503): Homolog of NCBI NO: 15236486 NR Description: extensin-like protein; protein id: At4g08400.1
  misc_feature (50)..(528): Homolog of NCBI NO: 15236486 NR Description: extensin-like protein; protein id: At4g08400.1
  misc_feature (78)..(553): Homolog of NCBI NO: 15236486 NR Description: extensin-like protein; protein id: At4g08400.1
MVYVVVLSAIAATVTSYPYSSPYSSPQTPHYNSPSHEHKSPKYAPHPKPYVYISPPPPSYYSPSPKVNYKSPPPPNVYNSPPPPYYSPSPKVDYKSPPPPYVYSSPPPPYYSPSPKVDYKSPPPPYVYSSPPPPYYSPSPKVEYKSPPPPYVYNSPPPPYYSPSPKIEYKSPPPPYVYSSPPPPYYSPSPKVDYKSPPPPYVYNSPPPPYYSPSPKVDYKSPPPPYVYSSPPPPYFSPSPKVEYKSPPPPYVYNSPPPPYYSPSPKVEYKSPPPPYVYSSPPPPYYSPSPKVYYKSPPPPYVYSSPPPPYYSPSPKVDYKSPPPPYVYSSPPPPYYSPSPKVDYKSPPPPYVYSSPPPQYYSPSPKVAYKSPPPPYVYSSPPPPYYSPSPKVAYKSPPPPYVYSSPPPPYYSPSPKVDYKSPPPPYVYSSPPPPYYSPSPKVEYKSPPPPYVYSSPPPPYYSPSPKVEYKSPPPPYVYSSPPPPYHSPSPKVNYKSPPPPYVYSSHPPPYYSPSPKVNYKSPPPPYVYSSPPPPYYSPSPKVNYKSPPPPYVYSSPPPPYYSPSPMVDYKSTPPPYVYSFPPLPYYSPSPKVDYKSPPLPYVYSSPPPLYYSPSPKVHYKSPPPPYVYNSPPPPYYSPSPKVTYKSPPPPYVYKAPYY

SEQ ID NO: 73984 - DNA, 2134 bp, Arabidopsis thaliana
  misc_feature (1)..(2134): Ceres Seq. ID no. 4989202
  misc_feature: MA Experiment ID: 108461 Result: Up-regulated in Transcription
  misc_feature: MA Experiment 108461 PARAMETER Experiment Name: At_Germinating_Seeds_cDNA_P Parameter: Age (day) Value: 1 vs. 0
  misc_feature: MA Experiment 108461 PARAMETER Experiment Name: At_Germinating_Seeds_cDNA_P Parameter: Tissue Value: Germinating Seeds
  misc_feature: MA Experiment ID: 108462 Result: Up-regulated in Transcription
  misc_feature: MA Experiment 108462 PARAMETER Experiment Name: At_Germinating_Seeds_cDNA_P Parameter: Age (day) Value: 2 vs. 0
  misc_feature: MA Experiment 108462 PARAMETER Experiment Name: At_Germinating_Seeds_cDNA_P Parameter: Tissue Value: Germinating Seeds
  misc_feature: MA Experiment ID: 108463 Result: Up-regulated in Transcription
  misc_feature: MA Experiment 108463 PARAMETER Experiment Name: At_Germinating_Seeds_cDNA_P Parameter: Age (day) Value: 3 vs. 0
  misc_feature: MA Experiment 108463 PARAMETER Experiment Name: At_Germinating_Seeds_cDNA_P Parameter: Tissue Value: Germinating Seeds
  misc_feature: MA Experiment ID: 108464 Result: Up-regulated in Transcription
  misc_feature: MA Experiment 108464 PARAMETER Experiment Name: At_Germinating_Seeds_cDNA_P Parameter: Age (day) Value: 4 vs. 0
  misc_feature: MA Experiment 108464 PARAMETER Experiment Name: At_Germinating_Seeds_cDNA_P Parameter: Tissue Value: Germinating Seeds
  misc_feature: MA Experiment ID: 108569 Result: Up-regulated in Transcription
  misc_feature: MA Experiment 108569 PARAMETER Experiment Name: At_0.001%_MeJA__cDNA_P Parameter: Timepoint (hr) Value: 6
  misc_feature: MA Experiment 108569 PARAMETER Experiment Name: At_0.001%_MeJA__cDNA_P Parameter: Tissue Value: Aerial
  misc_feature: MA Experiment 108569 PARAMETER Experiment Name: At_0.001%_MeJA__cDNA_P Parameter: Treatment Value: 0.001% MeJA vs. No Treatment
  misc_feature: MA Experiment ID: 108573 Result: Up-regulated in Transcription
  misc_feature: MA Experiment 108573 PARAMETER Experiment Name: At_Drought_cDNA_P Parameter: Timepoint (hr) Value: 6
  misc_feature: MA Experiment 108573 PARAMETER Experiment Name: At_Drought_cDNA_P Parameter: Tissue Value: Aerial
  misc_feature: MA Experiment 108573 PARAMETER Experiment Name: At_Drought_cDNA_P Parameter: Treatment Value: Drought vs. No Drought
  misc_feature: MA Experiment ID: 108579 Result: Down-regulated in Transcription
  misc_feature: MA Experiment 108579 PARAMETER Experiment Name: At_4deg_Cold_cDNA_P Parameter: Temperature (deg C) Value: 4 vs. 22
  misc_feature: MA Experiment 108579 PARAMETER Experiment Name: At_4deg_Cold_cDNA_P Parameter: Timepoint (hr) Value: 6
  misc_feature: MA Experiment 108579 PARAMETER Experiment Name: At_4deg_Cold_cDNA_P Parameter: Tissue Value: Aerial
  misc_feature: MA Experiment ID: 108585 Result: Up-regulated in Transcription
  misc_feature: MA Experiment 108585 PARAMETER Experiment Name: At_5mM_NaNP_cDNA_P Parameter: Timepoint (hr) Value: 6
  misc_feature: MA Experiment 108585 PARAMETER Experiment Name: At_5mM_NaNP_cDNA_P Parameter: Tissue Value: Aerial
  misc_feature: MA Experiment 108585 PARAMETER Experiment Name: At_5mM_NaNP_cDNA_P Parameter: Treatment Value: null
  misc_feature: MA Experiment ID: 108595 Result: Down-regulated in Transcription
  misc_feature: MA Experiment 108595 PARAMETER Experiment Name: At_Ler-pi_Ovule_cDNA_P Parameter: Plant Line Value: null
  misc_feature: MA Experiment ID: 20000111 Result: Down-regulated in Transcription
  misc_feature: MA Experiment 20000111 PARAMETER Experiment Name: At_42deg_Heat_cDNA_P Parameter: Temperature (deg C) Value: 42 vs. 22
  misc_feature: MA Experiment 20000111 PARAMETER Experiment Name: At_42deg_Heat_cDNA_P Parameter: Timepoint (hr) Value: 6
  misc_feature: MA Experiment 20000111 PARAMETER Experiment Name: At_42deg_Heat_cDNA_P Parameter: Tissue Value: Aerial
  misc_feature: MA Experiment ID: 20000113 Result: Down-regulated in Transcription
  misc_feature: MA Experiment 20000113 PARAMETER Experiment Name: At_42deg_Heat_cDNA_P Parameter: Temperature (deg C) Value: 42 vs. 22
  misc_feature: MA Experiment 20000113 PARAMETER Experiment Name: At_42deg_Heat_cDNA_P Parameter: Timepoint (hr) Value: 8
  misc_feature: MA Experiment 20000113 PARAMETER Experiment Name: At_42deg_Heat_cDNA_P Parameter: Tissue Value: Aerial
  misc_feature: MA Experiment ID: 20000173 Result: Down-regulated in Transcription
  misc_feature: MA Experiment 20000173 PARAMETER Experiment Name: At_42deg_Heat_P Parameter: Age (day) Value: 14
  misc_feature: MA Experiment 20000173 PARAMETER Experiment Name: At_42deg_Heat_P Parameter: Organism Value: A. thaliana
  misc_feature: MA Experiment 20000173 PARAMETER Experiment Name: At_42deg_Heat_P Parameter: Plant Line Value: WS
  misc_feature: MA Experiment 20000173 PARAMETER Experiment Name: At_42deg_Heat_P Parameter: Temperature (deg C) Value: 42 vs. 22
  misc_feature: MA Experiment 20000173 PARAMETER Experiment Name: At_42deg_Heat_P Parameter: Timepoint (hr) Value: 6
  misc_feature: MA Experiment 20000173 PARAMETER Experiment Name: At_42deg_Heat_P Parameter: Tissue Value: Aerial
  misc_feature: MA Experiment ID: 20000179 Result: Up-regulated in Transcription
  misc_feature: MA Experiment 20000179 PARAMETER Experiment Name: At_Germinating_Seeds_P Parameter: Age (hr) Value: 6 vs. 0
  misc_feature: MA Experiment 20000179 PARAMETER Experiment Name: At_Germinating_Seeds_P Parameter: Tissue Value: Germinating Seeds
  misc_feature: MA Experiment ID: 20000180 Result: Up-regulated in Transcription
  misc_feature: MA Experiment 20000180 PARAMETER Experiment Name: At_Germinating_Seeds_P Parameter: Age (hr) Value: 24 vs. 0
  misc_feature: MA Experiment 20000180 PARAMETER Experiment Name: At_Germinating_Seeds_P Parameter: Tissue Value: Germinating Seeds
  misc_feature: MA Experiment ID: 20000439 Result: Down-regulated in Transcription
  misc_feature: MA Experiment 20000439 PARAMETER Experiment Name: At_Roots__P Parameter: Age (day) Value: 14 vs. 21
  misc_feature: MA Experiment 20000439 PARAMETER Experiment Name: At_Roots__P Parameter: Organism Value: A. thaliana
  misc_feature: MA Experiment 20000439 PARAMETER Experiment Name: At_Roots__P Parameter: Tissue Value: Roots vs. Whole Plant
  misc_feature: MA Experiment ID: 20001450 Result: Up-regulated in Transcription
  misc_feature: MA Experiment 20001450 PARAMETER Experiment Name: At_Far-red-induction_P Parameter: Age (day) Value: 7
  misc_feature: MA Experiment 20001450 PARAMETER Experiment Name: At_Far-red-induction_P Parameter: Light Value: Far-red vs. White
  misc_feature: MA Experiment 20001450 PARAMETER Experiment Name: At_Far-red-induction_P Parameter: Organism Value: A. thaliana
  misc_feature: MA Experiment 20001450 PARAMETER Experiment Name: At_Far-red-induction_P Parameter: Plant Line Value: Columbia
  misc_feature: MA Experiment 20001450 PARAMETER Experiment Name: At_Far-red-induction_P Parameter: Timepoint (hr) Value: 8
  misc_feature: MA Experiment 20001450 PARAMETER Experiment Name: At_Far-red-induction_P Parameter: Tissue Value: Whole Plant
  misc_feature: MA Experiment ID: 20001557 Result: Down-regulated in Transcription
  misc_feature: MA Experiment 20001557 PARAMETER Experiment Name: At_Drought_Soil_Dry_P Parameter: Age (day) Value: 27
  misc_feature: MA Experiment 20001557 PARAMETER Experiment Name: At_Drought_Soil_Dry_P Parameter: Organism Value: A. thaliana
  misc_feature: MA Experiment 20001557 PARAMETER Experiment Name: At_Drought_Soil_Dry_P Parameter: Plant Line Value: WS
  misc_feature: MA Experiment 20001557 PARAMETER Experiment Name: At_Drought_Soil_Dry_P Parameter: Post Timepoint (hr) Value: 3
  misc_feature: MA Experiment 20001557 PARAMETER Experiment Name: At_Drought_Soil_Dry_P Parameter: Post-Treatment Value: Re-Water vs. No Drought
  misc_feature: MA Experiment 20001557 PARAMETER Experiment Name: At_Drought_Soil_Dry_P Parameter: Timepoint (day) Value: 13
  misc_feature: MA Experiment 20001557 PARAMETER Experiment Name: At_Drought_Soil_Dry_P Parameter: Treatment Value: Drought vs. No Drought
aaacgacaataagctccacagtgagttcttctcagcaatcacaatctatctggtttaagccctcactatcctctctctcaaatcgcggagtctccgaagtttctctggtaattttcaaatctgaagttttgctttggatatcacgatttttgttaatcagccgcgatcgagaagagcgtttttactctctcgttcgcatcaatgcaacatatttcccaatttcgtgatgttgcgtcttcatcgttccttacttctctctttttgagttctgtttggtataaatgcgatccttttttttccttccttgcctaatatttctcgtttccttgcaattacggttataaaaagtcagacaaaatgcagtcgtcaacgtatgcggttaaaggaaacgctgcgtttgcgtttcagagacggaccttctcttctgacagatcgacgacttctaccggaattcgcttcgctggttataagagcttagccaccaccgggccactctactgttctggttctgaagccatgggagcgacgcttgctcgtgctgataacgggatccagagcgttatgagtttctcttctgtcaaagctcgatcggtcagagctcaagcctcatctgatggagatgaagaagaagctatacctctgagatctgaagggaaaagctctggaacagttttgccttttgttggtgttgcttgtcttggtgctatactctttggttatcatctcggggtggttaatggtgctcttgaatatcttgctaaggatcttgggatcgccgaaaatactgttttgcaaggatggattgttagttctctgcttgctggtgctacggtaggttcattcactggaggtgcattagctgacaaatttggacgaacaagaacttttcaattggatgctatcccgcttgccattggagctttcttatgtgcaacagctcagagtgtgcagactatgattgtgggacgtctgctcgctggaattggaattggaatctcatcagcgattgtaccactttacatatctgagatatcaccaactgaaatccgtggagcactcggatctgtgaaccagttgttcatctgtataggaatacttgcagccttgatagctggattaccccttgcagcaaaccctctatggtggaggacgatgtttggtgttgcagttatcccttccgttctattggccataggaatggctttttctccagaaagcccaaggtggctcgttcagcaaggaaaagtctctgaagctgaaaaggcgatcaaaactttgtatggtaaagaaagagtggttgaactagttcgcgacttatcagcctctggccaaggttcttctgagccggaggcaggatggtttgatctattcagcagccgctactggaaagttgtaagcgtaggtgcggctctcttcttgtttcaacagttagccgggataaacgcagttgtgtattactccacatcggtattccgtagtgcgggaatccaatcagatgttgcagccagtgctctcgttggagcatcaaatgtctttggcactgctgttgcttcatcgttgatggataaaatgggaaggaaaagtcttttactgacaagctttggtggaatggctttgtcaatgctgttactctccttgtccttcacatggaaggctcttgctgcctattctggaacccttgccgttgttggaactgttctatatgtcctgtcattctcacttggtgctggcccggtaccggctcttcttcttccagagatatttgcatcccgaatcagagcaaaagccgtcgctctttctctcggcatgcactggatatcaaactttgtgatcggactatacttcttaagcgttgtgactaaattcggaatcagcagtgtctacttgggttttgctggagtctgcgtccttgcggtcctctacattgcaggaaacgtcgtcgagactaaaggtcgatcactggaggaaatagagcttgctcttacatctggagcttgaaattaaacaaaagaaatcagcagaacaaaaaccagtttgtttcatcatttagtttgtgagtctttctctaatctgctactcttaaattgtacaatggacgacgttatcaataacgagaaatcttttcatgaccact

SEQ ID NO: 73985 - protein, 546 aa, Arabidopsis thaliana; identical to SEQ ID NO: 44093
  peptide (1)..(546): Ceres Seq. ID no. 4989203
  misc_feature (108)..(542): Pfam Name: Sugar (and other) transporter Pfam Description: Sugar (and other) transporter
  misc_feature (1)..(546): Homolog of NCBI NO: 18417892 NR Description: sugar transporter-like protein; protein id: supported by cDNA: gi_16648752, supported by cDNA: gi_20259505 thaliana] >gi|16648753|gb|AAL25568.1| AT5g16150/T21H19_70
  misc_feature (1)..(546): Homolog of NCBI NO: 11278994 NR Description: sugar transporter-like protein - Arabidopsis
  misc_feature (34)..(542): Homolog of NCBI NO: 8347250 NR Description: hexose transporter [Arabidopsis thaliana]
  misc_feature (1)..(544): Homolog of NCBI NO: 15625046 NR Description: hexose transporter pGlT [Olea europaea]
  misc_feature (1)..(543): Homolog of NCBI NO: 8347242 NR Description: hexose transporter [Spinacia oleracea]
  misc_feature (1)..(543): Homolog of NCBI NO: 9858106 NR Description: putative glucose translocator [Mesembryanthemum
  misc_feature (72)..(543): Homolog of NCBI NO: 2688830 NR Description: putative sugar transporter [Prunus armeniaca]
  misc_feature (51)..(543): Homolog of NCBI NO: 8347244 NR Description: hexose transporter [Nicotiana tabacum]
  misc_feature (47)..(543): Homolog of NCBI NO: 8347248 NR Description: hexose transporter [Zea mays]
  misc_feature (77)..(543): Homolog of NCBI NO: 8347246 NR Description: hexose transporter [Solanum tuberosum]

SEQ ID NO: 73986 - protein, 493 aa, Arabidopsis thaliana; identical to SEQ ID NO: 44094
  peptide (1)..(493): Ceres Seq. ID no. 4989204
  misc_feature (55)..(489): Pfam Name: Sugar (and other) transporter Pfam Description: Sugar (and other) transporter
  misc_feature (1)..(493): Homolog of NCBI NO: 18417892 NR Description: sugar transporter-like protein; protein id: supported by cDNA: gi_16648752, supported by cDNA: gi_20259505 thaliana] >gi|16648753|gb|AAL25568.1| AT5g16150/T21H19_70
  misc_feature (1)..(493): Homolog of NCBI NO: 11278994 NR Description: sugar transporter-like protein - Arabidopsis
  misc_feature (1)..(489): Homolog of NCBI NO: 8347250 NR Description: hexose transporter [Arabidopsis thaliana]
  misc_feature (1)..(491): Homolog of NCBI NO: 15625046 NR Description: hexose transporter pGlT [Olea europaea]
  misc_feature (1)..(490): Homolog of NCBI NO: 8347242 NR Description: hexose transporter [Spinacia oleracea]
  misc_feature (1)..(490): Homolog of NCBI NO: 9858106 NR Description: putative glucose translocator [Mesembryanthemum
  misc_feature (19)..(490): Homolog of NCBI NO: 2688830 NR Description: putative sugar transporter [Prunus armeniaca]
  misc_feature (1)..(490): Homolog of NCBI NO: 8347244 NR Description: hexose transporter [Nicotiana tabacum]
  misc_feature (1)..(490): Homolog of NCBI NO: 8347248 NR Description: hexose transporter [Zea mays]
  misc_feature (24)..(490): Homolog of NCBI NO: 8347246 NR Description: hexose transporter [Solanum tuberosum]

SEQ ID NO: 73987 - protein, 478 aa, Arabidopsis thaliana; identical to SEQ ID NO: 30167
  peptide (1)..(478): Ceres Seq. ID no. 4989205
  misc_feature (40)..(474): Pfam Name: Sugar (and other) transporter Pfam Description: Sugar (and other) transporter
  misc_feature (1)..(478): Homolog of NCBI NO: 18417892 NR Description: sugar transporter-like protein; protein id: supported by cDNA: gi_16648752, supported by cDNA: gi_20259505 thaliana] >gi|16648753|gb|AAL25568.1| AT5g16150/T21H19_70
  misc_feature (1)..(478): Homolog of NCBI NO: 11278994 NR Description: sugar transporter-like protein - Arabidopsis
  misc_feature (1)..(474): Homolog of NCBI NO: 8347250 NR Description: hexose transporter [Arabidopsis thaliana]
  misc_feature (1)..(476): Homolog of NCBI NO: 15625046 NR Description: hexose transporter pGlT [Olea europaea]
  misc_feature (1)..(475): Homolog of NCBI NO: 8347242 NR Description: hexose transporter [Spinacia oleracea]
  misc_feature (1)..(475): Homolog of NCBI NO: 9858106 NR Description: putative glucose translocator [Mesembryanthemum
  misc_feature (4)..(475): Homolog of NCBI NO: 2688830 NR Description: putative sugar transporter [Prunus armeniaca]
  misc_feature (1)..(475): Homolog of NCBI NO: 8347244 NR Description: hexose transporter [Nicotiana tabacum]
  misc_feature (1)..(475): Homolog of NCBI NO: 8347248 NR Description: hexose transporter [Zea mays]
  misc_feature (9)..(475): Homolog of NCBI NO: 8347246 NR Description: hexose transporter [Solanum tuberosum]

SEQ ID NO: 73988 - DNA, 1200 bp, Arabidopsis thaliana
  misc_feature (1)..(1200): Ceres Seq. ID no. 4989667
  misc_feature: MA Experiment ID: 20000315 Result: Down-regulated in Transcription
  misc_feature: MA Experiment 20000315 PARAMETER Experiment Name: At_14day_Shoots-Roots_Sub_P Parameter: Age (day) Value: 14
  misc_feature: MA Experiment 20000315 PARAMETER Experiment Name: At_14day_Shoots-Roots_Sub_P Parameter: Organism Value: A. thaliana
  misc_feature: MA Experiment 20000315 PARAMETER Experiment Name: At_14day_Shoots-Roots_Sub_P Parameter: Plant Line Value: WS
  misc_feature: MA Experiment 20000315 PARAMETER Experiment Name: At_14day_Shoots-Roots_Sub_P Parameter: Tissue Value: Shoots vs. Whole Plant
  misc_feature: MA Experiment ID: 20000327 Result: Up-regulated in Transcription
  misc_feature: MA Experiment 20000327 PARAMETER Experiment Name: At_42deg_Heat_Sub_P Parameter: Age (day) Value: 14
  misc_feature: MA Experiment 20000327 PARAMETER Experiment Name: At_42deg_Heat_Sub_P Parameter: Organism Value: A. thaliana
  misc_feature: MA Experiment 20000327 PARAMETER Experiment Name: At_42deg_Heat_Sub_P Parameter: Plant Line Value: WS
  misc_feature: MA Experiment 20000327 PARAMETER Experiment Name: At_42deg_Heat_Sub_P Parameter: Temperature (deg C) Value: 42 vs. 22
  misc_feature: MA Experiment 20000327 PARAMETER Experiment Name: At_42deg_Heat_Sub_P Parameter: Timepoint (hr) Value: 1
  misc_feature: MA Experiment 20000327 PARAMETER Experiment Name: At_42deg_Heat_Sub_P Parameter: Tissue Value: Aerial
  misc_feature: MA Experiment ID: 20000328 Result: Up-regulated in Transcription
  misc_feature: MA Experiment 20000328 PARAMETER Experiment Name: At_42deg_Heat_Sub_P Parameter: Age (day) Value: 14
  misc_feature: MA Experiment 20000328 PARAMETER Experiment Name: At_42deg_Heat_Sub_P Parameter: Organism Value: A. thaliana
  misc_feature: MA Experiment 20000328 PARAMETER Experiment Name: At_42deg_Heat_Sub_P Parameter: Plant Line Value: WS
  misc_feature: MA Experiment 20000328 PARAMETER Experiment Name: At_42deg_Heat_Sub_P Parameter: Temperature (deg C) Value: 42 vs. 22
  misc_feature: MA Experiment 20000328 PARAMETER Experiment Name: At_42deg_Heat_Sub_P Parameter: Timepoint (hr) Value: 6
  misc_feature: MA Experiment 20000328 PARAMETER Experiment Name: At_42deg_Heat_Sub_P Parameter: Tissue Value: Aerial
atggagtggatggagaatcaaaaagatattgaatttagtgtttatgacattgctcttagattggatttgatcatcaaaactcatggcttgaaacaaggagaggagtattttgagaagctgctacatagttctgtgtctatgagagtagcgaaatcggcttatcttccgcttcttcgtgcttatgtgaagaataaaatggttaaagaagcggaagctctaatggagaagttgaatggattagggtttcttgttactccacacccgtttaacgaaatgatgaagctttatgaagctagtggtcagtatgagaaagtagttatggttgtttcgatgatgaaagggaataagataccaagaaacgttctttcgtataatctttggatgaatgcatgttgtgaagtgtctggagttgcggctgtggaaacggtttataaggaaatggttggtgataagagtgttgaagttgggtggagttcgttgtgtactttagctaatgtttatattaagagtggttttgatgagaaggctaggttggtgcttgaggatgcggaaaagatgttgaatagaagtaataggcttggatatttctttcttatcacgctttatgcgtctttagggaataaggaaggagttgttcgtttgtgggaagtttctaaatcggtttgtggtaggattagttgtgtgaactacatatgtgtattgtcgtctttggtgaaaactggtgatcttgaagaggctgaaagggtgtttagtgagtgggaggctcaatgttttaactatgatgttagggtctccaatgttcttttgggtgcttatgtgcgtaatggagaaatccggaaagccgagtcattgcatggttgtgtgttggagagaggaggtactccaaactacaagacctgggaaatcttaatggagggatgggtgaaatgtgagaatatggagaaagccattgatgctatgcaccaagtgtttgtactaatgaggcggtgtcattggaggccatcccataacatcgtcatggcgattgccgagtactttgagaaagaggagaaaattgaagaagcaactgcatatgttagagatttgcatcgtcttggtcttgcaagcttaccattatacagattgttacttagaatgcatgaacatgccaaaagaccagcttatgatatctatgaaatgatgaagttggacaaactatga

SEQ ID NO: 73989 - protein, 399 aa, Arabidopsis thaliana; identical to SEQ ID NO: 70137
  peptide (1)..(399): Ceres Seq. ID no. 4989668
  misc_feature (1)..(399): Homolog of NCBI NO: 15240937 NR Description: putative protein; protein id: At5g27460.1
  misc_feature (2)..(382): Homolog of NCBI NO: 20453085 NR Description: At1g02150/T7I23.8 [Arabidopsis thaliana]
  misc_feature (2)..(382): Homolog of NCBI NO: 22329290 NR Description: hypothetical protein; protein id: At1g02150.1, by cDNA: gi_20453084 [Arabidopsis thaliana]
  misc_feature (2)..(399): Homolog of NCBI NO: 15235508 NR Description: hypothetical protein; protein id: At4g02820.1, by cDNA: gi_17064737 [Arabidopsis thaliana]
  misc_feature (2)..(399): Homolog of NCBI NO: 17064738 NR Description: Unknown protein [Arabidopsis thaliana]
  misc_feature (2)..(355): Homolog of NCBI NO: 15219808 NR Description: hypothetical protein; protein id: At1g60770.1
  misc_feature (2)..(350): Homolog of NCBI NO: 32488964 NR Description: OSJNBb0038F03.9 [Oryza sativa (japonica
  misc_feature (3)..(397): Homolog of NCBI NO: 37535774 NR Description: putative leaf protein [Oryza sativa (japonica group)] >gi|22165052|gb|AAM93669.1| putative leaf protein [Oryza
  misc_feature (3)..(397): Homolog of NCBI NO: 37535776 NR Description: putative leaf protein [Oryza sativa (japonica group)] >gi|22165054|gb|AAM93671.1| putative leaf protein [Oryza
  misc_feature (2)..(366): Homolog of NCBI NO: 15225409 NR Description: hypothetical protein; protein id: At2g20710.1

SEQ ID NO: 73990 - protein, 396 aa, Arabidopsis thaliana
  peptide (1)..(396): Ceres Seq. ID no. 4989669
  misc_feature (1)..(396): Homolog of NCBI NO: 15240937 NR Description: putative protein; protein id: At5g27460.1
  misc_feature (1)..(379): Homolog of NCBI NO: 20453085 NR Description: At1g02150/T7I23.8 [Arabidopsis thaliana]
  misc_feature (1)..(379): Homolog of NCBI NO: 22329290 NR Description: hypothetical protein; protein id: At1g02150.1, by cDNA: gi_20453084 [Arabidopsis thaliana]
  misc_feature (1)..(396): Homolog of NCBI NO: 15235508 NR Description: hypothetical protein; protein id: At4g02820.1, by cDNA: gi_17064737 [Arabidopsis thaliana]
  misc_feature (1)..(396): Homolog of NCBI NO: 17064738 NR Description: Unknown protein [Arabidopsis thaliana]
  misc_feature (1)..(352): Homolog of NCBI NO: 15219808 NR Description: hypothetical protein; protein id: At1g60770.1
  misc_feature (1)..(347): Homolog of NCBI NO: 32488964 NR Description: OSJNBb0038F03.9 [Oryza sativa (japonica
  misc_feature (1)..(394): Homolog of NCBI NO: 37535774 NR Description: putative leaf protein [Oryza sativa (japonica group)] >gi|22165052|gb|AAM93669.1| putative leaf protein [Oryza
  misc_feature (1)..(394): Homolog of NCBI NO: 37535776 NR Description: putative leaf protein [Oryza sativa (japonica group)] >gi|22165054|gb|AAM93671.1| putative leaf protein [Oryza
  misc_feature (1)..(363): Homolog of NCBI NO: 15225409 NR Description: hypothetical protein; protein id: At2g20710.1
MENQKDIEFSVYDIALRLDLIIKTHGLKQGEEYFEKLLHSSVSMRVAKSAYLPLLRAYVKNKMVKEAEALMEKLNGLGFLVTPHPFNEMMKLYEASGQYEKVVMVVSMMKGNKIPRNVLSYNLWMNACCEVSGVAAVETVYKEMVGDKSVEVGWSSLCTLANVYIKSGFDEKARLVLEDAEKMLNRSNRLGYFFLITLYASLGNKEGVVRLWEVSKSVCGRISCVNYICVLSSLVKTGDLEEAERVFSEWEAQCFNYDVRVSNVLLGAYVRNGEIRKAESLHGCVLERGGTPNYKTWEILMEGWVKCENMEKAIDAMHQVFVLMRRCHWRPSHNIVMAIAEYFEKEEKIEEATAYVRDLHRLGLASLPLYRLLLRMHEHAKRPAYDIYEMMKLDKL

SEQ ID NO: 73991 - protein, 353 aa, Arabidopsis thaliana
  peptide (1)..(353): Ceres Seq. ID no. 4989670
  misc_feature (1)..(353): Homolog of NCBI NO: 15240937 NR Description: putative protein; protein id: At5g27460.1
  misc_feature (1)..(336): Homolog of NCBI NO: 20453085 NR Description: At1g02150/T7I23.8 [Arabidopsis thaliana]
  misc_feature (1)..(336): Homolog of NCBI NO: 22329290 NR Description: hypothetical protein; protein id: At1g02150.1, by cDNA: gi_20453084 [Arabidopsis thaliana]
  misc_feature (1)..(353): Homolog of NCBI NO: 15235508 NR Description: hypothetical protein; protein id: At4g02820.1, by cDNA: gi_17064737 [Arabidopsis thaliana]
  misc_feature (1)..(353): Homolog of NCBI NO: 17064738 NR Description: Unknown protein [Arabidopsis thaliana]
  misc_feature (1)..(309): Homolog of NCBI NO: 15219808 NR Description: hypothetical protein; protein id: At1g60770.1
  misc_feature (1)..(304): Homolog of NCBI NO: 32488964 NR Description: OSJNBb0038F03.9 [Oryza sativa (japonica
  misc_feature (1)..(351): Homolog of NCBI NO: 37535774 NR Description: putative leaf protein [Oryza sativa (japonica group)] >gi|22165052|gb|AAM93669.1| putative leaf protein [Oryza
  misc_feature (1)..(351): Homolog of NCBI NO: 37535776 NR Description: putative leaf protein [Oryza sativa (japonica group)] >gi|22165054|gb|AAM93671.1| putative leaf protein [Oryza
  misc_feature (1)..(320): Homolog of NCBI NO: 15225409 NR Description: hypothetical protein; protein id: At2g20710.1
MRVAKSAYLPLLRAYVKNKMVKEAEALMEKLNGLGFLVTPHPFNEMMKLYEASGQYEKVVMVVSMMKGNKIPRNVLSYNLWMNACCEVSGVAAVETVYKEMVGDKSVEVGWSSLCTLANVYIKSGFDEKARLVLEDAEKMLNRSNRLGYFFLITLYASLGNKEGVVRLWEVSKSVCGRISCVNYICVLSSLVKTGDLEEAERVFSEWEAQCFNYDVRVSNVLLGAYVRNGEIRKAESLHGCVLERGGTPNYKTWEILMEGWVKCENMEKAIDAMHQVFVLMRRCHWRPSHNIVMAIAEYFEKEEKIEEATAYVRDLHRLGLASLPLYRLLLRMHEHAKRPAYDIYEMMKLDKL

SEQ ID NO: 73992 - DNA, 1918 bp, Arabidopsis thaliana
  misc_feature (1)..(1918): Ceres Seq. ID no. 4989983
  misc_feature: MA Experiment ID: 108461 Result: Down-regulated in Transcription
  misc_feature: MA Experiment 108461 PARAMETER Experiment Name: At_Germinating_Seeds_cDNA_P Parameter: Age (day) Value: 1 vs. 0
  misc_feature: MA Experiment 108461 PARAMETER Experiment Name: At_Germinating_Seeds_cDNA_P Parameter: Tissue Value: Germinating Seeds
  misc_feature: MA Experiment ID: 108462 Result: Down-regulated in Transcription
  misc_feature: MA Experiment 108462 PARAMETER Experiment Name: At_Germinating_Seeds_cDNA_P Parameter: Age (day) Value: 2 vs. 0
  misc_feature: MA Experiment 108462 PARAMETER Experiment Name: At_Germinating_Seeds_cDNA_P Parameter: Tissue Value: Germinating Seeds
  misc_feature: MA Experiment ID: 108463 Result: Down-regulated in Transcription
  misc_feature: MA Experiment 108463 PARAMETER Experiment Name: At_Germinating_Seeds_cDNA_P Parameter: Age (day) Value: 3 vs. 0
  misc_feature: MA Experiment 108463 PARAMETER Experiment Name: At_Germinating_Seeds_cDNA_P Parameter: Tissue Value: Germinating Seeds
  misc_feature: MA Experiment ID: 108464 Result: Down-regulated in Transcription
  misc_feature: MA Experiment 108464 PARAMETER Experiment Name: At_Germinating_Seeds_cDNA_P Parameter: Age (day) Value: 4 vs. 0
  misc_feature: MA Experiment 108464 PARAMETER Experiment Name: At_Germinating_Seeds_cDNA_P Parameter: Tissue Value: Germinating Seeds
  misc_feature: MA Experiment ID: 20001556 Result: Up-regulated in Transcription
  misc_feature: MA Experiment 20001556 PARAMETER Experiment Name: At_Drought_Soil_Dry_P Parameter: Age (day) Value: 26
  misc_feature: MA Experiment 20001556 PARAMETER Experiment Name: At_Drought_Soil_Dry_P Parameter: Organism Value: A. thaliana
  misc_feature: MA Experiment 20001556 PARAMETER Experiment Name: At_Drought_Soil_Dry_P Parameter: Plant Line Value: WS
  misc_feature: MA Experiment 20001556 PARAMETER Experiment Name: At_Drought_Soil_Dry_P Parameter: Post Timepoint (hr) Value: None
  misc_feature: MA Experiment 20001556 PARAMETER Experiment Name: At_Drought_Soil_Dry_P Parameter: Post-Treatment Value: None
  misc_feature: MA Experiment 20001556 PARAMETER Experiment Name: At_Drought_Soil_Dry_P Parameter: Timepoint (day) Value: 12
  misc_feature: MA Experiment 20001556 PARAMETER Experiment Name: At_Drought_Soil_Dry_P Parameter: Treatment Value: Drought vs. No Drought
gtacttgatatttaaaatcgatttctgatacacttgttagattgagacaatgagcaagggggcggcaataatagcttatgcaaatcccatctttcatattcgacatctaaagcttgaatctttcttgtggaacatcatcattcgtgccattgttcacaatgtttcgtcgcctcaacgacattctccgatctcagtctacctccgtatgcgcaaccatcgcgtctctcccgattttcatacctttccgtttcttctcccttctttccacaatccgcttcatcttcctcttgggcaacgaactcatgctcagattcttctttttggacttgacaaagacccatttgtccgaacttcactgctcaacatgtattcttcctgtggcgacttgagatcagctcagcgagttttcgatgactcgggctcgaaggatttaccggcctggaactctgtggtcaatgcttatgccaaagctgggttgatcgatgatgcgcggaaactgttcgacgaaatgcctgaaagaaacgtgatttcctggagctgcttgattaacggctacgttatgtgtgggaaatacaaagaagcgcttgatttgttccgggagatgcaattacctaaaccaaacgaagcattcgtcagacccaacgagtttacaatgtcgactgtactctcggcttgtgggcgattgggtgcgctcgagcaagggaaatgggttcacgcttacatcgataagtaccacgttgagattgacattgtcttaggcacagctctcattgatatgtacgccaaatgtgggagcctcgagagggcgaaaagggttttcaatgccttgggatccaagaaagatgtcaaagcttacagtgctatgatatgttgcttagcaatgtacggtctcacagatgagtgcttccaactgttctctgagatgaccacgagtgacaacataaacccaaactctgtgacatttgtgggcattctcggtgcttgtgtacatcgaggtctaataaacgaaggaaaatcttactttaaaatgatgattgaggaatttggtatcacgccatcaatccagcattatggttgtatggttgatctctacggaagatctggtttgatcaaagaagcagagagctttatagcatctatgcctatggagcctgatgtacttatttgggggtctctcttaagcggatcaagaatgcttggggatatcaagacttgtgaaggtgccctcaagcgactcatcgagctagatcctatgaacagtggagcatatgtgcttctctctaacgtctatgccaaaacagggaggtggatggaagtcaagtgtatcagacacgaaatggaggcaatgcaaaactatttccctcttttccaactcttttcttaactgttgcacagtttctgaagtaaatacagattctctctacaggtaaagggcattaataaagttccgggatgtagctatgttgaagtagagggagtggttcacgagtttgttgtaggagacgaatctcaacaagagagcgaaaggatctatgctatgctcgatgagataatgcagaggctgagagaagctggatatgttacagacactaaggaggttttacttgatcttaacgagaaagataaagagatagctttgtcttaccacagtgagaaactggctattgcgttctgtttgatgaagacaaggcctggaactccagtgagaatcatcaagaacctcagaatctgtggagattgtcatcttgtaatgaagatgatctcgaagctttttagtagagaaattgttgtgagagattgtaatagatttcaccattttagagacgggtcttgctcttgcagagatttttggtgataacaattgcagcaatgtttgtgttggattgaataaacacattactgaattttggaggttttg

SEQ ID NO: 73993 - protein, 444 aa, Arabidopsis thaliana
  peptide (1)..(444): Ceres Seq. ID no. 4989984
  misc_feature (339)..(373): Pfam Name: PPR repeat Pfam Description: PPR repeat
  misc_feature (1)..(422): Homolog of NCBI NO: 15229340 NR Description: putative protein; protein id: At3g62890.1
  misc_feature (29)..(432): Homolog of NCBI NO: 34915288 NR Description: similar to selenium-binding protein [Oryza sativa
  misc_feature (95)..(432): Homolog of NCBI NO: 34899166 NR Description: similar to selenium-binding protein [Oryza sativa
  misc_feature (97)..(430): Homolog of NCBI NO: 8778758 NR Description: T30E16.32 [Arabidopsis thaliana]
  misc_feature (97)..(430): Homolog of NCBI NO: 25346319 NR Description: hypothetical protein F23H11.3 [imported] - thaliana >gi|5080805|gb|AAD39314.1|AC007258_3 Hypothetical
  misc_feature (97)..(430): Homolog of NCBI NO: 15218900 NR Description: hypothetical protein; protein id: At1g59720.1
  misc_feature (72)..(431): Homolog of NCBI NO: 15227067 NR Description: hypothetical protein; protein id: At2g02980.1
  misc_feature (72)..(431): Homolog of NCBI NO: 21780142 NR Description: hypothetical protein [Arabidopsis thaliana]
  misc_feature (112)..(430): Homolog of NCBI NO: 15221306 NR Description: hypothetical protein; protein id: At1g74630.1
  misc_feature (1)..(427): Homolog of NCBI NO: 15241448 NR Description: selenium-binding protein-like; protein id:
MSKGAAIIAYANPIFHIRHLKLESFLWNIIIRAIVHNVSSPQRHSPISVYLRMRNHRVSPDFHTFPFLLPSFHNPLHLPLGQRTHAQILLFGLDKDPFVRTSLLNMYSSCGDLRSAQRVFDDSGSKDLPAWNSVVNAYAKAGLIDDARKLFDEMPERNVISWSCLINGYVMCGKYKEALDLFREMQLPKPNEAFVRPNEFTMSTVLSACGRLGALEQGKWVHAYIDKYHVEIDIVLGTALIDMYAKCGSLERAKRVFNALGSKKDVKAYSAMICCLAMYGLTDECFQLFSEMTTSDNINPNSVTFVGILGACVHRGLINEGKSYFKMMIEEFGITPSIQHYGCMVDLYGRSGLIKEAESFIASMPMEPDVLIWGSLLSGSRMLGDIKTCEGALKRLIELDPMNSGAYVLLSNVYAKTGRWMEVKCIRHEMEAMQNYFPLFQLFS

SEQ ID NO: 73994 - protein, 392 aa, Arabidopsis thaliana
  peptide (1)..(392): Ceres Seq. ID no. 4989985
  misc_feature (287)..(321): Pfam Name: PPR repeat Pfam Description: PPR repeat
  misc_feature (1)..(370): Homolog of NCBI NO: 15229340 NR Description: putative protein; protein id: At3g62890.1
  misc_feature (1)..(380): Homolog of NCBI NO: 34915288 NR Description: similar to selenium-binding protein [Oryza sativa
  misc_feature (43)..(380): Homolog of NCBI NO: 34899166 NR Description: similar to selenium-binding protein [Oryza sativa
  misc_feature (45)..(378): Homolog of NCBI NO: 8778758 NR Description: T30E16.32 [Arabidopsis thaliana]
  misc_feature (45)..(378): Homolog of NCBI NO: 15218900 NR Description: hypothetical protein; protein id: At1g59720.1
  misc_feature (45)..(378): Homolog of NCBI NO: 25346319 NR Description: hypothetical protein F23H11.3 [imported] - thaliana >gi|5080805|gb|AAD39314.1|AC007258_3 Hypothetical
  misc_feature (20)..(379): Homolog of NCBI NO: 15227067 NR Description: hypothetical protein; protein id: At2g02980.1
  misc_feature (20)..(379): Homolog of NCBI NO: 21780142 NR Description: hypothetical protein [Arabidopsis thaliana]
  misc_feature (60)..(378): Homolog of NCBI NO: 15221306 NR Description: hypothetical protein; protein id: At1g74630.1
  misc_feature (1)..(375): Homolog of NCBI NO: 15241448 NR Description: selenium-binding protein-like; protein id:
MRNHRVSPDFHTFPFLLPSFHNPLHLPLGQRTHAQILLFGLDKDPFVRTSLLNMYSSCGDLRSAQRVFDDSGSKDLPAWNSVVNAYAKAGLIDDARKLFDEMPERNVISWSCLINGYVMCGKYKEALDLFREMQLPKPNEAFVRPNEFTMSTVLSACGRLGALEQGKWVHAYIDKYHVEIDIVLGTALIDMYAKCGSLERAKRVFNALGSKKDVKAYSAMICCLAMYGLTDECFQLFSEMTTSDNINPNSVTFVGILGACVHRGLINEGKSYFKMMIEEFGITPSIQHYGCMVDLYGRSGLIKEAESFIASMPMEPDVLIWGSLLSGSRMLGDIKTCEGALKRLIELDPMNSGAYVLLSNVYAKTGRWMEVKCIRHEMEAMQNYFPLFQLFS

SEQ ID NO: 73995 - protein, 339 aa, Arabidopsis thaliana
  peptide (1)..(339): Ceres Seq. ID no. 4989986
  misc_feature (234)..(268): Pfam Name: PPR repeat Pfam Description: PPR repeat
  misc_feature (1)..(317): Homolog of NCBI NO: 15229340 NR Description: putative protein; protein id: At3g62890.1
  misc_feature (1)..(327): Homolog of NCBI NO: 34915288 NR Description: similar to selenium-binding protein [Oryza sativa
  misc_feature (1)..(327): Homolog of NCBI NO: 34899166 NR Description: similar to selenium-binding protein [Oryza sativa
  misc_feature (1)..(325): Homolog of NCBI NO: 8778758 NR Description: T30E16.32 [Arabidopsis thaliana]
  misc_feature (1)..(325): Homolog of NCBI NO: 15218900 NR Description: hypothetical protein; protein id: At1g59720.1
  misc_feature (1)..(325): Homolog of NCBI NO: 25346319 NR Description: hypothetical protein F23H11.3 [imported] - thaliana >gi|5080805|gb|AAD39314.1|AC007258_3 Hypothetical
  misc_feature (1)..(326): Homolog of NCBI NO: 15227067 NR Description: hypothetical protein; protein id: At2g02980.1
  misc_feature (1)..(326): Homolog of NCBI NO: 21780142 NR Description: hypothetical protein [Arabidopsis thaliana]
  misc_feature (7)..(325): Homolog of NCBI NO: 15221306 NR Description: hypothetical protein; protein id: At1g74630.1
  misc_feature (1)..(322): Homolog of NCBI NO: 15241448 NR Description: selenium-binding protein-like; protein id:
MYSSCGDLRSAQRVFDDSGSKDLPAWNSVVNAYAKAGLIDDARKLFDEMPERNVISWSCLINGYVMCGKYKEALDLFREMQLPKPNEAFVRPNEFTMSTVLSACGRLGALEQGKWVHAYIDKYHVEIDIVLGTALIDMYAKCGSLERAKRVFNALGSKKDVKAYSAMICCLAMYGLTDECFQLFSEMTTSDNINPNSVTFVGILGACVHRGLINEGKSYFKMMIEEFGITPSIQHYGCMVDLYGRSGLIKEAESFIASMPMEPDVLIWGSLLSGSRMLGDIKTCEGALKRLIELDPMNSGAYVLLSNVYAKTGRWMEVKCIRHEMEAMQNYFPLFQLFS

SEQ ID NO: 73996 - DNA, 864 bp, Arabidopsis thaliana
  misc_feature (1)..(864): Ceres Seq. ID no. 4989995
  misc_feature: MA Experiment ID: 20000184 Result: Down-regulated in Transcription
  misc_feature: MA Experiment 20000184 PARAMETER Experiment Name: At_Shoots__P Parameter: Age (day) Value: 7
  misc_feature: MA Experiment 20000184 PARAMETER Experiment Name: At_Shoots__P Parameter: Tissue Value: Shoots vs. Whole Plant
atgggaggaagtgctagtctccagtcagactcgatggaagcagcagcagcagcagattcttcgattcccagagacaaagactttggcaaattccaattcggatgcgagcactacaagagacgatgtaaaatcagagctccttgctgcaatctcatcttctcatgccgccattgccacaacgactctgcgaattctcttcctgatcctaaagaacgtcatgatttggtccgccaaaacgtcaaacaggttgtttgttcaatttgtcaaactgagcaagaggttgctaaagtctgctcgaattgtggcgtcaatatgggagaatacttttgcgatatctgcaaattctttgacgacgatatttcgaaagaacagtttcattgtgatgactgtggaatttgtagagttggtgggcgtgacaaattctttcattgccagaactgtggagcttgctacggaatgggcttgcgcgataaacactcgtgcattgagaactctacaaaaaattcttgtcctgtctgttatgagtatctatttgattcggtaaaggccgcacatgtgatgaaatgtggtcatacaatgcatatggattgctttgaacaaatgatcaatgaaaaccagtaccgatgcccaatttgtgccaagtcaatggtggatatgtctccttcgtggcacctattagatttcgagataagcgcaacagagatgcctgttgagtacaagtttgaggtttcaattctctgcaatgactgcaacaaggggagtaaagctatgttccacattttgggacacaagtgcagtgattgcggttcatacaacactcggagaatctcaacgccacaagatccagtgagtgaaacagagtga

SEQ ID NO: 73997 - protein, 287 aa, Arabidopsis thaliana
  peptide (1)..(287): Ceres Seq. ID no. 4989996
  misc_feature (35)..(117): Pfam Name: CHY zinc finger Pfam Description: CHY zinc finger
  misc_feature (1)..(287): Homolog of NCBI NO: 30695702 NR Description: expressed protein [Arabidopsis thaliana]
  misc_feature (12)..(287): Homolog of NCBI NO: 30102616 NR Description: At3g62970 [Arabidopsis thaliana]
  misc_feature (1)..(287): Homolog of NCBI NO: 11358168 NR Description: hypothetical protein T20O10.70 - Arabidopsis >gi|7573426|emb|CAB87742.1| putative protein [Arabidopsis
  misc_feature (23)..(282): Homolog of NCBI NO: 15238890 NR Description: putative protein; protein id: At5g18650.1, by cDNA: gi_17381207, supported by cDNA: gi_20465812 [Arabidopsis >gi|17381208|gb|AAL36416.1| unknown protein [Arabidopsis
  misc_feature (27)..(281): Homolog of NCBI NO: 15237169 NR Description: PGPD14 protein; protein id: At5g22920.1, by cDNA: 41666., supported by cDNA: gi_15450520 [Arabidopsis >gi|10177239|dbj|BAB10613.1| PGPD14 protein [Arabidopsis
  misc_feature (27)..(281): Homolog of NCBI NO: 21593716 NR Description: PGPD14 protein [Arabidopsis thaliana]
  misc_feature (7)..(275): Homolog of NCBI NO: 4105798 NR Description: PGPD14 [Petunia x hybrida]
  misc_feature (6)..(276): Homolog of NCBI NO: 34910658 NR Description: putative PGPD14 protein (pollen germination
  misc_feature (32)..(274): Homolog of NCBI NO: 37535002 NR Description: putative PGPD14 protein (pollen germination
  misc_feature (34)..(273): Homolog of NCBI NO: 13925695 NR Description: zinc finger protein [Danio rerio]
MGGSASLQSDSMEAAAAADSSIPRDKDFGKFQFGCEHYKRRCKIRAPCCNLIFSCRHCHNDSANSLPDPKERHDLVRQNVKQVVCSICQTEQEVAKVCSNCGVNMGEYFCDICKFFDDDISKEQFHCDDCGICRVGGRDKFFHCQNCGACYGMGLRDKHSCIENSTKNSCPVCYEYLFDSVKAAHVMKCGHTMHMDCFEQMINENQYRCPICAKSMVDMSPSWHLLDFEISATEMPVEYKFEVSILCNDCNKGSKAMFHILGHKCSDCGSYNTRRISTPQDPVSETE

SEQ ID NO: 73998 - protein, 276 aa, Arabidopsis thaliana
  peptide (1)..(276): Ceres Seq. ID no. 4989997
  misc_feature (24)..(106): Pfam Name: CHY zinc finger Pfam Description: CHY zinc finger
  misc_feature (1)..(276): Homolog of NCBI NO: 30695702 NR Description: expressed protein [Arabidopsis thaliana]
  misc_feature (1)..(276): Homolog of NCBI NO: 30102616 NR Description: At3g62970 [Arabidopsis thaliana]
  misc_feature (1)..(276): Homolog of NCBI NO: 11358168 NR Description: hypothetical protein T20O10.70 - Arabidopsis >gi|7573426|emb|CAB87742.1| putative protein [Arabidopsis
  misc_feature (12)..(271): Homolog of NCBI NO: 15238890 NR Description: putative protein; protein id: At5g18650.1, by cDNA: gi_17381207, supported by cDNA: gi_20465812 [Arabidopsis >gi|17381208|gb|AAL36416.1| unknown protein [Arabidopsis
  misc_feature (16)..(270): Homolog of NCBI NO: 15237169 NR Description: PGPD14 protein; protein id: At5g22920.1, by cDNA: 41666., supported by cDNA: gi_15450520 [Arabidopsis >gi|10177239|dbj|BAB10613.1| PGPD14 protein [Arabidopsis
  misc_feature (16)..(270): Homolog of NCBI NO: 21593716 NR Description: PGPD14 protein [Arabidopsis thaliana]
  misc_feature (1)..(264): Homolog of NCBI NO: 4105798 NR Description: PGPD14 [Petunia x hybrida]
  misc_feature (1)..(265): Homolog of NCBI NO: 34910658 NR Description: putative PGPD14 protein (pollen germination
  misc_feature (21)..(263): Homolog of NCBI NO: 37535002 NR Description: putative PGPD14 protein (pollen germination
  misc_feature (23)..(262): Homolog of NCBI NO: 13925695 NR Description: zinc finger protein [Danio rerio]
MEAAAAADSSIPRDKDFGKFQFGCEHYKRRCKIRAPCCNLIFSCRHCHNDSANSLPDPKERHDLVRQNVKQVVCSICQTEQEVAKVCSNCGVNMGEYFCDICKFFDDDISKEQFHCDDCGICRVGGRDKFFHCQNCGACYGMGLRDKHSCIENSTKNSCPVCYEYLFDSVKAAHVMKCGHTMHMDCFEQMINENQYRCPICAKSMVDMSPSWHLLDFEISATEMPVEYKFEVSILCNDCNKGSKAMFHILGHKCSDCGSYNTRRISTPQDPVSETE

SEQ ID NO: 73999 - protein, 183 aa, Arabidopsis thaliana
  peptide (1)..(183): Ceres Seq. ID no. 4989998
  misc_feature (66)..(108): Pfam Name: Zinc finger, C3HC4 type (RING finger) Pfam Description: Zinc finger, C3HC4 type (RING finger)
  misc_feature (1)..(183): Homolog of NCBI NO: 30695702 NR Description: expressed protein [Arabidopsis thaliana]
  misc_feature (1)..(183): Homolog of NCBI NO: 30102616 NR Description: At3g62970 [Arabidopsis thaliana]
  misc_feature (1)..(183): Homolog of NCBI NO: 11358168 NR Description: hypothetical protein T20O10.70 - Arabidopsis >gi|7573426|emb|CAB87742.1| putative protein [Arabidopsis
  misc_feature (1)..(178): Homolog of NCBI NO: 15238890 NR Description: putative protein; protein id: At5g18650.1, by cDNA: gi_17381207, supported by cDNA: gi_20465812 [Arabidopsis >gi|17381208|gb|AAL36416.1| unknown protein [Arabidopsis
  misc_feature (1)..(177): Homolog of NCBI NO: 15237169 NR Description: PGPD14 protein; protein id: At5g22920.1, by cDNA: 41666., supported by cDNA: gi_15450520 [Arabidopsis >gi|10177239|dbj|BAB10613.1| PGPD14 protein [Arabidopsis
  misc_feature (1)..(177): Homolog of NCBI NO: 21593716 NR Description: PGPD14 protein [Arabidopsis thaliana]
  misc_feature (1)..(171): Homolog of NCBI NO: 4105798 NR Description: PGPD14 [Petunia x hybrida]
  misc_feature (1)..(172): Homolog of NCBI NO: 34910658 NR Description: putative PGPD14 protein (pollen germination
  misc_feature (1)..(170): Homolog of NCBI NO: 37535002 NR Description: putative PGPD14 protein (pollen germination
  misc_feature (1)..(169): Homolog of NCBI NO: 13925695 NR Description: zinc finger protein [Danio rerio]
MGEYFCDICKFFDDDISKEQFHCDDCGICRVGGRDKFFHCQNCGACYGMGLRDKHSCIENSTKNSCPVCYEYLFDSVKAAHVMKCGHTMHMDCFEQMINENQYRCPICAKSMVDMSPSWHLLDFEISATEMPVEYKFEVSILCNDCNKGSKAMFHILGHKCSDCGSYNTRRISTPQDPVSETE

SEQ ID NO: 74000 - DNA, 1296 bp, Arabidopsis thaliana
  misc_feature (1)..(1296): Ceres Seq. ID no. 4991085
  misc_feature: MA Experiment ID: 20001451 Result: Up-regulated in Transcription
  misc_feature: MA Experiment 20001451 PARAMETER Experiment Name: At_Far-red-induction_P Parameter: Age (day) Value: 7
  misc_feature: MA Experiment 20001451 PARAMETER Experiment Name: At_Far-red-induction_P Parameter: Light Value: Far-red vs. White
  misc_feature: MA Experiment 20001451 PARAMETER Experiment Name: At_Far-red-induction_P Parameter: Organism Value: A. thaliana
  misc_feature: MA Experiment 20001451 PARAMETER Experiment Name: At_Far-red-induction_P Parameter: Plant Line Value: Columbia
  misc_feature: MA Experiment 20001451 PARAMETER Experiment Name: At_Far-red-induction_P Parameter: Timepoint (hr) Value: 24
  misc_feature: MA Experiment 20001451 PARAMETER Experiment Name: At_Far-red-induction_P Parameter: Tissue Value: Whole Plant
  misc_feature: MA Experiment ID: 20001905 Result: Up-regulated in Transcription
  misc_feature: MA Experiment 20001905 PARAMETER Experiment Name: At_Drought_Reproduction_P Parameter: Age (day) Value: 40
  misc_feature: MA Experiment 20001905 PARAMETER Experiment Name: At_Drought_Reproduction_P Parameter: Organism Value: A. thaliana
  misc_feature: MA Experiment 20001905 PARAMETER Experiment Name: At_Drought_Reproduction_P Parameter: Plant Line Value: WS
  misc_feature: MA Experiment 20001905 PARAMETER Experiment Name: At_Drought_Reproduction_P Parameter: Timepoint (day) Value: 10
  misc_feature: MA Experiment 20001905 PARAMETER Experiment Name: At_Drought_Reproduction_P Parameter: Tissue Value: Rosettes
  misc_feature: MA Experiment 20001905 PARAMETER Experiment Name: At_Drought_Reproduction_P Parameter: Treatment Value: Drought vs. No Drought
  misc_feature: MA Experiment ID: 20001911 Result: Up-regulated in Transcription
  misc_feature: MA Experiment 20001911 PARAMETER Experiment Name: At_Drought_Reproduction_P Parameter: Age (day) Value: 40
  misc_feature: MA Experiment 20001911 PARAMETER Experiment Name: At_Drought_Reproduction_P Parameter: Organism Value: A. thaliana
  misc_feature: MA Experiment 20001911 PARAMETER Experiment Name: At_Drought_Reproduction_P Parameter: Plant Line Value: WS
  misc_feature: MA Experiment 20001911 PARAMETER Experiment Name: At_Drought_Reproduction_P Parameter: Timepoint (day) Value: 10
  misc_feature: MA Experiment 20001911 PARAMETER Experiment Name: At_Drought_Reproduction_P Parameter: Tissue Value: Flowers
  misc_feature: MA Experiment 20001911 PARAMETER Experiment Name: At_Drought_Reproduction_P Parameter: Treatment Value: Drought vs. No Drought
atgagttctggtctgaacgaagatttcctcgattgtatcgtgcgtttagaggagacacatgttcaacaaggcttcgatgagggttacgaagaaggtcttgtgtccggtcgtgaagacgctcgtcatctgggtttgaaactcgggttcgagacaggcgagctgattggattctacagaggttgctctgctctttggaattcagctctccgtattgatcctacacgcttctctcctcagctccataagcatctcaatgatttccatgtcttgctcgataaaatcccgcttttggatcccgaggacgaagctaaagacgggatcaaggatgatctcagagtcaaattcagcatcatttgtgcatctctcggcttttccaagaaacaatttgagtggtcggaggagatgttgagagaaatgcttggttgttgcaaggtttacatatctgaagcgcggaataagacggccctcgaagccattgagagagctttaaagccttttccaccagctgcaattgtcaacaagtttgaagatgcggcttatggcagggttggttacactgttgtatcctcgcttgctaacgggtcgtcttcttccttgaagaatgcggtgtttgctatggttaagactgctctcgacactatcaatcttgagttgcactgtggatctcatccccgccttggagtggttgaccacatatgctttcaccccttatctcaaacctctatagaacaagtttcttccgtcgccaattcccttgcaatggatatcggctccattcttcgagttcctacatatctctatggagcagcagaaaaggagcagtgcaccctggattcgatcagaagaaagctggggtacttcaaggcaaacagggagggacatgaatgggcaggtgggtttgacctggagatggtgccactgaagccagacgcagggccacaagaggtgagcaaagccaaaggggttgtagcggttggggcgtgtgggtgggtaagtaactataacgtgcctgtcatgtcaaacgatctcaaggcagtgaggagaatagcgaggaagacgagcgagagaggagggggcttggcttcagtgcagacaatggcgctggtgcacggggaaggagtcatagaggttgcctgtaacttgttgaatccaagccaagtggggggagatgaagtacagggactgatcgagaggcttggcagagaggaaggtctgcttgtgggaaaagggtattatacggactatacacctgaccagatcgttgaaagatatatggacttgctcaacaattcataa

SEQ ID NO: 74001 - protein, 431 aa, Arabidopsis thaliana
  peptide (1)..(431): Ceres Seq. ID no. 4991086
  misc_feature (333)..(383): Pfam Name: Formiminotransferase domain Pfam Description: Formiminotransferase domain
  misc_feature (134)..(431): Homolog of NCBI NO: 25411995 NR Description: hypothetical protein At2g20830 [imported] -
  misc_feature (1)..(140): Homolog of NCBI NO: 25411995 NR Description: hypothetical protein At2g20830 [imported] -
  misc_feature (135)..(431): Homolog of NCBI NO: 18399493 NR Description: expressed protein; protein id: At2g20830.1, by cDNA: gi_13430685 [Arabidopsis thaliana] unknown protein [Arabidopsis thaliana]
  misc_feature (126)..(424): Homolog of NCBI NO: 34898040 NR Description: OSJNBa0038F22.18 [Oryza sativa (japonica
  misc_feature (139)..(424): Homolog of NCBI NO: 5734618 NR Description: Similar to Arabidopsis thaliana chromosome II BAC
  misc_feature (276)..(431): Homolog of NCBI NO: 34897974 NR Description: hypothetical protein~similar to Oryza sativa
  misc_feature (139)..(189): Homolog of NCBI NO: 34897974 NR Description: hypothetical protein~similar to Oryza sativa
  misc_feature (8)..(130): Homolog of NCBI NO: 27261030 NR Description: P0681F05.15 [Oryza sativa (japonica
  misc_feature (148)..(383): Homolog of NCBI NO: 15643606 NR Description: formiminotransferase-
  misc_feature (143)..(383): Homolog of NCBI NO: 28211902 NR Description: glutamate formiminotransferase [Clostridium E88] >gi|28204345|gb|AAO36783.1| glutamate formiminotransferase
MSSGLNEDFLDCIVRLEETHVQQGFDEGYEEGLVSGREDARHLGLKLGFETGELIGFYRGCSALWNSALRIDPTRFSPQLHKHLNDFHVLLDKIPLLDPEDEAKDGIKDDLRVKFSIICASLGFSKKQFEWSEEMLREMLGCCKVYISEARNKTALEAIERALKPFPPAAIVNKFEDAAYGRVGYTVVSSLANGSSSSLKNAVFAMVKTALDTINLELHCGSHPRLGVVDHICFHPLSQTSIEQVSSVANSLAMDIGSILRVPTYLYGAAEKEQCTLDSIRRKLGYFKANREGHEWAGGFDLEMVPLKPDAGPQEVSKAKGVVAVGACGWVSNYNVPVMSNDLKAVRRIARKTSERGGGLASVQTMALVHGEGVIEVACNLLNPSQVGGDEVQGLIERLGREEGLLVGKGYYTDYTPDQIVERYMDLLNNS

SEQ ID NO: 74002 - protein, 297 aa, Arabidopsis thaliana; identical to SEQ ID NO: 20322
  peptide (1)..(297): Ceres Seq. ID no. 4991087
  misc_feature (199)..(249): Pfam Name: Formiminotransferase domain Pfam Description: Formiminotransferase domain
  misc_feature (1)..(297): Homolog of NCBI NO: 25411995 NR Description: hypothetical protein At2g20830 [imported] -
  misc_feature (1)..(297): Homolog of NCBI NO: 18399493 NR Description: expressed protein; protein id: At2g20830.1, by cDNA: gi_13430685 [Arabidopsis thaliana] unknown protein [Arabidopsis thaliana]
  misc_feature (1)..(290): Homolog of NCBI NO: 34898040 NR Description: OSJNBa0038F22.18 [Oryza sativa (japonica
  misc_feature (5)..(290): Homolog of NCBI NO: 5734618 NR Description: Similar to Arabidopsis thaliana chromosome II BAC
  misc_feature (142)..(297): Homolog of NCBI NO: 34897974 NR Description: hypothetical protein~similar to Oryza sativa
  misc_feature (5)..(55): Homolog of NCBI NO: 34897974 NR Description: hypothetical protein~similar to Oryza sativa
  misc_feature (14)..(249): Homolog of NCBI NO: 15643606 NR Description: formiminotransferase-
  misc_feature (9)..(249): Homolog of NCBI NO: 28211902 NR Description: glutamate formiminotransferase [Clostridium E88] >gi|28204345|gb|AAO36783.1| glutamate formiminotransferase
  misc_feature (9)..(247): Homolog of NCBI NO: 20806959 NR Description: Glutamate formiminotransferase tengcongensis] >gi|20515438|gb|AAM23734.1| Glutamate
  misc_feature (9)..(249): Homolog of NCBI NO: 13540922 NR Description: Glutamate formiminotransferase [Thermoplasma >gi|14324304|dbj|BAB59232.1| hypothetical protein [Thermoplasma

SEQ ID NO: 74003 - protein, 293 aa, Arabidopsis thaliana; identical to SEQ ID NO: 20323
  peptide (1)..(293): Ceres Seq. ID no. 4991088
  misc_feature (195)..(245): Pfam Name: Formiminotransferase domain Pfam Description: Formiminotransferase domain
  misc_feature (1)..(293): Homolog of NCBI NO: 25411995 NR Description: hypothetical protein At2g20830 [imported] -
  misc_feature (1)..(293): Homolog of NCBI NO: 18399493 NR Description: expressed protein; protein id: At2g20830.1, by cDNA: gi_13430685 [Arabidopsis thaliana] unknown protein [Arabidopsis thaliana]
  misc_feature (1)..(286): Homolog of NCBI NO: 34898040 NR Description: OSJNBa0038F22.18 [Oryza sativa (japonica
  misc_feature (1)..(286): Homolog of NCBI NO: 5734618 NR Description: Similar to Arabidopsis thaliana chromosome II BAC
  misc_feature (138)..(293): Homolog of NCBI NO: 34897974 NR Description: hypothetical protein~similar to Oryza sativa
  misc_feature (1)..(51): Homolog of NCBI NO: 34897974 NR Description: hypothetical protein~similar to Oryza sativa
  misc_feature (10)..(245): Homolog of NCBI NO: 15643606 NR Description: formiminotransferase-
  misc_feature (5)..(245): Homolog of NCBI NO: 28211902 NR Description: glutamate formiminotransferase [Clostridium E88] >gi|28204345|gb|AAO36783.1| glutamate formiminotransferase
  misc_feature (5)..(243): Homolog of NCBI NO: 20806959 NR Description: Glutamate formiminotransferase tengcongensis] >gi|20515438|gb|AAM23734.1| Glutamate
  misc_feature (5)..(245): Homolog of NCBI NO: 13540922 NR Description: Glutamate formiminotransferase [Thermoplasma >gi|14324304|dbj|BAB59232.1| hypothetical protein [Thermoplasma

SEQ ID NO: 74004 - DNA, 681 bp, Arabidopsis thaliana
  misc_feature (1)..(681): Ceres Seq. ID no. 4991128
  misc_feature: MA Experiment ID: 20000182 Result: Up-regulated in Transcription
  misc_feature: MA Experiment 20000182 PARAMETER Experiment Name: At_2mM_SA_P Parameter: Age (day) Value: 14
  misc_feature: MA Experiment 20000182 PARAMETER Experiment Name: At_2mM_SA_P Parameter: Organism Value: A. thaliana
  misc_feature: MA Experiment 20000182 PARAMETER Experiment Name: At_2mM_SA_P Parameter: Plant Line Value: WS
  misc_feature: MA Experiment 20000182 PARAMETER Experiment Name: At_2mM_SA_P Parameter: Timepoint (hr) Value: 6
  misc_feature: MA Experiment 20000182 PARAMETER Experiment Name: At_2mM_SA_P Parameter: Tissue Value: Aerial
  misc_feature: MA Experiment 20000182 PARAMETER Experiment Name: At_2mM_SA_P Parameter: Treatment Value: 2mM SA vs. No Treatment
  misc_feature: MA Experiment ID: 20001558 Result: Down-regulated in Transcription
  misc_feature: MA Experiment 20001558 PARAMETER Experiment Name: At_Drought_Soil_Dry_P Parameter: Age (day) Value: 27
  misc_feature: MA Experiment 20001558 PARAMETER Experiment Name: At_Drought_Soil_Dry_P Parameter: Organism Value: A. thaliana
  misc_feature: MA Experiment 20001558 PARAMETER Experiment Name: At_Drought_Soil_Dry_P Parameter: Plant Line Value: WS
  misc_feature: MA Experiment 20001558 PARAMETER Experiment Name: At_Drought_Soil_Dry_P Parameter: Post Timepoint (hr) Value: 6
  misc_feature: MA Experiment 20001558 PARAMETER Experiment Name: At_Drought_Soil_Dry_P Parameter: Post-Treatment Value: Re-Water vs. No Drought
  misc_feature: MA Experiment 20001558 PARAMETER Experiment Name: At_Drought_Soil_Dry_P Parameter: Timepoint (day) Value: 13
  misc_feature: MA Experiment 20001558 PARAMETER Experiment Name: At_Drought_Soil_Dry_P Parameter: Treatment Value: Drought vs. No Drought
atggacgggcttaaagacttcagtcggatctctccggcgattcagagtcatcttatgcgggtttatttcagcttattctgtattcttgctgcgtctgcgtttggagcttaccttcacatgcgcttgaatatcggtggaaccattactaagcttggatgggttttaagtttattggagcatgtggtttcttgtcctccatataaacataaaataaggttttcacttctgcttctctttggtgttcttcatggggcttcagttggtccatgtatcaagtccacaatcgatattgattcaagcatccttatcaccgcgttcttaggaactgcggtgatatttttctgtttctcggcagtggcaatgctggcaagacgcagggagtatatctacctcggaggactgctttcgtctggcttttccttgctaacgtggctcaagaattctgatcagtttgcctctgcgacagttgagattcagatgtaccttggactcctgctcttcgtgggatgtatagtggtgaacacacaggagataatagagaaagcacactgtggtgacatggactacgcggtacattcgctgatcctttacattggctttgtacgtgtgttccttcaaattctcagtataatgtggaatacctctgccgatagaataagaagaaataatgaagaaacttag

SEQ ID NO: 74005 - protein, 226 aa, Arabidopsis thaliana
  peptide (1)..(226): Ceres Seq. ID no. 4991129
  misc_feature (9)..(215): Pfam Name: Uncharacterised protein family UPF0005 Pfam Description: Uncharacterised protein family UPF0005
  misc_feature (40)..(226): Homolog of NCBI NO: 15238018 NR Description: putative protein; protein id: At5g47130.1
  misc_feature (2)..(218): Homolog of NCBI NO: 15238017 NR Description: Bax inhibitor-1 like; protein id: At5g47120.1, by cDNA: 36400., supported by cDNA: gi_11493974, supported by
  misc_feature (2)..(218): Homolog of NCBI NO: 21593125 NR Description: Bax inhibitor-1 like [Arabidopsis thaliana]
  misc_feature (2)..(218): Homolog of NCBI NO: 14719274 NR Description: Bax inhibitor 1 [Brassica napus]
  misc_feature (2)..(218): Homolog of NCBI NO: 17981376 NR Description: bax inhibitor-like protein [Brassica oleracea]
  misc_feature (2)..(218): Homolog of NCBI NO: 12229685 NR Description: Bax inhibitor-1 (BI-1) (OsBI-1)
  misc_feature (2)..(218): Homolog of NCBI NO: 14719276 NR Description: Bax inhibitor 1 [Nicotiana tabacum]
  misc_feature (2)..(218): Homolog of NCBI NO: 13940165 NR Description: BAX inhibitor 1 [Hordeum vulgare subsp. vulgare]
  misc_feature (2)..(208): Homolog of NCBI NO: 15236582 NR Description: Bax inhibitor-1-like protein; protein id:
  misc_feature (2)..(218): Homolog of NCBI NO: 4507433 NR Description: testis enhanced gene transcript [Homo sapiens]
MDGLKDFSRISPAIQSHLMRVYFSLFCILAASAFGAYLHMRLNIGGTITKLGWVLSLLEHVVSCPPYKHKIRFSLLLLFGVLHGASVGPCIKSTIDIDSSILITAFLGTAVIFFCFSAVAMLARRREYIYLGGLLSSGFSLLTWLKNSDQFASATVEIQMYLGLLLFVGCIVVNTQEIIEKAHCGDMDYAVHSLILYIGFVRVFLQILSIMWNTSADRIRRNNEET

SEQ ID NO: 74006 - protein, 208 aa, Arabidopsis thaliana
  peptide (1)..(208): Ceres Seq. ID no. 4991130
  misc_feature (1)..(197): Pfam Name: Uncharacterised protein family UPF0005 Pfam Description: Uncharacterised protein family UPF0005
  misc_feature (22)..(208): Homolog of NCBI NO: 15238018 NR Description: putative protein; protein id: At5g47130.1
  misc_feature (1)..(200): Homolog of NCBI NO: 15238017 NR Description: Bax inhibitor-1 like; protein id: At5g47120.1, by cDNA: 36400., supported by cDNA: gi_11493974, supported by
  misc_feature (1)..(200): Homolog of NCBI NO: 21593125 NR Description: Bax inhibitor-1 like [Arabidopsis thaliana]
  misc_feature (1)..(200): Homolog of NCBI NO: 14719274 NR Description: Bax inhibitor 1 [Brassica napus]
  misc_feature (1)..(200): Homolog of NCBI NO: 17981376 NR Description: bax inhibitor-like protein [Brassica oleracea]
  misc_feature (1)..(200): Homolog of NCBI NO: 12229685 NR Description: Bax inhibitor-1 (BI-1) (OsBI-1)
  misc_feature (1)..(200): Homolog of NCBI NO: 14719276 NR Description: Bax inhibitor 1 [Nicotiana tabacum]
  misc_feature (1)..(200): Homolog of NCBI NO: 13940165 NR Description: BAX inhibitor 1 [Hordeum vulgare subsp. vulgare]
  misc_feature (1)..(190): Homolog of NCBI NO: 15236582 NR Description: Bax inhibitor-1-like protein; protein id:
  misc_feature (1)..(200): Homolog of NCBI NO: 4507433 NR Description: testis enhanced gene transcript [Homo sapiens]
MRVYFSLFCILAASAFGAYLHMRLNIGGTITKLGWVLSLLEHVVSCPPYKHKIRFSLLLLFGVLHGASVGPCIKSTIDIDSSILITAFLGTAVIFFCFSAVAMLARRREYIYLGGLLSSGFSLLTWLKNSDQFASATVEIQMYLGLLLFVGCIVVNTQEIIEKAHCGDMDYAVHSLILYIGFVRVFLQILSIMWNTSADRIRRNNEET

SEQ ID NO: 74007 - protein, 187 aa, Arabidopsis thaliana; identical to SEQ ID NO: 73938
  peptide (1)..(187): Ceres Seq. ID no. 4991131
  misc_feature (1)..(176): Pfam Name: Uncharacterised protein family UPF0005 Pfam Description: Uncharacterised protein family UPF0005
  misc_feature (1)..(187): Homolog of NCBI NO: 15238018 NR Description: putative protein; protein id: At5g47130.1
  misc_feature (1)..(179): Homolog of NCBI NO: 15238017 NR Description: Bax inhibitor-1 like; protein id: At5g47120.1, by cDNA: 36400., supported by cDNA: gi_11493974, supported by
  misc_feature (1)..(179): Homolog of NCBI NO: 21593125 NR Description: Bax inhibitor-1 like [Arabidopsis thaliana]
  misc_feature (1)..(179): Homolog of NCBI NO: 14719274 NR Description: Bax inhibitor 1 [Brassica napus]
  misc_feature (1)..(179): Homolog of NCBI NO: 17981376 NR Description: bax inhibitor-like protein [Brassica oleracea]
  misc_feature (1)..(179): Homolog of NCBI NO: 12229685 NR Description: Bax inhibitor-1 (BI-1) (OsBI-1)
  misc_feature (1)..(179): Homolog of NCBI NO: 14719276 NR Description: Bax inhibitor 1 [Nicotiana tabacum]
  misc_feature (1)..(179): Homolog of NCBI NO: 13940165 NR Description: BAX inhibitor 1 [Hordeum vulgare subsp. vulgare]
  misc_feature (1)..(169): Homolog of NCBI NO: 15236582 NR Description: Bax inhibitor-1-like protein; protein id:
  misc_feature (1)..(179): Homolog of NCBI NO: 4507433 NR Description: testis enhanced gene transcript [Homo sapiens]

SEQ ID NO: 74008 - DNA, 987 bp, Arabidopsis thaliana
  misc_feature (1)..(987): Ceres Seq. ID no. 4991233
  misc_feature: MA Experiment ID: 20000171 Result: Down-regulated in Transcription
  misc_feature: MA Experiment 20000171 PARAMETER Experiment Name: At_42deg_Heat_P Parameter: Age (day) Value: 14
  misc_feature: MA Experiment 20000171 PARAMETER Experiment Name: At_42deg_Heat_P Parameter: Organism Value: A. thaliana
  misc_feature: MA Experiment 20000171 PARAMETER Experiment Name: At_42deg_Heat_P Parameter: Plant Line Value: WS
  misc_feature: MA Experiment 20000171 PARAMETER Experiment Name: At_42deg_Heat_P Parameter: Temperature (deg C) Value: 42 vs. 22
  misc_feature: MA Experiment 20000171 PARAMETER Experiment Name: At_42deg_Heat_P Parameter: Timepoint (hr) Value: 1
  misc_feature: MA Experiment 20000171 PARAMETER Experiment Name: At_42deg_Heat_P Parameter: Tissue Value: Aerial
  misc_feature: MA Experiment ID: 20000173 Result: Down-regulated in Transcription
  misc_feature: MA Experiment 20000173 PARAMETER Experiment Name: At_42deg_Heat_P Parameter: Age (day) Value: 14
  misc_feature: MA Experiment 20000173 PARAMETER Experiment Name: At_42deg_Heat_P Parameter: Organism Value: A. thaliana
  misc_feature: MA Experiment 20000173 PARAMETER Experiment Name: At_42deg_Heat_P Parameter: Plant Line Value: WS
  misc_feature: MA Experiment 20000173 PARAMETER Experiment Name: At_42deg_Heat_P Parameter: Temperature (deg C) Value: 42 vs. 22
  misc_feature: MA Experiment 20000173 PARAMETER Experiment Name: At_42deg_Heat_P Parameter: Timepoint (hr) Value: 6
  misc_feature: MA Experiment 20000173 PARAMETER Experiment Name: At_42deg_Heat_P Parameter: Tissue Value: Aerial
  misc_feature: MA Experiment ID: 20000184 Result: Down-regulated in Transcription
  misc_feature: MA Experiment 20000184 PARAMETER Experiment Name: At_Shoots__P Parameter: Age (day) Value: 7
  misc_feature: MA Experiment 20000184 PARAMETER Experiment Name: At_Shoots__P Parameter: Tissue Value: Shoots vs. Whole Plant
atgtatgactatgatccaccattttcgcctctctctaaacccactaaacctccaaaagagaagaagaagcagaagacgaagaagcaagaccagtcgtcggagctggtaaatgacctgaagattccagtgatttcagacctccctttcgattttaggtattcgtattcagaaactaacccggaaattgaaccgattggattccgtgaaccgaaacggttctctccatttggaccgggtcgattggaccggaaatggactgggactaccgcactggcgtcgccggagattgatcagagtcaatgggtggaggagagagcaagagttctcggcgagactttgacagaggatgaagttacagagcttattgaacggtatcggcatagtgactgtacacgacagattaatctcgggaaaggtggtgtgactcacaatatgatagatgatattcataaccattggaagaaagctgaggcagtgaggatcaaatgcttgggagtaccaactcttgacatggacaacatatgtttccacctcgaggaaaaatccggtggaaagattgtatacagaaacataaacattctagttttgtaccggggaaggaattatgatccgaagagtcgtcccatcattccactcatgttatggaagcctcatccgccaatatacccaagacttgtaaagaatgtggctgatgggttagaatttgaagagaccaaggagatgagaaatcgtgggcttcattctcctgccttaatgaaacttactaggaatggtgtttatgttaatgtcgttggaagagtgagggaagagtttgaaacagaagagattgtgagactagattgcactcatgttgggatgagtgactgcaaacgaattggtgtgaaactaaaggagatggttccatgtgttcccatattgttcaaagatgagcagatcatactctggagagggaagaggactggtgaagaagagcttgttactctatga

SEQ ID NO: 74009 - protein, 328 aa, Arabidopsis thaliana
  peptide (1)..(328): Ceres Seq. ID no. 4991234
  misc_feature (113)..(198): Pfam Name: CRS1 / YhbY domain Pfam Description: CRS1 / YhbY domain
  misc_feature (3)..(328): Homolog of NCBI NO: 15240416 NR Description: putative protein; protein id: At5g54890.1 thaliana] >gi|9758269|dbj|BAB08768.1|
  misc_feature (1)..(318): Homolog of NCBI NO: 22329043 NR Description: hypothetical protein; protein id: At4g31010.1, by cDNA: gi_18176014, supported by cDNA: gi_20465408 [Arabidopsis >gi|18176015|gb|AAL59968.1| unknown protein [Arabidopsis
  misc_feature (20)..(318): Homolog of NCBI NO: 40253285 NR Description: putative CRS2-associated factor 1 [Oryza sativa
  misc_feature (1)..(297): Homolog of NCBI NO: 25407702 NR Description: hypothetical protein AT4g31010 [imported] - thaliana >gi|2980765|emb|CAA18192.1| hypothetical protein thaliana] >gi|7270003|emb|CAB79819.1| hypothetical protein
  misc_feature (1)..(238): Homolog of NCBI NO: 14596153 NR Description: Unknown protein [Arabidopsis thaliana]
  misc_feature (105)..(317): Homolog of NCBI NO: 30349367 NR Description: CRS2-associated factor 1 [Zea mays]
  misc_feature (105)..(318): Homolog of NCBI NO: 30349369 NR Description: CRS2-associated factor 2 [Zea mays]
  misc_feature (105)..(259): Homolog of NCBI NO: 34905354 NR Description: OJ1126_G08.1 [Oryza sativa (japonica
  misc_feature (246)..(317): Homolog of NCBI NO: 34905354 NR Description: OJ1126_G08.1 [Oryza sativa (japonica
  misc_feature (100)..(327): Homolog of NCBI NO: 18399222 NR Description: expressed protein; protein id: At2g20020.1, by cDNA: gi_15028050 [Arabidopsis thaliana] unknown protein [Arabidopsis thaliana]
MYDYDPPFSPLSKPTKPPKEKKKQKTKKQDQSSELVNDLKIPVISDLPFDFRYSYSETNPEIEPIGFREPKRFSPFGPGRLDRKWTGTTALASPEIDQSQWVEERARVLGETLTEDEVTELIERYRHSDCTRQINLGKGGVTHNMIDDIHNHWKKAEAVRIKCLGVPTLDMDNICFHLEEKSGGKIVYRNINILVLYRGRNYDPKSRPIIPLMLWKPHPPIYPRLVKNVADGLEFEETKEMRNRGLHSPALMKLTRNGVYVNVVGRVREEFETEEIVRLDCTHVGMSDCKRIGVKLKEMVPCVPILFKDEQIILWRGKRTGEEELVTL

SEQ ID NO: 74010 - protein, 184 aa, Arabidopsis thaliana; identical to SEQ ID NO: 42647
  peptide (1)..(184): Ceres Seq. ID no. 4991235
  misc_feature (1)..(54): Pfam Name: CRS1 / YhbY domain Pfam Description: CRS1 / YhbY domain
  misc_feature (1)..(184): Homolog of NCBI NO: 15240416 NR Description: putative protein; protein id: At5g54890.1 thaliana] >gi|9758269|dbj|BAB08768.1|
  misc_feature (1)..(174): Homolog of NCBI NO: 22329043 NR Description: hypothetical protein; protein id: At4g31010.1, by cDNA: gi_18176014, supported by cDNA: gi_20465408 [Arabidopsis >gi|18176015|gb|AAL59968.1| unknown protein [Arabidopsis
  misc_feature (1)..(174): Homolog of NCBI NO: 40253285 NR Description: putative CRS2-associated factor 1 [Oryza sativa
  misc_feature (1)..(153): Homolog of NCBI NO: 25407702 NR Description: hypothetical protein AT4g31010 [imported] - thaliana >gi|2980765|emb|CAA18192.1| hypothetical protein thaliana] >gi|7270003|emb|CAB79819.1| hypothetical protein
  misc_feature (1)..(94): Homolog of NCBI NO: 14596153 NR Description: Unknown protein [Arabidopsis thaliana]
  misc_feature (1)..(173): Homolog of NCBI NO: 30349367 NR Description: CRS2-associated factor 1 [Zea mays]
  misc_feature (1)..(174): Homolog of NCBI NO: 30349369 NR Description: CRS2-associated factor 2 [Zea mays]
  misc_feature (1)..(115): Homolog of NCBI NO: 34905354 NR Description: OJ1126_G08.1 [Oryza sativa (japonica
  misc_feature (102)..(173): Homolog of NCBI NO: 34905354 NR Description: OJ1126_G08.1 [Oryza sativa (japonica
  misc_feature (1)..(183): Homolog of NCBI NO: 18399222 NR Description: expressed protein; protein id: At2g20020.1, by cDNA: gi_15028050 [Arabidopsis thaliana] unknown protein [Arabidopsis thaliana]

SEQ ID NO: 74011 - DNA, 940 bp, Arabidopsis thaliana
  misc_feature (1)..(940): Ceres Seq. ID no. 4991465
  misc_feature: MA Experiment ID: 108434 Result: Down-regulated in Transcription
  misc_feature: MA Experiment 108434 PARAMETER Experiment Name: At_Root_Tips_cDNA_P Parameter: Tissue Value: Root Tips
  misc_feature: MA Experiment ID: 108435 Result: Up-regulated in Transcription
  misc_feature: MA Experiment 108435 PARAMETER Experiment Name: At_stm_Mutants_cDNA_P Parameter: Plant Line Value: wt Landsburg vs stm
  misc_feature: MA Experiment 108435 PARAMETER Experiment Name: At_stm_Mutants_cDNA_P Parameter: Tissue Value: Shoot Apical Meristem Region
  misc_feature: MA Experiment ID: 20000184 Result: Down-regulated in Transcription
  misc_feature: MA Experiment 20000184 PARAMETER Experiment Name: At_Shoots__P Parameter: Age (day) Value: 7
  misc_feature: MA Experiment 20000184 PARAMETER Experiment Name: At_Shoots__P Parameter: Tissue Value: Shoots vs. Whole Plant
  misc_feature: MA Experiment ID: 20000185 Result: Down-regulated in Transcription
  misc_feature: MA Experiment 20000185 PARAMETER Experiment Name: At_Roots__P Parameter: Age (day) Value: 7 vs. 21
  misc_feature: MA Experiment 20000185 PARAMETER Experiment Name: At_Roots__P Parameter: Organism Value: A. thaliana
  misc_feature: MA Experiment 20000185 PARAMETER Experiment Name: At_Roots__P Parameter: Tissue Value: Roots vs. Whole Plant
  misc_feature: MA Experiment ID: 20000234 Result: Up-regulated in Transcription
  misc_feature: MA Experiment 20000234 PARAMETER Experiment Name: At_Siliques_P Parameter: Age (day) Value: 21
  misc_feature: MA Experiment 20000234 PARAMETER Experiment Name: At_Siliques_P Parameter: Organism Value: A. thaliana
  misc_feature: MA Experiment 20000234 PARAMETER Experiment Name: At_Siliques_P Parameter: Plant Line Value: WS
  misc_feature: MA Experiment 20000234 PARAMETER Experiment Name: At_Siliques_P Parameter: Tissue Value: Less Than 5mm Siliques vs. Whole Plant
  misc_feature: MA Experiment ID: 20000264 Result: Up-regulated in Transcription
  misc_feature: MA Experiment 20000264 PARAMETER Experiment Name: At_Open_Flower_P Parameter: Age (day) Value: 21
  misc_feature: MA Experiment 20000264 PARAMETER Experiment Name: At_Open_Flower_P Parameter: Plant Line Value: WS
  misc_feature: MA Experiment 20000264 PARAMETER Experiment Name: At_Open_Flower_P Parameter: Tissue Value: Open Flower vs. Whole Plant
  misc_feature: MA Experiment ID: 20000439 Result: Down-regulated in Transcription
  misc_feature: MA Experiment 20000439 PARAMETER Experiment Name: At_Roots__P Parameter: Age (day) Value: 14 vs. 21
  misc_feature: MA Experiment 20000439 PARAMETER Experiment Name: At_Roots__P Parameter: Organism Value: A. thaliana
  misc_feature: MA Experiment 20000439 PARAMETER Experiment Name: At_Roots__P Parameter: Tissue Value: Roots vs. Whole Plant
  misc_feature: MA Experiment ID: 20000794 Result: Down-regulated in Transcription
  misc_feature: MA Experiment 20000794 PARAMETER Experiment Name: At_Petals_P Parameter: Age (day) Value: 23-25 days
  misc_feature: MA Experiment 20000794 PARAMETER Experiment Name: At_Petals_P Parameter: Plant Line Value: WS
  misc_feature: MA Experiment 20000794 PARAMETER Experiment Name: At_Petals_P Parameter: Tissue Value: Petals vs. Whole plant
  misc_feature: MA Experiment ID: 20001906 Result: Down-regulated in Transcription
  misc_feature: MA Experiment 20001906 PARAMETER Experiment Name: At_Drought_Reproduction_P Parameter: Age (day) Value: 35
  misc_feature: MA Experiment 20001906 PARAMETER Experiment Name: At_Drought_Reproduction_P Parameter: Organism Value: A. thaliana
  misc_feature: MA Experiment 20001906 PARAMETER Experiment Name: At_Drought_Reproduction_P Parameter: Plant Line Value: WS
  misc_feature: MA Experiment 20001906 PARAMETER Experiment Name: At_Drought_Reproduction_P Parameter: Timepoint (day) Value: 5
  misc_feature: MA Experiment 20001906 PARAMETER Experiment Name: At_Drought_Reproduction_P Parameter: Tissue Value: Siliques
  misc_feature: MA Experiment 20001906 PARAMETER Experiment Name: At_Drought_Reproduction_P Parameter: Treatment Value: Drought vs. No Drought
  misc_feature: MA Experiment ID: 20001908 Result: Down-regulated in Transcription
  misc_feature: MA Experiment 20001908 PARAMETER Experiment Name: At_Drought_Reproduction_P Parameter: Age (day) Value: 40
  misc_feature: MA Experiment 20001908 PARAMETER Experiment Name: At_Drought_Reproduction_P Parameter: Organism Value: A. thaliana
  misc_feature: MA Experiment 20001908 PARAMETER Experiment Name: At_Drought_Reproduction_P Parameter: Plant Line Value: WS
  misc_feature: MA Experiment 20001908 PARAMETER Experiment Name: At_Drought_Reproduction_P Parameter: Timepoint (day) Value: 10
  misc_feature: MA Experiment 20001908 PARAMETER Experiment Name: At_Drought_Reproduction_P Parameter: Tissue Value: Siliques
  misc_feature: MA Experiment 20001908 PARAMETER Experiment Name: At_Drought_Reproduction_P Parameter: Treatment Value: Drought vs. No Drought
  misc_feature: Pfam Name: p450 Pfam Description: Cytochrome P450
gttgtattcagtcacgcgaagaagctatccaggtgatgaaagacgttctcatgatgagaaaagagacgcgagagaagcaagaagacttccttaacacgcttctagaagaactggagaaagacggtagctttttcgaccaaggatcggctataaatctcatcttccttctggcgtttgccttgagagaaggtacctctagttgtactgctttggccgtgaagttcatatccaaagacccgaaagtgcttgcagagctcaagcgtgagcataaggcaattgtagacaacagaaaagataaggaagctggagttagctgggaagaatatagacacaacatgactttcaccaacatggttagcaatgaggtgcttcgcctagcaaacacgacccctttgttgtttcgaaaggcggtgcaagatgttgagatcaaaggatatacaattccggctggttggattgtggcggttgcaccttcagcggttcattttgatcctgcaatctatgagaacccatttgagtttaatccatggagatgggaggggaaagaaatgatttggggatctaaaacgttcatggcgtttggatatggagttagactttgtgtaggtgcagagttttcacggcttcaaatggcaatcttcctccatcatcttgtggcatattacgatttctcaatggtccaagactccgagatcattcgttcaccattccatcaatacaccaaggatctgcttataaacatctctcagtctcctaccaagtgaaccatgcatgcagtttccaaatcttaataatcagatcattatatgcaataatctcatttcctgcttccgcaaaatctctggagtctttttatatgtaatatgcgatctctataatttttaaaaagtatctatcttgtcaaatgagttaaactttgtttatatatgtcttgaatctg

SEQ ID NO: 74012 - protein, 253 aa, Arabidopsis thaliana; identical to SEQ ID NO: 38007
  peptide (1)..(253): Ceres Seq. ID no. 4991466
  misc_feature: Pfam Name: p450 Pfam Description: Cytochrome P450
  misc_feature (2)..(253): Homolog of NCBI NO: 15218388 NR Description: cytochrome P450, putative; protein id: supported by cDNA: gi_17473540 [Arabidopsis thaliana]
  misc_feature (2)..(144): Homolog of NCBI NO: 25282639 NR Description: hypothetical protein T30F21.17 [imported] - thaliana >gi|4836883|gb|AAD30586.1|AC007260_17 Similar to
  misc_feature (176)..(253): Homolog of NCBI NO: 25282639 NR Description: hypothetical protein T30F21.17 [imported] - thaliana >gi|4836883|gb|AAD30586.1|AC007260_17 Similar to
  misc_feature (4)..(250): Homolog of NCBI NO: 22530982 NR Description: cytochrome P450-like protein [Arabidopsis
  misc_feature (4)..(250): Homolog of NCBI NO: 30695347 NR Description: cytochrome p450 family [Arabidopsis thaliana]
  misc_feature (4)..(250): Homolog of NCBI NO: 30695352 NR Description: cytochrome p450 family [Arabidopsis thaliana]
  misc_feature (2)..(251): Homolog of NCBI NO: 15222806 NR Description: cytochrome P450, putative; protein id:
  misc_feature (2)..(144): Homolog of NCBI NO: 8778326 NR Description: F14J16.21 [Arabidopsis thaliana]
  misc_feature (128)..(251): Homolog of NCBI NO: 8778326 NR Description: F14J16.21 [Arabidopsis thaliana]
  misc_feature (7)..(119): Homolog of NCBI NO: 15230572 NR Description: cytochrome P450 - like protein; protein id:

SEQ ID NO: 74013 - protein, 242 aa, Arabidopsis thaliana; identical to SEQ ID NO: 38008
  peptide (1)..(242): Ceres Seq. ID no. 4991467
  misc_feature: Pfam Name: p450 Pfam Description: Cytochrome P450
  misc_feature (1)..(242): Homolog of NCBI NO: 15218388 NR Description: cytochrome P450, putative; protein id: supported by cDNA: gi_17473540 [Arabidopsis thaliana]
  misc_feature (1)..(133): Homolog of NCBI NO: 25282639 NR Description: hypothetical protein T30F21.17 [imported] - thaliana >gi|4836883|gb|AAD30586.1|AC007260_17 Similar to
  misc_feature (165)..(242): Homolog of NCBI NO: 25282639 NR Description: hypothetical protein T30F21.17 [imported] - thaliana >gi|4836883|gb|AAD30586.1|AC007260_17 Similar to
  misc_feature (1)..(239): Homolog of NCBI NO: 22530982 NR Description: cytochrome P450-like protein [Arabidopsis
  misc_feature (1)..(239): Homolog of NCBI NO: 30695347 NR Description: cytochrome p450 family [Arabidopsis thaliana]
  misc_feature (1)..(239): Homolog of NCBI NO: 30695352 NR Description: cytochrome p450 family [Arabidopsis thaliana]
  misc_feature (1)..(240): Homolog of NCBI NO: 15222806 NR Description: cytochrome P450, putative; protein id:
  misc_feature (1)..(133): Homolog of NCBI NO: 8778326 NR Description: F14J16.21 [Arabidopsis thaliana]
  misc_feature (117)..(240): Homolog of NCBI NO: 8778326 NR Description: F14J16.21 [Arabidopsis thaliana]
  misc_feature (1)..(108): Homolog of NCBI NO: 15230572 NR Description: cytochrome P450 - like protein; protein id:

SEQ ID NO: 74014 - protein, 237 aa, Arabidopsis thaliana; identical to SEQ ID NO: 38009
  peptide (1)..(237): Ceres Seq. ID no. 4991468
  misc_feature: Pfam Name: p450 Pfam Description: Cytochrome P450
  misc_feature (1)..(237): Homolog of NCBI NO: 15218388 NR Description: cytochrome P450, putative; protein id: supported by cDNA: gi_17473540 [Arabidopsis thaliana]
  misc_feature (1)..(128): Homolog of NCBI NO: 25282639 NR Description: hypothetical protein T30F21.17 [imported] - thaliana >gi|4836883|gb|AAD30586.1|AC007260_17 Similar to
  misc_feature (160)..(237): Homolog of NCBI NO: 25282639 NR Description: hypothetical protein T30F21.17 [imported] - thaliana >gi|4836883|gb|AAD30586.1|AC007260_17 Similar to
  misc_feature (1)..(234): Homolog of NCBI NO: 22530982 NR Description: cytochrome P450-like protein [Arabidopsis
  misc_feature (1)..(234): Homolog of NCBI NO: 30695347 NR Description: cytochrome p450 family [Arabidopsis thaliana]
  misc_feature (1)..(234): Homolog of NCBI NO: 30695352 NR Description: cytochrome p450 family [Arabidopsis thaliana]
  misc_feature (1)..(235): Homolog of NCBI NO: 15222806 NR Description: cytochrome P450, putative; protein id:
  misc_feature (1)..(128): Homolog of NCBI NO: 8778326 NR Description: F14J16.21 [Arabidopsis thaliana]
  misc_feature (112)..(235): Homolog of NCBI NO: 8778326 NR Description: F14J16.21 [Arabidopsis thaliana]
  misc_feature (1)..(103): Homolog of NCBI NO: 15230572 NR Description: cytochrome P450 - like protein; protein id:

SEQ ID NO: 74015 - DNA, 1368 bp, Arabidopsis thaliana
  misc_feature (1)..(1368): Ceres Seq. ID no. 4991596
  misc_feature: MA Experiment ID: 108434 Result: Down-regulated in Transcription
  misc_feature: MA Experiment 108434 PARAMETER Experiment Name: At_Root_Tips_cDNA_P Parameter: Tissue Value: Root Tips
  misc_feature: MA Experiment ID: 108462 Result: Up-regulated in Transcription
  misc_feature: MA Experiment 108462 PARAMETER Experiment Name: At_Germinating_Seeds_cDNA_P Parameter: Age (day) Value: 2 vs. 0
  misc_feature: MA Experiment 108462 PARAMETER Experiment Name: At_Germinating_Seeds_cDNA_P Parameter: Tissue Value: Germinating Seeds
  misc_feature: MA Experiment ID: 108488 Result: Down-regulated in Transcription
  misc_feature: MA Experiment ID: 108489 Result: Up-regulated in Transcription
  misc_feature: MA Experiment ID: 20000068 Result: Up-regulated in Transcription
  misc_feature: MA Experiment ID: 20000113 Result: Down-regulated in Transcription
  misc_feature: MA Experiment 20000113 PARAMETER Experiment Name: At_42deg_Heat_cDNA_P Parameter: Temperature (deg C) Value: 42 vs. 22
  misc_feature: MA Experiment 20000113 PARAMETER Experiment Name: At_42deg_Heat_cDNA_P Parameter: Timepoint (hr) Value: 8
  misc_feature: MA Experiment 20000113 PARAMETER Experiment Name: At_42deg_Heat_cDNA_P Parameter: Tissue Value: Aerial
  misc_feature: MA Experiment ID: 20000234 Result: Down-regulated in Transcription
  misc_feature: MA Experiment 20000234 PARAMETER Experiment Name: At_Siliques_P Parameter: Age (day) Value: 21
  misc_feature: MA Experiment 20000234 PARAMETER Experiment Name: At_Siliques_P Parameter: Organism Value: A. thaliana
  misc_feature: MA Experiment 20000234 PARAMETER Experiment Name: At_Siliques_P Parameter: Plant Line Value: WS
  misc_feature: MA Experiment 20000234 PARAMETER Experiment Name: At_Siliques_P Parameter: Tissue Value: Less Than 5mm Siliques vs. Whole Plant
  misc_feature: MA Experiment ID: 20000235 Result: Down-regulated in Transcription
  misc_feature: MA Experiment 20000235 PARAMETER Experiment Name: At_Siliques_P Parameter: Age (day) Value: 21
  misc_feature: MA Experiment 20000235 PARAMETER Experiment Name: At_Siliques_P Parameter: Organism Value: A. thaliana
  misc_feature: MA Experiment 20000235 PARAMETER Experiment Name: At_Siliques_P Parameter: Plant Line Value: WS
  misc_feature: MA Experiment 20000235 PARAMETER Experiment Name: At_Siliques_P Parameter: Tissue Value: 5-10mm Siliques vs. Whole Plant
  misc_feature: MA Experiment ID: 20000265 Result: Down-regulated in Transcription
  misc_feature: MA Experiment 20000265 PARAMETER Experiment Name: At_Open_Flower_P Parameter: Age (day) Value: 21
  misc_feature: MA Experiment 20000265 PARAMETER Experiment Name: At_Open_Flower_P Parameter: Plant Line Value: WS
  misc_feature: MA Experiment 20000265 PARAMETER Experiment Name: At_Open_Flower_P Parameter: Tissue Value: Closed Flower vs. Whole Plant
  misc_feature: MA Experiment ID: 20000286 Result: Down-regulated in Transcription
  misc_feature: MA Experiment 20000286 PARAMETER Experiment Name: At_Open_Flower_P Parameter: Age (day) Value: 21
  misc_feature: MA Experiment 20000286 PARAMETER Experiment Name: At_Open_Flower_P Parameter: Plant Line Value: WS
  misc_feature: MA Experiment 20000286 PARAMETER Experiment Name: At_Open_Flower_P Parameter: Tissue Value: Half Open vs. Whole Plant
  misc_feature: MA Experiment ID: 20000438 Result: Down-regulated in Transcription
  misc_feature: MA Experiment 20000438 PARAMETER Experiment Name: At_Shoots__P Parameter: Age (day) Value: 14
  misc_feature: MA Experiment 20000438 PARAMETER Experiment Name: At_Shoots__P Parameter: Tissue Value: Shoots vs. Whole Plant
  misc_feature: MA Experiment ID: 20000453 Result: Down-regulated in Transcription
  misc_feature: MA Experiment 20000453 PARAMETER Experiment Name: At_100uM_ABA_P Parameter: Age (day) Value: 15
  misc_feature: MA Experiment 20000453 PARAMETER Experiment Name: At_100uM_ABA_P Parameter: Organism Value: A. thaliana
  misc_feature: MA Experiment 20000453 PARAMETER Experiment Name: At_100uM_ABA_P Parameter: Plant Line Value: WS
  misc_feature: MA Experiment 20000453 PARAMETER Experiment Name: At_100uM_ABA_P Parameter: Timepoint (hr) Value: 24
  misc_feature: MA Experiment 20000453 PARAMETER Experiment Name: At_100uM_ABA_P Parameter: Tissue Value: Aerial
  misc_feature: MA Experiment 20000453 PARAMETER Experiment Name: At_100uM_ABA_P Parameter: Treatment Value: 100uM ABA vs. No Treatment
  misc_feature: MA Experiment ID: 20000527 Result: Down-regulated in Transcription
  misc_feature: MA Experiment 20000527 PARAMETER Experiment Name: At_10percent_PEG_P Parameter: Age (day) Value: 20
  misc_feature: MA Experiment 20000527 PARAMETER Experiment Name: At_10percent_PEG_P Parameter: Organism Value: A. thaliana
  misc_feature: MA Experiment 20000527 PARAMETER Experiment Name: At_10percent_PEG_P Parameter: Plant Line Value: WS
  misc_feature: MA Experiment 20000527 PARAMETER Experiment Name: At_10percent_PEG_P Parameter: Timepoint (day) Value: 20
  misc_feature: MA Experiment 20000527 PARAMETER Experiment Name: At_10percent_PEG_P Parameter: Tissue Value: Whole Plant
  misc_feature: MA Experiment 20000527 PARAMETER Experiment Name: At_10percent_PEG_P Parameter: Treatment Value: 10percent PEG vs. No Treatment
  misc_feature: MA Experiment ID: 20000573 Result: Down-regulated in Transcription
  misc_feature: MA Experiment 20000573 PARAMETER Experiment Name: At_100uM_ABA_Mutants__P Parameter: Organism Value: A. thaliana
  misc_feature: MA Experiment 20000573 PARAMETER Experiment Name: At_100uM_ABA_Mutants__P Parameter: Plant Line Value: CS22 vs. Ler wt
  misc_feature: MA Experiment 20000573 PARAMETER Experiment Name: At_100uM_ABA_Mutants__P Parameter: Timepoint (hr) Value: N/A
  misc_feature: MA Experiment 20000573 PARAMETER Experiment Name: At_100uM_ABA_Mutants__P Parameter: Tissue Value: Whole Plant
  misc_feature: MA Experiment 20000573 PARAMETER Experiment Name: At_100uM_ABA_Mutants__P Parameter: Treatment Value: None
  misc_feature: MA Experiment ID: 20000574 Result: Down-regulated in Transcription
  misc_feature: MA Experiment 20000574 PARAMETER Experiment Name: At_100uM_ABA_Mutants__P Parameter: Organism Value: A. thaliana
  misc_feature: MA Experiment 20000574 PARAMETER Experiment Name: At_100uM_ABA_Mutants__P Parameter: Plant Line Value: CS23 vs. Ler wt
  misc_feature: MA Experiment 20000574 PARAMETER Experiment Name: At_100uM_ABA_Mutants__P Parameter: Timepoint (hr) Value: N/A
  misc_feature: MA Experiment 20000574 PARAMETER Experiment Name: At_100uM_ABA_Mutants__P Parameter: Tissue Value: Whole Plant
  misc_feature: MA Experiment 20000574 PARAMETER Experiment Name: At_100uM_ABA_Mutants__P Parameter: Treatment Value: None
  misc_feature: MA Experiment ID: 20001451 Result: Up-regulated in Transcription
  misc_feature: MA Experiment 20001451 PARAMETER Experiment Name: At_Far-red-induction_P Parameter: Age (day) Value: 7
  misc_feature: MA Experiment 20001451 PARAMETER Experiment Name: At_Far-red-induction_P Parameter: Light Value: Far-red vs. White
  misc_feature: MA Experiment 20001451 PARAMETER Experiment Name: At_Far-red-induction_P Parameter: Organism Value: A. thaliana
  misc_feature: MA Experiment 20001451 PARAMETER Experiment Name: At_Far-red-induction_P Parameter: Plant Line Value: Columbia
  misc_feature: MA Experiment 20001451 PARAMETER Experiment Name: At_Far-red-induction_P Parameter: Timepoint (hr) Value: 24
  misc_feature: MA Experiment 20001451 PARAMETER Experiment Name: At_Far-red-induction_P Parameter: Tissue Value: Whole Plant
  misc_feature: MA Experiment ID: 20001555 Result: Up-regulated in Transcription
  misc_feature: MA Experiment 20001555 PARAMETER Experiment Name: At_Drought_Soil_Dry_P Parameter: Age (day) Value: 24
  misc_feature: MA Experiment 20001555 PARAMETER Experiment Name: At_Drought_Soil_Dry_P Parameter: Organism Value: A. thaliana
  misc_feature: MA Experiment 20001555 PARAMETER Experiment Name: At_Drought_Soil_Dry_P Parameter: Plant Line Value: WS
  misc_feature: MA Experiment 20001555 PARAMETER Experiment Name: At_Drought_Soil_Dry_P Parameter: Post Timepoint (hr) Value: None
  misc_feature: MA Experiment 20001555 PARAMETER Experiment Name: At_Drought_Soil_Dry_P Parameter: Post-Treatment Value: None
  misc_feature: MA Experiment 20001555 PARAMETER Experiment Name: At_Drought_Soil_Dry_P Parameter: Timepoint (day) Value: 10
  misc_feature: MA Experiment 20001555 PARAMETER Experiment Name: At_Drought_Soil_Dry_P Parameter: Treatment Value: Drought vs. No Drought
  misc_feature: MA Experiment ID: 20001556 Result: Up-regulated in Transcription
  misc_feature: MA Experiment 20001556 PARAMETER Experiment Name: At_Drought_Soil_Dry_P Parameter: Age (day) Value: 26
  misc_feature: MA Experiment 20001556 PARAMETER Experiment Name: At_Drought_Soil_Dry_P Parameter: Organism Value: A. thaliana
  misc_feature: MA Experiment 20001556 PARAMETER Experiment Name: At_Drought_Soil_Dry_P Parameter: Plant Line Value: WS
  misc_feature: MA Experiment 20001556 PARAMETER Experiment Name: At_Drought_Soil_Dry_P Parameter: Post Timepoint (hr) Value: None
  misc_feature: MA Experiment 20001556 PARAMETER Experiment Name: At_Drought_Soil_Dry_P Parameter: Post-Treatment Value: None
  misc_feature: MA Experiment 20001556 PARAMETER Experiment Name: At_Drought_Soil_Dry_P Parameter: Timepoint (day) Value: 12
  misc_feature: MA Experiment 20001556 PARAMETER Experiment Name: At_Drought_Soil_Dry_P Parameter: Treatment Value: Drought vs. No Drought
  misc_feature: MA Experiment ID: 20001559 Result: Up-regulated in Transcription
  misc_feature: MA Experiment 20001559 PARAMETER Experiment Name: At_Drought_Soil_Dry_P Parameter: Age (day) Value: 28
  misc_feature: MA Experiment 20001559 PARAMETER Experiment Name: At_Drought_Soil_Dry_P Parameter: Organism Value: A. thaliana
  misc_feature: MA Experiment 20001559 PARAMETER Experiment Name: At_Drought_Soil_Dry_P Parameter: Plant Line Value: WS
  misc_feature: MA Experiment 20001559 PARAMETER Experiment Name: At_Drought_Soil_Dry_P Parameter: Post Timepoint (hr) Value: 29
  misc_feature: MA Experiment 20001559 PARAMETER Experiment Name: At_Drought_Soil_Dry_P Parameter: Post-Treatment Value: Re-Water vs. No Drought
  misc_feature: MA Experiment 20001559 PARAMETER Experiment Name: At_Drought_Soil_Dry_P Parameter: Timepoint (day) Value: 14
  misc_feature: MA Experiment 20001559 PARAMETER Experiment Name: At_Drought_Soil_Dry_P Parameter: Treatment Value: Drought vs. No Drought
  misc_feature: MA Experiment ID: 20001761 Result: Down-regulated in Transcription
  misc_feature: MA Experiment 20001761 PARAMETER Experiment Name: At_50mM_NH4NO3_L-to-H_P Parameter: Timepoint (hr) Value: 4
  misc_feature: MA Experiment 20001761 PARAMETER Experiment Name: At_50mM_NH4NO3_L-to-H_P Parameter: Tissue Value: Siliques
  misc_feature: MA Experiment 20001761 PARAMETER Experiment Name: At_50mM_NH4NO3_L-to-H_P Parameter: Treatment Value: 50mM NH4NO3 vs 100mM Mannitol
  misc_feature: MA Experiment ID: 20001904 Result: Up-regulated in Transcription
  misc_feature: MA Experiment 20001904 PARAMETER Experiment Name: At_Drought_Reproduction_P Parameter: Age (day) Value: 37
  misc_feature: MA Experiment 20001904 PARAMETER Experiment Name: At_Drought_Reproduction_P Parameter: Organism Value: A. thaliana
  misc_feature: MA Experiment 20001904 PARAMETER Experiment Name: At_Drought_Reproduction_P Parameter: Plant Line Value: WS
  misc_feature: MA Experiment 20001904 PARAMETER Experiment Name: At_Drought_Reproduction_P Parameter: Timepoint (day) Value: 7
  misc_feature: MA Experiment 20001904 PARAMETER Experiment Name: At_Drought_Reproduction_P Parameter: Tissue Value: Rosettes
  misc_feature: MA Experiment 20001904 PARAMETER Experiment Name: At_Drought_Reproduction_P Parameter: Treatment Value: Drought vs. No Drought
  misc_feature: MA Experiment ID: 20001905 Result: Up-regulated in Transcription
  misc_feature: MA Experiment 20001905 PARAMETER Experiment Name: At_Drought_Reproduction_P Parameter: Age (day) Value: 40
  misc_feature: MA Experiment 20001905 PARAMETER Experiment Name: At_Drought_Reproduction_P Parameter: Organism Value: A. thaliana
  misc_feature: MA Experiment 20001905 PARAMETER Experiment Name: At_Drought_Reproduction_P Parameter: Plant Line Value: WS
  misc_feature: MA Experiment 20001905 PARAMETER Experiment Name: At_Drought_Reproduction_P Parameter: Timepoint (day) Value: 10
  misc_feature: MA Experiment 20001905 PARAMETER Experiment Name: At_Drought_Reproduction_P Parameter: Tissue Value: Rosettes
  misc_feature: MA Experiment 20001905 PARAMETER Experiment Name: At_Drought_Reproduction_P Parameter: Treatment Value: Drought vs. No Drought
gagattggtgagttggctgtggcgtctggagttttacaaagctgtaaactaagacagctaaaggatcaagtctgaagaatggtttagccaaaaagcatcagaagaggaatattttgctcgattctttattccttcaaattcaatacaccaacgacgaggctacttgcttttccttcgagtagccatcttcgttatcaatcatcgtcatcatctagtttatataaagatcaaacctttgaccatttataccgtttttgtgtcccagactcaaagcaattattttatcctttgtgttactgaatcagggttgatgggggattctcctgctagttcaaatagagttaagcttcgggatgggagattcttagcttataaagaaagaggagttccaaaggaaaaggccaaatacaagatcattcttgttcatggctttggaagctccaaagatatgaacttctctgcctcaaaagagcttatagaagaacttgaggtgtacttgctattctacgaccgttctggatatggagcatcagattcaaacacaaaacgttcgttggaaagcgaagttgaagacatagcagaacttgcagatcagctggagttaggacctaagttttatctaattggaatttccatgggatcttaccctacttggggttgcctaagacacatacctcacaggttatccggcgtggcttttgttgctccggtggttaattatcgatggccttcacttccgaagaagctaatcaaaaaagattataggacaggtattatcaaatggggtttgaggatatcaaaatatgcacctggactgttacattggtggatcattcaaaagctcttcgcttcaactagttcggtccttgaaagcaatccggtctacttcaacagccacgacatagaagtgctcaagcgaaaaactggttttcccatgcttactaaggaaaagctacgggaaagaaatgttttcgatactctaagggacgattttatggtttgtttcgggcaatgggacttcgaacccgcggatctaagcatcagtacaaagagctatattcacatctggcatggtaaggaagacaaagttgttccatttcaacttcaaagatgcattctgcagaaacaacctttgatcaactaccacgaaatcccccaaggcggacatctgatcgtacactacgatggcatttgcgatacgattctacgtgcactattgctcaaggaagaacaacaaaagctgtataaaataaattgatttgtaacagattctgtgtttgattgattgattcagttctacaaaacaaagtatgttcaaagtgtacattgtacaatgacaatatatatgtgtataatataaagtgtttg

SEQ ID NO: 74016 - protein, 315 aa, Arabidopsis thaliana
  peptide (1)..(315): Ceres Seq. ID no. 4991597
  misc_feature (61)..(307): Pfam Name: alpha/beta hydrolase fold Pfam Description: alpha/beta hydrolase fold
  misc_feature (124)..(315): Homolog of NCBI NO: 15223177 NR Description: unknown protein; protein id: At1g08310.1
  misc_feature (1)..(108): Homolog of NCBI NO: 15223177 NR Description: unknown protein; protein id: At1g08310.1
  misc_feature (124)..(311): Homolog of NCBI NO: 25407040 NR Description: protein T23G18.18 [imported] - Arabidopsis >gi|6579201|gb|AAF18244.1|AC011438_6 T23G18.18 [Arabidopsis
  misc_feature (1)..(108): Homolog of NCBI NO: 25407040 NR Description: protein T23G18.18 [imported] - Arabidopsis >gi|6579201|gb|AAF18244.1|AC011438_6 T23G18.18 [Arabidopsis
  misc_feature (213)..(315): Homolog of NCBI NO: 6664302 NR Description: T27G7.1 [Arabidopsis thaliana]
  misc_feature (12)..(108): Homolog of NCBI NO: 6664302 NR Description: T27G7.1 [Arabidopsis thaliana]
  misc_feature (124)..(190): Homolog of NCBI NO: 6664302 NR Description: T27G7.1 [Arabidopsis thaliana]
  misc_feature (5)..(304): Homolog of NCBI NO: 15242253 NR Description: putative protein; protein id: At5g22460.1, by cDNA: gi_15292740, supported by cDNA: gi_20465594 [Arabidopsis
  misc_feature (1)..(307): Homolog of NCBI NO: 15228377 NR Description: putative protein; protein id: At3g48410.1, by cDNA: gi_17529095 [Arabidopsis thaliana]
  misc_feature (2)..(311): Homolog of NCBI NO: 34908462 NR Description: P0683F02.22 [Oryza sativa (japonica
MGDSPASSNRVKLRDGRFLAYKERGVPKEKAKYKIILVHGFGSSKDMNFSASKELIEELEVYLLFYDRSGYGASDSNTKRSLESEVEDIAELADQLELGPKFYLIGISMGSYPTWGCLRHIPHRLSGVAFVAPVVNYRWPSLPKKLIKKDYRTGIIKWGLRISKYAPGLLHWWIIQKLFASTSSVLESNPVYFNSHDIEVLKRKTGFPMLTKEKLRERNVFDTLRDDFMVCFGQWDFEPADLSISTKSYIHIWHGKEDKVVPFQLQRCILQKQPLINYHEIPQGGHLIVHYDGICDTILRALLLKEEQQKLYKIN

SEQ ID NO: 74017 - protein, 269 aa, Arabidopsis thaliana
  peptide (1)..(269): Ceres Seq. ID no. 4991598
  misc_feature (15)..(261): Pfam Name: alpha/beta hydrolase fold Pfam Description: alpha/beta hydrolase fold
  misc_feature (78)..(269): Homolog of NCBI NO: 15223177 NR Description: unknown protein; protein id: At1g08310.1
  misc_feature (1)..(62): Homolog of NCBI NO: 15223177 NR Description: unknown protein; protein id: At1g08310.1
  misc_feature (78)..(265): Homolog of NCBI NO: 25407040 NR Description: protein T23G18.18 [imported] - Arabidopsis >gi|6579201|gb|AAF18244.1|AC011438_6 T23G18.18 [Arabidopsis
  misc_feature (1)..(62): Homolog of NCBI NO: 25407040 NR Description: protein T23G18.18 [imported] - Arabidopsis >gi|6579201|gb|AAF18244.1|AC011438_6 T23G18.18 [Arabidopsis
  misc_feature (167)..(269): Homolog of NCBI NO: 6664302 NR Description: T27G7.1 [Arabidopsis thaliana]
  misc_feature (1)..(62): Homolog of NCBI NO: 6664302 NR Description: T27G7.1 [Arabidopsis thaliana]
  misc_feature (78)..(144): Homolog of NCBI NO: 6664302 NR Description: T27G7.1 [Arabidopsis thaliana]
  misc_feature (1)..(258): Homolog of NCBI NO: 15242253 NR Description: putative protein; protein id: At5g22460.1, by cDNA: gi_15292740, supported by cDNA: gi_20465594 [Arabidopsis
  misc_feature (1)..(261): Homolog of NCBI NO: 15228377 NR Description: putative protein; protein id: At3g48410.1, by cDNA: gi_17529095 [Arabidopsis thaliana]
  misc_feature (1)..(265): Homolog of NCBI NO: 34908462 NR Description: P0683F02.22 [Oryza sativa (japonica
MNFSASKELIEELEVYLLFYDRSGYGASDSNTKRSLESEVEDIAELADQLELGPKFYLIGISMGSYPTWGCLRHIPHRLSGVAFVAPVVNYRWPSLPKKLIKKDYRTGIIKWGLRISKYAPGLLHWWIIQKLFASTSSVLESNPVYFNSHDIEVLKRKTGFPMLTKEKLRERNVFDTLRDDFMVCFGQWDFEPADLSISTKSYIHIWHGKEDKVVPFQLQRCILQKQPLINYHEIPQGGHLIVHYDGICDTILRALLLKEEQQKLYKIN

SEQ ID NO: 74018 - protein, 207 aa, Arabidopsis thaliana; identical to SEQ ID NO: 42624
  peptide (1)..(207): Ceres Seq. ID no. 4991599
  misc_feature (1)..(199): Pfam Name: alpha/beta hydrolase fold Pfam Description: alpha/beta hydrolase fold
  misc_feature (16)..(207): Homolog of NCBI NO: 15223177 NR Description: unknown protein; protein id: At1g08310.1
  misc_feature (16)..(203): Homolog of NCBI NO: 25407040 NR Description: protein T23G18.18 [imported] - Arabidopsis >gi|6579201|gb|AAF18244.1|AC011438_6 T23G18.18 [Arabidopsis
  misc_feature (105)..(207): Homolog of NCBI NO: 6664302 NR Description: T27G7.1 [Arabidopsis thaliana]
  misc_feature (16)..(82): Homolog of NCBI NO: 6664302 NR Description: T27G7.1 [Arabidopsis thaliana]
  misc_feature (1)..(196): Homolog of NCBI NO: 15242253 NR Description: putative protein; protein id: At5g22460.1, by cDNA: gi_15292740, supported by cDNA: gi_20465594 [Arabidopsis
  misc_feature (1)..(199): Homolog of NCBI NO: 15228377 NR Description: putative protein; protein id: At3g48410.1, by cDNA: gi_17529095 [Arabidopsis thaliana]
  misc_feature (1)..(203): Homolog of NCBI NO: 34908462 NR Description: P0683F02.22 [Oryza sativa (japonica
  misc_feature (1)..(194): Homolog of NCBI NO: 22122901 NR Description: hypothetical protein [Oryza sativa (japonica
  misc_feature (1)..(194): Homolog of NCBI NO: 37536162 NR Description: putative alpha/beta hydrolase [Oryza sativa
  misc_feature (1)..(199): Homolog of NCBI NO: 38346334 NR Description: OSJNBa0073L04.5 [Oryza sativa (japonica

SEQ ID NO: 74019 - DNA, 610 bp, Arabidopsis thaliana
  misc_feature (1)..(610): Ceres Seq. ID no. 4991643
  misc_feature: MA Experiment ID: 108434 Result: Down-regulated in Transcription
  misc_feature: MA Experiment 108434 PARAMETER Experiment Name: At_Root_Tips_cDNA_P Parameter: Tissue Value: Root Tips
  misc_feature: MA Experiment ID: 108435 Result: Down-regulated in Transcription
  misc_feature: MA Experiment 108435 PARAMETER Experiment Name: At_stm_Mutants_cDNA_P Parameter: Plant Line Value: wt Landsburg vs stm
  misc_feature: MA Experiment 108435 PARAMETER Experiment Name: At_stm_Mutants_cDNA_P Parameter: Tissue Value: Shoot Apical Meristem Region
  misc_feature: MA Experiment ID: 108461 Result: Up-regulated in Transcription
  misc_feature: MA Experiment 108461 PARAMETER Experiment Name: At_Germinating_Seeds_cDNA_P Parameter: Age (day) Value: 1 vs. 0
  misc_feature: MA Experiment 108461 PARAMETER Experiment Name: At_Germinating_Seeds_cDNA_P Parameter: Tissue Value: Germinating Seeds
  misc_feature: MA Experiment ID: 108462 Result: Up-regulated in Transcription
  misc_feature: MA Experiment 108462 PARAMETER Experiment Name: At_Germinating_Seeds_cDNA_P Parameter: Age (day) Value: 2 vs. 0
  misc_feature: MA Experiment 108462 PARAMETER Experiment Name: At_Germinating_Seeds_cDNA_P Parameter: Tissue Value: Germinating Seeds
  misc_feature: MA Experiment ID: 108464 Result: Up-regulated in Transcription
  misc_feature: MA Experiment 108464 PARAMETER Experiment Name: At_Germinating_Seeds_cDNA_P Parameter: Age (day) Value: 4 vs. 0
  misc_feature: MA Experiment 108464 PARAMETER Experiment Name: At_Germinating_Seeds_cDNA_P Parameter: Tissue Value: Germinating Seeds
  misc_feature: MA Experiment ID: 108488 Result: Up-regulated in Transcription
  misc_feature: MA Experiment ID: 108501 Result: Up-regulated in Transcription
  misc_feature: MA Experiment 108501 PARAMETER Experiment Name: At_ap2_floral_buds_cDNA_P Parameter: Plant Line Value: ap2 (Ler.)
  misc_feature: MA Experiment 108501 PARAMETER Experiment Name: At_ap2_floral_buds_cDNA_P Parameter: Tissue Value: Closed Flower
  misc_feature: MA Experiment ID: 108577 Result: Down-regulated in Transcription
  misc_feature: MA Experiment 108577 PARAMETER Experiment Name: At_42deg_Heat_cDNA_P Parameter: Temperature (deg C) Value: 42 vs. 22
  misc_feature: MA Experiment 108577 PARAMETER Experiment Name: At_42deg_Heat_cDNA_P Parameter: Timepoint (hr) Value: 6
  misc_feature: MA Experiment 108577 PARAMETER Experiment Name: At_42deg_Heat_cDNA_P Parameter: Tissue Value: Aerial
  misc_feature: MA Experiment ID: 108579 Result: Up-regulated in Transcription
  misc_feature: MA Experiment 108579 PARAMETER Experiment Name: At_4deg_Cold_cDNA_P Parameter: Temperature (deg C) Value: 4 vs. 22
  misc_feature: MA Experiment 108579 PARAMETER Experiment Name: At_4deg_Cold_cDNA_P Parameter: Timepoint (hr) Value: 6
  misc_feature: MA Experiment 108579 PARAMETER Experiment Name: At_4deg_Cold_cDNA_P Parameter: Tissue Value: Aerial
  misc_feature: MA Experiment ID: 108594 Result: Down-regulated in Transcription
  misc_feature: MA Experiment 108594 PARAMETER Experiment Name: At_Ler-rhl_Root_cDNA_P Parameter: Plant Line Value: null
  misc_feature: MA Experiment ID: 108595 Result: Down-regulated in Transcription
  misc_feature: MA Experiment 108595 PARAMETER Experiment Name: At_Ler-pi_Ovule_cDNA_P Parameter: Plant Line Value: null
  misc_feature: MA Experiment ID: 108605 Result: Up-regulated in Transcription
  misc_feature: MA Experiment 108605 PARAMETER Experiment Name: At_100uM_ABA_cDNA_P Parameter: Timepoint (hr) Value: 6
  misc_feature: MA Experiment 108605 PARAMETER Experiment Name: At_100uM_ABA_cDNA_P Parameter: Tissue Value: Aerial
  misc_feature: MA Experiment 108605 PARAMETER Experiment Name: At_100uM_ABA_cDNA_P Parameter: Treatment Value: 100uM ABA vs. No Treatment
  misc_feature: MA Experiment ID: 108607 Result: Up-regulated in Transcription
  misc_feature: MA Experiment 108607 PARAMETER Experiment Name: At_100uM_ABA_cDNA_P Parameter: Timepoint (hr) Value: 4
  misc_feature: MA Experiment 108607 PARAMETER Experiment Name: At_100uM_ABA_cDNA_P Parameter: Tissue Value: Aerial
  misc_feature: MA Experiment 108607 PARAMETER Experiment Name: At_100uM_ABA_cDNA_P Parameter: Treatment Value: 100uM ABA vs. No Treatment
  misc_feature: MA Experiment ID: 20000090 Result: Down-regulated in Transcription
  misc_feature: MA Experiment ID: 20000111 Result: Down-regulated in Transcription
  misc_feature: MA Experiment 20000111 PARAMETER Experiment Name: At_42deg_Heat_cDNA_P Parameter: Temperature (deg C) Value: 42 vs. 22
  misc_feature: MA Experiment 20000111 PARAMETER Experiment Name: At_42deg_Heat_cDNA_P Parameter: Timepoint (hr) Value: 6
  misc_feature: MA Experiment 20000111 PARAMETER Experiment Name: At_42deg_Heat_cDNA_P Parameter: Tissue Value: Aerial
  misc_feature: MA Experiment ID: 20000113 Result: Down-regulated in Transcription
  misc_feature: MA Experiment 20000113 PARAMETER Experiment Name: At_42deg_Heat_cDNA_P Parameter: Temperature (deg C) Value: 42 vs. 22
  misc_feature: MA Experiment 20000113 PARAMETER Experiment Name: At_42deg_Heat_cDNA_P Parameter: Timepoint (hr) Value: 8
  misc_feature: MA Experiment 20000113 PARAMETER Experiment Name: At_42deg_Heat_cDNA_P Parameter: Tissue Value: Aerial
  misc_feature: MA Experiment ID: 20000169 Result: Up-regulated in Transcription
  misc_feature: MA Experiment 20000169 PARAMETER Experiment Name: At_100uM_ABA_P Parameter: Age (day) Value: 14
  misc_feature: MA Experiment 20000169 PARAMETER Experiment Name: At_100uM_ABA_P Parameter: Organism Value: A. thaliana
  misc_feature: MA Experiment 20000169 PARAMETER Experiment Name: At_100uM_ABA_P Parameter: Plant Line Value: WS
  misc_feature: MA Experiment 20000169 PARAMETER Experiment Name: At_100uM_ABA_P Parameter: Timepoint (hr) Value: 6
  misc_feature: MA Experiment 20000169 PARAMETER Experiment Name: At_100uM_ABA_P Parameter: Tissue Value: Aerial
  misc_feature: MA Experiment 20000169 PARAMETER Experiment Name: At_100uM_ABA_P Parameter: Treatment Value: 100uM ABA vs. No Treatment
  misc_feature: MA Experiment ID: 20000180 Result: Up-regulated in Transcription
  misc_feature: MA Experiment 20000180 PARAMETER Experiment Name: At_Germinating_Seeds_P Parameter: Age (hr) Value: 24 vs. 0
  misc_feature: MA Experiment 20000180 PARAMETER Experiment Name: At_Germinating_Seeds_P Parameter: Tissue Value: Germinating Seeds
  misc_feature: MA Experiment ID: 20000185 Result: Down-regulated in Transcription
  misc_feature: MA Experiment 20000185 PARAMETER Experiment Name: At_Roots__P Parameter: Age (day) Value: 7 vs. 21
  misc_feature: MA Experiment 20000185 PARAMETER Experiment Name: At_Roots__P Parameter: Organism Value: A. thaliana
  misc_feature: MA Experiment 20000185 PARAMETER Experiment Name: At_Roots__P Parameter: Tissue Value: Roots vs. Whole Plant
  misc_feature: MA Experiment ID: 20000224 Result: Up-regulated in Transcription
  misc_feature: MA Experiment ID: 20000439 Result: Down-regulated in Transcription
  misc_feature: MA Experiment 20000439 PARAMETER Experiment Name: At_Roots__P Parameter: Age (day) Value: 14 vs. 21
  misc_feature: MA Experiment 20000439 PARAMETER Experiment Name: At_Roots__P Parameter: Organism Value: A. thaliana
  misc_feature: MA Experiment 20000439 PARAMETER Experiment Name: At_Roots__P Parameter: Tissue Value: Roots vs. Whole Plant
  misc_feature: MA Experiment ID: 20000451 Result: Up-regulated in Transcription
  misc_feature: MA Experiment 20000451 PARAMETER Experiment Name: At_CS6879_Shoots-Roots_P Parameter: Age (day) Value: 14
  misc_feature: MA Experiment 20000451 PARAMETER Experiment Name: At_CS6879_Shoots-Roots_P Parameter: Organism Value: A. thaliana
  misc_feature: MA Experiment 20000451 PARAMETER Experiment Name: At_CS6879_Shoots-Roots_P Parameter: Plant Line Value: CS6879 vs. WS
  misc_feature: MA Experiment 20000451 PARAMETER Experiment Name: At_CS6879_Shoots-Roots_P Parameter: Tissue Value: Roots
  misc_feature: MA Experiment ID: 20000496 Result: Down-regulated in Transcription
  misc_feature: MA Experiment 20000496 PARAMETER Experiment Name: At_Guard_Cells_P Parameter: Harvest Date Value: 7/19/2002
  misc_feature: MA Experiment 20000496 PARAMETER Experiment Name: At_Guard_Cells_P Parameter: Organism Value: Canola
  misc_feature: MA Experiment 20000496 PARAMETER Experiment Name: At_Guard_Cells_P Parameter: Tissue Value: Guard Cells vs. Leaves
  misc_feature: MA Experiment ID: 20000573 Result: Down-regulated in Transcription
  misc_feature: MA Experiment 20000573 PARAMETER Experiment Name: At_100uM_ABA_Mutants__P Parameter: Organism Value: A. thaliana
  misc_feature: MA Experiment 20000573 PARAMETER Experiment Name: At_100uM_ABA_Mutants__P Parameter: Plant Line Value: CS22 vs. Ler wt
  misc_feature: MA Experiment 20000573 PARAMETER Experiment Name: At_100uM_ABA_Mutants__P Parameter: Timepoint (hr) Value: N/A
  misc_feature: MA Experiment 20000573 PARAMETER Experiment Name: At_100uM_ABA_Mutants__P Parameter: Tissue Value: Whole Plant
  misc_feature: MA Experiment 20000573 PARAMETER Experiment Name: At_100uM_ABA_Mutants__P Parameter: Treatment Value: None
  misc_feature: MA Experiment ID: 20000576 Result: Up-regulated in Transcription
  misc_feature: MA Experiment 20000576 PARAMETER Experiment Name: At_100uM_ABA_Mutants__P Parameter: Organism Value: A. thaliana
  misc_feature: MA Experiment 20000576 PARAMETER Experiment Name: At_100uM_ABA_Mutants__P Parameter: Plant Line Value: CS23
  misc_feature: MA Experiment 20000576 PARAMETER Experiment Name: At_100uM_ABA_Mutants__P Parameter: Timepoint (hr) Value: 6
  misc_feature: MA Experiment 20000576 PARAMETER Experiment Name: At_100uM_ABA_Mutants__P Parameter: Tissue Value: Whole Plant
  misc_feature: MA Experiment 20000576 PARAMETER Experiment Name: At_100uM_ABA_Mutants__P Parameter: Treatment Value: 1uM ABA vs. No Treatment
  misc_feature: MA Experiment ID: 20000794 Result: Down-regulated in Transcription
  misc_feature: MA Experiment 20000794 PARAMETER Experiment Name: At_Petals_P Parameter: Age (day) Value: 23-25 days
  misc_feature: MA Experiment 20000794 PARAMETER Experiment Name: At_Petals_P Parameter: Plant Line Value: WS
  misc_feature: MA Experiment 20000794 PARAMETER Experiment Name: At_Petals_P Parameter: Tissue Value: Petals vs. Whole plant
  misc_feature: MA Experiment ID: 20001248 Result: Down-regulated in Transcription
  misc_feature: MA Experiment 20001248 PARAMETER Experiment Name: At_Far-red-induction_P Parameter: Age (day) Value: 7
  misc_feature: MA Experiment 20001248 PARAMETER Experiment Name: At_Far-red-induction_P Parameter: Light Value: Far-red vs. White
  misc_feature: MA Experiment 20001248 PARAMETER Experiment Name: At_Far-red-induction_P Parameter: Organism Value: A. thaliana
  misc_feature: MA Experiment 20001248 PARAMETER Experiment Name: At_Far-red-induction_P Parameter: Plant Line Value: Columbia
  misc_feature: MA Experiment 20001248 PARAMETER Experiment Name: At_Far-red-induction_P Parameter: Timepoint (hr) Value: 4
  misc_feature: MA Experiment 20001248 PARAMETER Experiment Name: At_Far-red-induction_P Parameter: Tissue Value: Whole Plant
  misc_feature: MA Experiment ID: 20001451 Result: Down-regulated in Transcription
  misc_feature: MA Experiment 20001451 PARAMETER Experiment Name: At_Far-red-induction_P Parameter: Age (day) Value: 7
  misc_feature: MA Experiment 20001451 PARAMETER Experiment Name: At_Far-red-induction_P Parameter: Light Value: Far-red vs. White
  misc_feature: MA Experiment 20001451 PARAMETER Experiment Name: At_Far-red-induction_P Parameter: Organism Value: A. thaliana
  misc_feature: MA Experiment 20001451 PARAMETER Experiment Name: At_Far-red-induction_P Parameter: Plant Line Value: Columbia
  misc_feature: MA Experiment 20001451 PARAMETER Experiment Name: At_Far-red-induction_P Parameter: Timepoint (hr) Value: 24
  misc_feature: MA Experiment 20001451 PARAMETER Experiment Name: At_Far-red-induction_P Parameter: Tissue Value: Whole Plant
acaacacaacttcagctttaagacagctaaaactaaatacaaagaaacagagatgggtttggttacagaggaggtgagagctaaggcagagatgtacaccggagatgagatatgtagagagaagacaaagtgtttcctcaaggaaatatctatgcccaatggtttattaccattgaaggatatagaagaggttgggtatgacagagagtcaggtgttgtatggctgaagcagaagaagagcatcactcacaagttcacagagatagataagcttgtctcctatggaaccgaagtcacagcttttatagtcccagaagaacctgccaaggaggaacctgccaaagaggaacctgccaaggagaagagcagcgaagccaccgaggccaaggaggctgttgcaatcaaggaggctgtcgcagtcaaagaggcggcctaatcagctcagcttcagcagataaaagagacccgaatttttaagtgtacttcaagaatttgaacaaatcatggagagttagtgtttctcactgctctaactatcatgtattatctacctaccacttgttgctgcttgttttacctgtaataagatatcaatatcatcctgttccac

SEQ ID NO: 74020 - protein, 144 aa, Arabidopsis thaliana
  peptide (1)..(144): Ceres Seq. ID no. 4991644
  misc_feature (20)..(102): Pfam Name: Protein of unknown function, DUF538 Pfam Description: Protein of unknown function, DUF538
  misc_feature (18)..(102): Homolog of NCBI NO: 18391006 NR Description: expressed protein; protein id: At1g09310.1, by cDNA: 11073., supported by cDNA: gi_13194795, supported by gi_15028182, supported by cDNA: gi_19310812 [Arabidopsis
  misc_feature (98)..(144): Homolog of NCBI NO: 18391006 NR Description: expressed protein; protein id: At1g09310.1, by cDNA: 11073., supported by cDNA: gi_13194795, supported by gi_15028182, supported by cDNA: gi_19310812 [Arabidopsis
  misc_feature (18)..(100): Homolog of NCBI NO: 18405887 NR Description: expressed protein; protein id: At1g56580.1, by cDNA: gi_16648668, supported by cDNA: gi_20856238 [Arabidopsis >gi|25404133|pir||E96607 hypothetical protein F25P12.97
  misc_feature (23)..(102): Homolog of NCBI NO: 34915410 NR Description: hypothetical protein~similar to Arabidopsis
  misc_feature (23)..(102): Homolog of NCBI NO: 34903866 NR Description: unnamed protein product [Oryza sativa (japonica group)] >gi|8096574|dbj|BAA96147.1| unnamed protein product
  misc_feature (23)..(102): Homolog of NCBI NO: 34915426 NR Description: hypothetical protein~similar to Arabidopsis
  misc_feature (23)..(102): Homolog of NCBI NO: 34915378 NR Description: hypothetical protein~similar to Oryza sativa
  misc_feature (23)..(102): Homolog of NCBI NO: 34915416 NR Description: hypothetical protein~similar to Arabidopsis
  misc_feature (23)..(102): Homolog of NCBI NO: 34915422 NR Description: hypothetical protein~similar to Arabidopsis
  misc_feature (23)..(101): Homolog of NCBI NO: 33146557 NR Description: unknown protein [Oryza sativa (japonica
QHNFSFKTAKTKYKETEMGLVTEEVRAKAEMYTGDEICREKTKCFLKEISMPNGLLPLKDIEEVGYDRESGVVWLKQKKSITHKFTEIDKLVSYGTEVTAFIVPEEPAKEEPAKEEPAKEKSSEATEAKEAVAIKEAVAVKEAA

SEQ ID NO: 74021 - protein, 127 aa, Arabidopsis thaliana
  peptide (1)..(127): Ceres Seq. ID no. 4991645
  misc_feature (3)..(85): Pfam Name: Protein of unknown function, DUF538 Pfam Description: Protein of unknown function, DUF538
  misc_feature (1)..(85): Homolog of NCBI NO: 18391006 NR Description: expressed protein; protein id: At1g09310.1, by cDNA: 11073., supported by cDNA: gi_13194795, supported by gi_15028182, supported by cDNA: gi_19310812 [Arabidopsis
  misc_feature (81)..(127): Homolog of NCBI NO: 18391006 NR Description: expressed protein; protein id: At1g09310.1, by cDNA: 11073., supported by cDNA: gi_13194795, supported by gi_15028182, supported by cDNA: gi_19310812 [Arabidopsis
  misc_feature (1)..(83): Homolog of NCBI NO: 18405887 NR Description: expressed protein; protein id: At1g56580.1, by cDNA: gi_16648668, supported by cDNA: gi_20856238 [Arabidopsis >gi|25404133|pir||E96607 hypothetical protein F25P12.97
  misc_feature (6)..(85): Homolog of NCBI NO: 34915410 NR Description: hypothetical protein~similar to Arabidopsis
  misc_feature (6)..(85): Homolog of NCBI NO: 34903866 NR Description: unnamed protein product [Oryza sativa (japonica group)] >gi|8096574|dbj|BAA96147.1| unnamed protein product
  misc_feature (6)..(85): Homolog of NCBI NO: 34915426 NR Description: hypothetical protein~similar to Arabidopsis
  misc_feature (6)..(85): Homolog of NCBI NO: 34915378 NR Description: hypothetical protein~similar to Oryza sativa
  misc_feature (6)..(85): Homolog of NCBI NO: 34915416 NR Description: hypothetical protein~similar to Arabidopsis
  misc_feature (6)..(85): Homolog of NCBI NO: 34915422 NR Description: hypothetical protein~similar to Arabidopsis
  misc_feature (6)..(84): Homolog of NCBI NO: 33146557 NR Description: unknown protein [Oryza sativa (japonica
MGLVTEEVRAKAEMYTGDEICREKTKCFLKEISMPNGLLPLKDIEEVGYDRESGVVWLKQKKSITHKFTEIDKLVSYGTEVTAFIVPEEPAKEEPAKEEPAKEKSSEATEAKEAVAIKEAVAVKEAA

SEQ ID NO: 74022 - protein, 114 aa, Arabidopsis thaliana
  peptide (1)..(114): Ceres Seq. ID no. 4991646
  misc_feature (1)..(72): Pfam Name: Protein of unknown function, DUF538 Pfam Description: Protein of unknown function, DUF538
  misc_feature (1)..(72): Homolog of NCBI NO: 18391006 NR Description: expressed protein; protein id: At1g09310.1, by cDNA: 11073., supported by cDNA: gi_13194795, supported by gi_15028182, supported by cDNA: gi_19310812 [Arabidopsis
  misc_feature (68)..(114): Homolog of NCBI NO: 18391006 NR Description: expressed protein; protein id: At1g09310.1, by cDNA: 11073., supported by cDNA: gi_13194795, supported by gi_15028182, supported by cDNA: gi_19310812 [Arabidopsis
  misc_feature (1)..(70): Homolog of NCBI NO: 18405887 NR Description: expressed protein; protein id: At1g56580.1, by cDNA: gi_16648668, supported by cDNA: gi_20856238 [Arabidopsis >gi|25404133|pir||E96607 hypothetical protein F25P12.97
  misc_feature (1)..(72): Homolog of NCBI NO: 34915410 NR Description: hypothetical protein~similar to Arabidopsis
  misc_feature (1)..(72): Homolog of NCBI NO: 34903866 NR Description: unnamed protein product [Oryza sativa (japonica group)] >gi|8096574|dbj|BAA96147.1| unnamed protein product
  misc_feature (1)..(72): Homolog of NCBI NO: 34915426 NR Description: hypothetical protein~similar to Arabidopsis
  misc_feature (1)..(72): Homolog of NCBI NO: 34915378 NR Description: hypothetical protein~similar to Oryza sativa
  misc_feature (1)..(72): Homolog of NCBI NO: 34915416 NR Description: hypothetical protein~similar to Arabidopsis
  misc_feature (1)..(72): Homolog of NCBI NO: 34915422 NR Description: hypothetical protein~similar to Arabidopsis
  misc_feature (1)..(71): Homolog of NCBI NO: 33146557 NR Description: unknown protein [Oryza sativa (japonica
MYTGDEICREKTKCFLKEISMPNGLLPLKDIEEVGYDRESGVVWLKQKKSITHKFTEIDKLVSYGTEVTAFIVPEEPAKEEPAKEEPAKEKSSEATEAKEAVAIKEAVAVKEAA

SEQ ID NO: 74023 - DNA, 559 bp, Arabidopsis thaliana
  misc_feature (1)..(559): Ceres Seq. ID no. 4991685
  misc_feature: MA Experiment ID: 108464 Result: Up-regulated in Transcription
  misc_feature: MA Experiment 108464 PARAMETER Experiment Name: At_Germinating_Seeds_cDNA_P Parameter: Age (day) Value: 4 vs. 0
  misc_feature: MA Experiment 108464 PARAMETER Experiment Name: At_Germinating_Seeds_cDNA_P Parameter: Tissue Value: Germinating Seeds
  misc_feature: MA Experiment ID: 108501 Result: Down-regulated in Transcription
  misc_feature: MA Experiment 108501 PARAMETER Experiment Name: At_ap2_floral_buds_cDNA_P Parameter: Plant Line Value: ap2 (Ler.)
  misc_feature: MA Experiment 108501 PARAMETER Experiment Name: At_ap2_floral_buds_cDNA_P Parameter: Tissue Value: Closed Flower
  misc_feature: MA Experiment ID: 108576 Result: Up-regulated in Transcription
  misc_feature: MA Experiment 108576 PARAMETER Experiment Name: At_42deg_Heat_cDNA_P Parameter: Temperature (deg C) Value: 42 vs. 22
  misc_feature: MA Experiment 108576 PARAMETER Experiment Name: At_42deg_Heat_cDNA_P Parameter: Timepoint (hr) Value: 1
  misc_feature: MA Experiment 108576 PARAMETER Experiment Name: At_42deg_Heat_cDNA_P Parameter: Tissue Value: Aerial
  misc_feature: MA Experiment ID: 108577 Result: Up-regulated in Transcription
  misc_feature: MA Experiment 108577 PARAMETER Experiment Name: At_42deg_Heat_cDNA_P Parameter: Temperature (deg C) Value: 42 vs. 22
  misc_feature: MA Experiment 108577 PARAMETER Experiment Name: At_42deg_Heat_cDNA_P Parameter: Timepoint (hr) Value: 6
  misc_feature: MA Experiment 108577 PARAMETER Experiment Name: At_42deg_Heat_cDNA_P Parameter: Tissue Value: Aerial
  misc_feature: MA Experiment ID: 108595 Result: Up-regulated in Transcription
  misc_feature: MA Experiment 108595 PARAMETER Experiment Name: At_Ler-pi_Ovule_cDNA_P Parameter: Plant Line Value: null
  misc_feature: MA Experiment ID: 20000093 Result: Up-regulated in Transcription
  misc_feature: MA Experiment 20000093 PARAMETER Experiment Name: At_42deg_Heat_cDNA_P Parameter: Temperature (deg C) Value: 42 vs. 22
  misc_feature: MA Experiment 20000093 PARAMETER Experiment Name: At_42deg_Heat_cDNA_P Parameter: Timepoint (hr) Value: 0.5
  misc_feature: MA Experiment 20000093 PARAMETER Experiment Name: At_42deg_Heat_cDNA_P Parameter: Tissue Value: Aerial
  misc_feature: MA Experiment ID: 20000111 Result: Up-regulated in Transcription
  misc_feature: MA Experiment 20000111 PARAMETER Experiment Name: At_42deg_Heat_cDNA_P Parameter: Temperature (deg C) Value: 42 vs. 22
  misc_feature: MA Experiment 20000111 PARAMETER Experiment Name: At_42deg_Heat_cDNA_P Parameter: Timepoint (hr) Value: 6
  misc_feature: MA Experiment 20000111 PARAMETER Experiment Name: At_42deg_Heat_cDNA_P Parameter: Tissue Value: Aerial
  misc_feature: MA Experiment ID: 20000113 Result: Up-regulated in Transcription
  misc_feature: MA Experiment 20000113 PARAMETER Experiment Name: At_42deg_Heat_cDNA_P Parameter: Temperature (deg C) Value: 42 vs. 22
  misc_feature: MA Experiment 20000113 PARAMETER Experiment Name: At_42deg_Heat_cDNA_P Parameter: Timepoint (hr) Value: 8
  misc_feature: MA Experiment 20000113 PARAMETER Experiment Name: At_42deg_Heat_cDNA_P Parameter: Tissue Value: Aerial
  misc_feature: MA Experiment ID: 20000184 Result: Up-regulated in Transcription
  misc_feature: MA Experiment 20000184 PARAMETER Experiment Name: At_Shoots__P Parameter: Age (day) Value: 7
  misc_feature: MA Experiment 20000184 PARAMETER Experiment Name: At_Shoots__P Parameter: Tissue Value: Shoots vs. Whole Plant
aacaaccaaaaacattcatttgtcattttgtctcctcttttgttttctctgatcactagtatggctgtattcagagtcttgcttgcttctcttctcatatctcttcttgtcctcgacttcgtccatgccgatatggtgacgtcgaatgacgcccctaaaatcgattgcaacagcaggtgccaagagcggtgcagtctttcgagtaggccaaatctttgtcacagagcgtgcgggacttgctgcgctaggtgcaactgcgtggcaccgggcacatccggaaactacgacaaatgtccgtgctatggtagcctaaccacccacggaggacgcagaaagtgtccttaaaaactctgtcgctgtttgatttgatttcgtttataatactttacttttatgagagtaattgtggttattttcttgggaattattaaaaagcaaaagaaagagaatgttatacgtcatgtgcaactcttcgatctttgttttagtgtttatccaatttgtacttgttggtttggttcctggttaacattaggtctgaaaaggtattgtttttcat

SEQ ID NO: 74024 - protein, 114 aa, Arabidopsis thaliana; identical to SEQ ID NO: 20550
  peptide (1)..(114): Ceres Seq. ID no. 4991686
  misc_feature (23)..(112): Pfam Name: Gibberellin regulated protein Pfam Description: Gibberellin regulated protein
  misc_feature (21)..(112): Homolog of NCBI NO: 15224170 NR Description: similar to gibberellin-regulated proteins; id: At2g18420.1 [Arabidopsis thaliana] >gi|25313157|pir||B84564
  misc_feature (51)..(114): Homolog of NCBI NO: 25313155 NR Description: protein F10A5.6 [imported] - Arabidopsis thaliana
  misc_feature (21)..(46): Homolog of NCBI NO: 25313155 NR Description: protein F10A5.6 [imported] - Arabidopsis thaliana
  misc_feature (21)..(114): Homolog of NCBI NO: 887939 NR Description: GAST1 protein homolog
  misc_feature (21)..(114): Homolog of NCBI NO: 18410924 NR Description: expressed protein; protein id: At1g75750.1, by cDNA: 9435., supported by cDNA: gi_18087523, supported by gi_887938 [Arabidopsis thaliana]
  misc_feature (21)..(114): Homolog of NCBI NO: 21618022 NR Description: GAST1-like protein [Arabidopsis thaliana]
  misc_feature (21)..(114): Homolog of NCBI NO: 22530936 NR Description: expressed protein [Arabidopsis thaliana]
  misc_feature (21)..(114): Homolog of NCBI NO: 2253442 NR Description: LTCOR11 [Lavatera thuringiaca]
  misc_feature (21)..(114): Homolog of NCBI NO: 14625945 NR Description: snakin2 [Solanum tuberosum]
  misc_feature (21)..(114): Homolog of NCBI NO: 3094012 NR Description: cold-regulated LTCOR12 [Lavatera thuringiaca]

SEQ ID NO: 74025 - protein, 94 aa, Arabidopsis thaliana; identical to SEQ ID NO: 20551
  peptide (1)..(94): Ceres Seq. ID no. 4991687
  misc_feature (3)..(92): Pfam Name: Gibberellin regulated protein Pfam Description: Gibberellin regulated protein
  misc_feature (1)..(92): Homolog of NCBI NO: 15224170 NR Description: similar to gibberellin-regulated proteins; id: At2g18420.1 [Arabidopsis thaliana] >gi|25313157|pir||B84564
  misc_feature (31)..(94): Homolog of NCBI NO: 25313155 NR Description: protein F10A5.6 [imported] - Arabidopsis thaliana
  misc_feature (1)..(26): Homolog of NCBI NO: 25313155 NR Description: protein F10A5.6 [imported] - Arabidopsis thaliana
  misc_feature (1)..(94): Homolog of NCBI NO: 887939 NR Description: GAST1 protein homolog
  misc_feature (1)..(94): Homolog of NCBI NO: 18410924 NR Description: expressed protein; protein id: At1g75750.1, by cDNA: 9435., supported by cDNA: gi_18087523, supported by gi_887938 [Arabidopsis thaliana]
  misc_feature (1)..(94): Homolog of NCBI NO: 21618022 NR Description: GAST1-like protein [Arabidopsis thaliana]
  misc_feature (1)..(94): Homolog of NCBI NO: 22530936 NR Description: expressed protein [Arabidopsis thaliana]
  misc_feature (1)..(94): Homolog of NCBI NO: 2253442 NR Description: LTCOR11 [Lavatera thuringiaca]
  misc_feature (1)..(94): Homolog of NCBI NO: 14625945 NR Description: snakin2 [Solanum tuberosum]
  misc_feature (1)..(94): Homolog of NCBI NO: 3094012 NR Description: cold-regulated LTCOR12 [Lavatera thuringiaca]

SEQ ID NO: 74026 - protein, 70 aa, Arabidopsis thaliana; identical to SEQ ID NO: 20552
  peptide (1)..(70): Ceres Seq. ID no. 4991688
  misc_feature (1)..(68): Pfam Name: Gibberellin regulated protein Pfam Description: Gibberellin regulated protein
  misc_feature (1)..(68): Homolog of NCBI NO: 15224170 NR Description: similar to gibberellin-regulated proteins; id: At2g18420.1 [Arabidopsis thaliana] >gi|25313157|pir||B84564
  misc_feature (7)..(70): Homolog of NCBI NO: 25313155 NR Description: protein F10A5.6 [imported] - Arabidopsis thaliana
  misc_feature (1)..(70): Homolog of NCBI NO: 887939 NR Description: GAST1 protein homolog
  misc_feature (1)..(70): Homolog of NCBI NO: 18410924 NR Description: expressed protein; protein id: At1g75750.1, by cDNA: 9435., supported by cDNA: gi_18087523, supported by gi_887938 [Arabidopsis thaliana]
  misc_feature (1)..(70): Homolog of NCBI NO: 21618022 NR Description: GAST1-like protein [Arabidopsis thaliana]
  misc_feature (1)..(70): Homolog of NCBI NO: 22530936 NR Description: expressed protein [Arabidopsis thaliana]
  misc_feature (1)..(70): Homolog of NCBI NO: 2253442 NR Description: LTCOR11 [Lavatera thuringiaca]
  misc_feature (1)..(70): Homolog of NCBI NO: 14625945 NR Description: snakin2 [Solanum tuberosum]
  misc_feature (1)..(70): Homolog of NCBI NO: 3094012 NR Description: cold-regulated LTCOR12 [Lavatera thuringiaca]
  misc_feature (1)..(70): Homolog of NCBI NO: 14625943 NR Description: snakin2 [Solanum tuberosum]

SEQ ID NO: 74027 - DNA, 1137 bp, Arabidopsis thaliana
  misc_feature (1)..(1137): Ceres Seq. ID no. 4991737
  misc_feature: MA Experiment ID: 108433 Result: Up-regulated in Transcription
  misc_feature: MA Experiment 108433 PARAMETER Experiment Name: At_rhl_Mutant2_cDNA_P Parameter: Age (day) Value: 7
  misc_feature: MA Experiment 108433 PARAMETER Experiment Name: At_rhl_Mutant2_cDNA_P Parameter: Organism Value: A. thaliana
  misc_feature: MA Experiment 108433 PARAMETER Experiment Name: At_rhl_Mutant2_cDNA_P Parameter: Plant Line Value: rhl Mutant vs. wt landsburg
  misc_feature: MA Experiment 108433 PARAMETER Experiment Name: At_rhl_Mutant2_cDNA_P Parameter: Tissue Value: Roots
  misc_feature: MA Experiment ID: 108434 Result: Up-regulated in Transcription
  misc_feature: MA Experiment 108434 PARAMETER Experiment Name: At_Root_Tips_cDNA_P Parameter: Tissue Value: Root Tips
  misc_feature: MA Experiment ID: 108464 Result: Down-regulated in Transcription
  misc_feature: MA Experiment 108464 PARAMETER Experiment Name: At_Germinating_Seeds_cDNA_P Parameter: Age (day) Value: 4 vs. 0
  misc_feature: MA Experiment 108464 PARAMETER Experiment Name: At_Germinating_Seeds_cDNA_P Parameter: Tissue Value: Germinating Seeds
  misc_feature: MA Experiment ID: 108473 Result: Down-regulated in Transcription
  misc_feature: MA Experiment 108473 PARAMETER Experiment Name: At_Drought_Flowers_cDNA_P Parameter: Timepoint (hr) Value: 7 d
  misc_feature: MA Experiment 108473 PARAMETER Experiment Name: At_Drought_Flowers_cDNA_P Parameter: Tissue Value: Flower
  misc_feature: MA Experiment 108473 PARAMETER Experiment Name: At_Drought_Flowers_cDNA_P Parameter: Treatment Value: Drought vs. No Drought
  misc_feature: MA Experiment ID: 108594 Result: Down-regulated in Transcription
  misc_feature: MA Experiment 108594 PARAMETER Experiment Name: At_Ler-rhl_Root_cDNA_P Parameter: Plant Line Value: null
  misc_feature: MA Experiment ID: 20000068 Result: Up-regulated in Transcription
  misc_feature: MA Experiment ID: 20000071 Result: Down-regulated in Transcription
  misc_feature: MA Experiment 20000071 PARAMETER Experiment Name: At_100uM_ABA_Mutants_cDNA_P Parameter: Plant Line Value: CS8104
  misc_feature: MA Experiment 20000071 PARAMETER Experiment Name: At_100uM_ABA_Mutants_cDNA_P Parameter: Timepoint (hr) Value: 6
  misc_feature: MA Experiment 20000071 PARAMETER Experiment Name: At_100uM_ABA_Mutants_cDNA_P Parameter: Tissue Value: Aerial
  misc_feature: MA Experiment 20000071 PARAMETER Experiment Name: At_100uM_ABA_Mutants_cDNA_P Parameter: Treatment Value: 100uM ABA vs. No Treatment
  misc_feature: MA Experiment ID: 20000087 Result: Down-regulated in Transcription
  misc_feature: MA Experiment 20000087 PARAMETER Experiment Name: At_100uM_ABA_Mutants_cDNA_P Parameter: Plant Line Value: WS
  misc_feature: MA Experiment 20000087 PARAMETER Experiment Name: At_100uM_ABA_Mutants_cDNA_P Parameter: Timepoint (hr) Value: 6
  misc_feature: MA Experiment 20000087 PARAMETER Experiment Name: At_100uM_ABA_Mutants_cDNA_P Parameter: Tissue Value: Aerial
  misc_feature: MA Experiment 20000087 PARAMETER Experiment Name: At_100uM_ABA_Mutants_cDNA_P Parameter: Treatment Value: 100uM ABA vs. No Treatment
  misc_feature: MA Experiment ID: 20000089 Result: Down-regulated in Transcription
  misc_feature: MA Experiment ID: 20000090 Result: Down-regulated in Transcription
  misc_feature: MA Experiment ID: 20000117 Result: Down-regulated in Transcription
  misc_feature: MA Experiment 20000117 PARAMETER Experiment Name: At_100uM_ABA_Mutants_cDNA_P Parameter: Plant Line Value: Columbia
  misc_feature: MA Experiment 20000117 PARAMETER Experiment Name: At_100uM_ABA_Mutants_cDNA_P Parameter: Timepoint (hr) Value: 6
  misc_feature: MA Experiment 20000117 PARAMETER Experiment Name: At_100uM_ABA_Mutants_cDNA_P Parameter: Tissue Value: Aerial
  misc_feature: MA Experiment 20000117 PARAMETER Experiment Name: At_100uM_ABA_Mutants_cDNA_P Parameter: Treatment Value: 100uM ABA vs. No Treatment
  misc_feature: MA Experiment ID: 20000184 Result: Up-regulated in Transcription
  misc_feature: MA Experiment 20000184 PARAMETER Experiment Name: At_Shoots__P Parameter: Age (day) Value: 7
  misc_feature: MA Experiment 20000184 PARAMETER Experiment Name: At_Shoots__P Parameter: Tissue Value: Shoots vs. Whole Plant
  misc_feature: MA Experiment ID: 20000185 Result: Up-regulated in Transcription
  misc_feature: MA Experiment 20000185 PARAMETER Experiment Name: At_Roots__P Parameter: Age (day) Value: 7 vs. 21
  misc_feature: MA Experiment 20000185 PARAMETER Experiment Name: At_Roots__P Parameter: Organism Value: A. thaliana
  misc_feature: MA Experiment 20000185 PARAMETER Experiment Name: At_Roots__P Parameter: Tissue Value: Roots vs. Whole Plant
  misc_feature: MA Experiment ID: 20000227 Result: Up-regulated in Transcription
  misc_feature: MA Experiment 20000227 PARAMETER Experiment Name: At_Root-Tips-vs-Tops_P Parameter: Tissue Value: Root Tips vs. Root Tops
  misc_feature: MA Experiment ID: 20000438 Result: Up-regulated in Transcription
  misc_feature: MA Experiment 20000438 PARAMETER Experiment Name: At_Shoots__P Parameter: Age (day) Value: 14
  misc_feature: MA Experiment 20000438 PARAMETER Experiment Name: At_Shoots__P Parameter: Tissue Value: Shoots vs. Whole Plant
  misc_feature: MA Experiment ID: 20000439 Result: Up-regulated in Transcription
  misc_feature: MA Experiment 20000439 PARAMETER Experiment Name: At_Roots__P Parameter: Age (day) Value: 14 vs. 21
  misc_feature: MA Experiment 20000439 PARAMETER Experiment Name: At_Roots__P Parameter: Organism Value: A. thaliana
  misc_feature: MA Experiment 20000439 PARAMETER Experiment Name: At_Roots__P Parameter: Tissue Value: Roots vs. Whole Plant
  misc_feature: MA Experiment ID: 20000527 Result: Down-regulated in Transcription
  misc_feature: MA Experiment 20000527 PARAMETER Experiment Name: At_10percent_PEG_P Parameter: Age (day) Value: 20
  misc_feature: MA Experiment 20000527 PARAMETER Experiment Name: At_10percent_PEG_P Parameter: Organism Value: A. thaliana
  misc_feature: MA Experiment 20000527 PARAMETER Experiment Name: At_10percent_PEG_P Parameter: Plant Line Value: WS
  misc_feature: MA Experiment 20000527 PARAMETER Experiment Name: At_10percent_PEG_P Parameter: Timepoint (day) Value: 20
  misc_feature: MA Experiment 20000527 PARAMETER Experiment Name: At_10percent_PEG_P Parameter: Tissue Value: Whole Plant
  misc_feature: MA Experiment 20000527 PARAMETER Experiment Name: At_10percent_PEG_P Parameter: Treatment Value: 10percent PEG vs. No Treatment
  misc_feature: MA Experiment ID: 20001248 Result: Down-regulated in Transcription
  misc_feature: MA Experiment 20001248 PARAMETER Experiment Name: At_Far-red-induction_P Parameter: Age (day) Value: 7
  misc_feature: MA Experiment 20001248 PARAMETER Experiment Name: At_Far-red-induction_P Parameter: Light Value: Far-red vs. White
  misc_feature: MA Experiment 20001248 PARAMETER Experiment Name: At_Far-red-induction_P Parameter: Organism Value: A. thaliana
  misc_feature: MA Experiment 20001248 PARAMETER Experiment Name: At_Far-red-induction_P Parameter: Plant Line Value: Columbia
  misc_feature: MA Experiment 20001248 PARAMETER Experiment Name: At_Far-red-induction_P Parameter: Timepoint (hr) Value: 4
  misc_feature: MA Experiment 20001248 PARAMETER Experiment Name: At_Far-red-induction_P Parameter: Tissue Value: Whole Plant
  misc_feature: MA Experiment ID: 20001906 Result: Up-regulated in Transcription
  misc_feature: MA Experiment 20001906 PARAMETER Experiment Name: At_Drought_Reproduction_P Parameter: Age (day) Value: 35
  misc_feature: MA Experiment 20001906 PARAMETER Experiment Name: At_Drought_Reproduction_P Parameter: Organism Value: A. thaliana
  misc_feature: MA Experiment 20001906 PARAMETER Experiment Name: At_Drought_Reproduction_P Parameter: Plant Line Value: WS
  misc_feature: MA Experiment 20001906 PARAMETER Experiment Name: At_Drought_Reproduction_P Parameter: Timepoint (day) Value: 5
  misc_feature: MA Experiment 20001906 PARAMETER Experiment Name: At_Drought_Reproduction_P Parameter: Tissue Value: Siliques
  misc_feature: MA Experiment 20001906 PARAMETER Experiment Name: At_Drought_Reproduction_P Parameter: Treatment Value: Drought vs. No Drought
tcacttctccactttttttctcggttagtgtcagtttttttgttggctagtctcttcggtcaaaatgcagctctttccggtcatcctaccgacactatgcgtcttcctccaccttctaataagtggctctggctctactccaccgttgactcactccaatcaacaagtggcagccactcgttggcttcccgccaccgcaacctggtacggaagtgccgagggagacggcagcagcggaggagcttgtggttacggatcgttggtggacgtgaagccgtttaaggctagagtcggagcggtgagtccgattctgttcaaaggtggtgaaggctgcggtgcatgctacaaggtcaggtgtctcgacaagaccatttgctctaagagagcagtcaccattattgccaccgaccagtcaccgtcaggaccatctgctaaagcaaaacacactcatttcgacctcagtggcgccgcctttggacatatggctattcccggccataacggtgtcatccgcaaccgtggcctattaaacatcctctaccgccgaacggcatgcaaatacagagggaagaacatagcgtttcatgtgaacgcaggatcaactgattattggttatcgcttctcattgagtatgaagacggtgaaggagacattggctctatgcacattcgtcaagcgggatctaaggagtggatatcgatgaagcacatatggggagcgaactggtgcatcgtcgaaggaccactcaagggaccattctccgtgaagctcacaactttgtccaacaataagacactctccgccaccgacgtcatccccagtaactgggttcccaaagctacttacacctctcgcctcaacttctcccctgttctctaattagcctctcttcaaaaaaattttgttgtgggagagaggaacacagagaagacaatgagtgagccatctccaaagttaggggattaagagcttttcattgtgtgtgtgactactaacattctatgttgtcccttttcatttttttccttctccatagggatgtgtgtatcatctataatgttgtttgtgggacattactatataagaatttacaaaagatgtaataatgtaatatgcaatctcattccttttttagc

SEQ ID NO: 74028 - protein, 271 aa, Arabidopsis thaliana; identical to SEQ ID NO: 39731
  peptide (1)..(271): Ceres Seq. ID no. 4991738
  misc_feature (171)..(252): Pfam Name: Pollen allergen Pfam Description: Pollen allergen
  misc_feature (1)..(271): Homolog of NCBI NO: 15225423 NR Description: beta-expansin pollen allergen protein; protein
  misc_feature (13)..(271): Homolog of NCBI NO: 11357194 NR Description: beta-expansin [imported] - Arabidopsis thaliana
  misc_feature (1)..(271): Homolog of NCBI NO: 18417157 NR Description: beta-expansin pollen allergen protein; protein At4g28250.1, supported by cDNA: 33023., supported by cDNA:
  misc_feature (7)..(271): Homolog of NCBI NO: 21592834 NR Description: putative beta-expansin/allergen protein
  misc_feature (1)..(240): Homolog of NCBI NO: 7484871 NR Description: cim1 protein homolog F26K10.130 - Arabidopsis
  misc_feature (10)..(271): Homolog of NCBI NO: 38346623 NR Description: OSJNBa0074L08.17 [Oryza sativa (japonica
  misc_feature (10)..(204): Homolog of NCBI NO: 21666634 NR Description: beta-expansin [Oryza sativa]
  misc_feature (36)..(268): Homolog of NCBI NO: 1076486 NR Description: cim1 protein - soybean >gi|555616|gb|AAA50175.1|
  misc_feature (24)..(267): Homolog of NCBI NO: 12330698 NR Description: beta-expansin-like protein [Nicotiana tabacum]
  misc_feature (3)..(267): Homolog of NCBI NO: 20138423 NR Description: Putative beta-expansin 2 precursor (At-EXPB2)

SEQ ID NO: 74029 - DNA, 874 bp, Arabidopsis thaliana
  misc_feature (1)..(874): Ceres Seq. ID no. 4991781
  misc_feature: MA Experiment ID: 20000495 Result: Up-regulated in Transcription
  misc_feature: MA Experiment 20000495 PARAMETER Experiment Name: At_Guard_Cells_P Parameter: Harvest Date Value: 8/2/2002
  misc_feature: MA Experiment 20000495 PARAMETER Experiment Name: At_Guard_Cells_P Parameter: Organism Value: A. thaliana
  misc_feature: MA Experiment 20000495 PARAMETER Experiment Name: At_Guard_Cells_P Parameter: Tissue Value: Guard Cells vs. Leaves
ttttggctgcacgatctcagtttttcagatcaatgttttacaatactctagcagagaacaacagcgacgtagtgatcagcgatttggaacctaaggttttcaaggccttgttacacttcatgtataaagattccctcccaggagatgtggaaccattaacggctcattcatttgacctattaaggccgtccgaaatagatgatacactgattgtaaagcttctggcagctgcggaaatgtacaatctgagtaggctcagattattgtgtgaatctcacatctgcaaaggcatatctatcagctccgtgtccaagatcttagctttatccgacaaatataatgcatccgaactaaaaagcgtttccttaaaattcactgcagaaaacctagcagctgttctgcagacaaaagcatatgaagatctgaaggatgactgtccaaacctccagtctgagctactaaaggcggtcgctggttatgacgacacaagtagcagcggaggaggaaagtctcagagtgtttgggctcaactctctaacggtggtgagaccagtagccgaagggtcaggcagcgaaccacttagaagtgcttcttcacatgttgttaacaaactacttttgcttaccactcgtaaacagattaaccggtttatctagtatgtaccgaatgaaagggaagcggagccagaaatcttgtaccacaagagaagagctatgcggctgtgcactagtgattaaccggtgcttaaccggtgcttcacctttcagttccttcacgtctctgtggatttttgttgttgagtctttttttcaaattcttttcccagcttcaaattactagaaacttatgatgatataatagaaagagttaact

SEQ ID NO: 74030 - protein, 193 aa, Arabidopsis thaliana
  peptide (1)..(193): Ceres Seq. ID no. 4991782
  misc_feature (1)..(97): Pfam Name: BTB/POZ domain Pfam Description: BTB/POZ domain
  misc_feature (1)..(193): Homolog of NCBI NO: 11282376 NR Description: hypothetical protein F23N14.80 - Arabidopsis >gi|7362795|emb|CAB83071.1| putative protein [Arabidopsis
  misc_feature (1)..(193): Homolog of NCBI NO: 30691638 NR Description: expressed protein [Arabidopsis thaliana]
  misc_feature (1)..(193): Homolog of NCBI NO: 15242126 NR Description: hypothetical protein (fragment); protein id: supported by cDNA: 113260., supported by cDNA: gi_14596182
  misc_feature (1)..(193): Homolog of NCBI NO: 21536843 NR Description: unknown [Arabidopsis thaliana]
  misc_feature (1)..(170): Homolog of NCBI NO: 14596183 NR Description: Unknown protein [Arabidopsis thaliana]
  misc_feature (1)..(191): Homolog of NCBI NO: 28269444 NR Description: unknown protein [Oryza sativa (japonica
  misc_feature (1)..(192): Homolog of NCBI NO: 34900034 NR Description: OJ1641_C04.24 [Oryza sativa (japonica >gi|22202734|dbj|BAC07391.1| putative zinc finger POZ domain
  misc_feature (1)..(189): Homolog of NCBI NO: 21536509 NR Description: unknown [Arabidopsis thaliana]
  misc_feature (1)..(189): Homolog of NCBI NO: 30678912 NR Description: expressed protein [Arabidopsis thaliana] unknown protein [Arabidopsis thaliana] AT3g03740/F20H23_23 [Arabidopsis thaliana]
  misc_feature (22)..(191): Homolog of NCBI NO: 29369488 NR Description: zinc finger POZ domain protein [Oryza sativa
LAARSQFFRSMFYNTLAENNSDVVISDLEPKVFKALLHFMYKDSLPGDVEPLTAHSFDLLRPSEIDDTLIVKLLAAAEMYNLSRLRLLCESHICKGISISSVSKILALSDKYNASELKSVSLKFTAENLAAVLQTKAYEDLKDDCPNLQSELLKAVAGYDDTSSSGGGKSQSVWAQLSNGGETSSRRVRQRTT

SEQ ID NO: 74031 - protein, 183 aa, Arabidopsis thaliana
  peptide (1)..(183): Ceres Seq. ID no. 4991783
  misc_feature (1)..(87): Pfam Name: BTB/POZ domain Pfam Description: BTB/POZ domain
  misc_feature (1)..(183): Homolog of NCBI NO: 11282376 NR Description: hypothetical protein F23N14.80 - Arabidopsis >gi|7362795|emb|CAB83071.1| putative protein [Arabidopsis
  misc_feature (1)..(183): Homolog of NCBI NO: 30691638 NR Description: expressed protein [Arabidopsis thaliana]
  misc_feature (1)..(183): Homolog of NCBI NO: 15242126 NR Description: hypothetical protein (fragment); protein id: supported by cDNA: 113260., supported by cDNA: gi_14596182
  misc_feature (1)..(183): Homolog of NCBI NO: 21536843 NR Description: unknown [Arabidopsis thaliana]
  misc_feature (1)..(160): Homolog of NCBI NO: 14596183 NR Description: Unknown protein [Arabidopsis thaliana]
  misc_feature (1)..(181): Homolog of NCBI NO: 28269444 NR Description: unknown protein [Oryza sativa (japonica
  misc_feature (1)..(182): Homolog of NCBI NO: 34900034 NR Description: OJ1641_C04.24 [Oryza sativa (japonica >gi|22202734|dbj|BAC07391.1| putative zinc finger POZ domain
  misc_feature (1)..(179): Homolog of NCBI NO: 21536509 NR Description: unknown [Arabidopsis thaliana]
  misc_feature (1)..(179): Homolog of NCBI NO: 30678912 NR Description: expressed protein [Arabidopsis thaliana] unknown protein [Arabidopsis thaliana] AT3g03740/F20H23_23 [Arabidopsis thaliana]
  misc_feature (12)..(181): Homolog of NCBI NO: 29369488 NR Description: zinc finger POZ domain protein [Oryza sativa
MFYNTLAENNSDVVISDLEPKVFKALLHFMYKDSLPGDVEPLTAHSFDLLRPSEIDDTLIVKLLAAAEMYNLSRLRLLCESHICKGISISSVSKILALSDKYNASELKSVSLKFTAENLAAVLQTKAYEDLKDDCPNLQSELLKAVAGYDDTSSSGGGKSQSVWAQLSNGGETSSRRVRQRTT

SEQ ID NO: 74032 - protein, 154 aa, Arabidopsis thaliana
  peptide (1)..(154): Ceres Seq. ID no. 4991784
  misc_feature (1)..(58): Pfam Name: BTB/POZ domain Pfam Description: BTB/POZ domain
  misc_feature (1)..(154): Homolog of NCBI NO: 11282376 NR Description: hypothetical protein F23N14.80 - Arabidopsis >gi|7362795|emb|CAB83071.1| putative protein [Arabidopsis
  misc_feature (1)..(154): Homolog of NCBI NO: 30691638 NR Description: expressed protein [Arabidopsis thaliana]
  misc_feature (1)..(154): Homolog of NCBI NO: 15242126 NR Description: hypothetical protein (fragment); protein id: supported by cDNA: 113260., supported by cDNA: gi_14596182
  misc_feature (1)..(154): Homolog of NCBI NO: 21536843 NR Description: unknown [Arabidopsis thaliana]
  misc_feature (1)..(131): Homolog of NCBI NO: 14596183 NR Description: Unknown protein [Arabidopsis thaliana]
  misc_feature (1)..(152): Homolog of NCBI NO: 28269444 NR Description: unknown protein [Oryza sativa (japonica
  misc_feature (1)..(153): Homolog of NCBI NO: 34900034 NR Description: OJ1641_C04.24 [Oryza sativa (japonica >gi|22202734|dbj|BAC07391.1| putative zinc finger POZ domain
  misc_feature (1)..(150): Homolog of NCBI NO: 21536509 NR Description: unknown [Arabidopsis thaliana]
  misc_feature (1)..(150): Homolog of NCBI NO: 30678912 NR Description: expressed protein [Arabidopsis thaliana] unknown protein [Arabidopsis thaliana] AT3g03740/F20H23_23 [Arabidopsis thaliana]
  misc_feature (1)..(152): Homolog of NCBI NO: 29369488 NR Description: zinc finger POZ domain protein [Oryza sativa
MYKDSLPGDVEPLTAHSFDLLRPSEIDDTLIVKLLAAAEMYNLSRLRLLCESHICKGISISSVSKILALSDKYNASELKSVSLKFTAENLAAVLQTKAYEDLKDDCPNLQSELLKAVAGYDDTSSSGGGKSQSVWAQLSNGGETSSRRVRQRTT

SEQ ID NO: 74033 - DNA, 776 bp, Arabidopsis thaliana
  misc_feature (1)..(776): Ceres Seq. ID no. 4991898
  misc_feature: MA Experiment ID: 108434 Result: Up-regulated in Transcription
  misc_feature: MA Experiment 108434 PARAMETER Experiment Name: At_Root_Tips_cDNA_P Parameter: Tissue Value: Root Tips
  misc_feature: MA Experiment ID: 108462 Result: Down-regulated in Transcription
  misc_feature: MA Experiment 108462 PARAMETER Experiment Name: At_Germinating_Seeds_cDNA_P Parameter: Age (day) Value: 2 vs. 0
  misc_feature: MA Experiment 108462 PARAMETER Experiment Name: At_Germinating_Seeds_cDNA_P Parameter: Tissue Value: Germinating Seeds
  misc_feature: MA Experiment ID: 108463 Result: Down-regulated in Transcription
  misc_feature: MA Experiment 108463 PARAMETER Experiment Name: At_Germinating_Seeds_cDNA_P Parameter: Age (day) Value: 3 vs. 0
  misc_feature: MA Experiment 108463 PARAMETER Experiment Name: At_Germinating_Seeds_cDNA_P Parameter: Tissue Value: Germinating Seeds
  misc_feature: MA Experiment ID: 108464 Result: Down-regulated in Transcription
  misc_feature: MA Experiment 108464 PARAMETER Experiment Name: At_Germinating_Seeds_cDNA_P Parameter: Age (day) Value: 4 vs. 0
  misc_feature: MA Experiment 108464 PARAMETER Experiment Name: At_Germinating_Seeds_cDNA_P Parameter: Tissue Value: Germinating Seeds
  misc_feature: MA Experiment ID: 108577 Result: Up-regulated in Transcription
  misc_feature: MA Experiment 108577 PARAMETER Experiment Name: At_42deg_Heat_cDNA_P Parameter: Temperature (deg C) Value: 42 vs. 22
  misc_feature: MA Experiment 108577 PARAMETER Experiment Name: At_42deg_Heat_cDNA_P Parameter: Timepoint (hr) Value: 6
  misc_feature: MA Experiment 108577 PARAMETER Experiment Name: At_42deg_Heat_cDNA_P Parameter: Tissue Value: Aerial
  misc_feature: MA Experiment ID: 20000111 Result: Up-regulated in Transcription
  misc_feature: MA Experiment 20000111 PARAMETER Experiment Name: At_42deg_Heat_cDNA_P Parameter: Temperature (deg C) Value: 42 vs. 22
  misc_feature: MA Experiment 20000111 PARAMETER Experiment Name: At_42deg_Heat_cDNA_P Parameter: Timepoint (hr) Value: 6
  misc_feature: MA Experiment 20000111 PARAMETER Experiment Name: At_42deg_Heat_cDNA_P Parameter: Tissue Value: Aerial
  misc_feature: MA Experiment ID: 20000113 Result: Up-regulated in Transcription
  misc_feature: MA Experiment 20000113 PARAMETER Experiment Name: At_42deg_Heat_cDNA_P Parameter: Temperature (deg C) Value: 42 vs. 22
  misc_feature: MA Experiment 20000113 PARAMETER Experiment Name: At_42deg_Heat_cDNA_P Parameter: Timepoint (hr) Value: 8
  misc_feature: MA Experiment 20000113 PARAMETER Experiment Name: At_42deg_Heat_cDNA_P Parameter: Tissue Value: Aerial
  misc_feature: MA Experiment ID: 20000224 Result: Down-regulated in Transcription
ctctctcttaggttttttttcccttctcccaatctcatcttctccgaaaacctttcttctctcaaatttctgtgaaaacatgtctgacgacgagcaccactttgaggccagcgaatccggagcttccaagacctatcctcaatcagccggtaacatccgtaaaggtggtcacatcgtcatcaaaaaccgtccctgcaaggttgttgaggtttcgacttccaaaactggcaagcacggtcacgccaaatgtcactttgttgctattgatatcttcactgctaagaagcttgaagatattgttccatcttcccacaattgtgatgttccacatgtgaaccgtgttgattaccagttgattgatatcactgaggatggcttcgtgagccttctcactgacagtggtggcaccaaggatgatctcaagcttcccaccgatgatggtctcaccgcccagttgttgtgttttgttaatgcagatgaggcttggattcgatgagggaaaggatattgtggtgtctgtcatgtcttccatgggagaggagcagatctgtgccgtcaaggaagttggtggtggcaagtaaacaagtatcattcgatatattattaccagtttgacaacggacgtcaatgttataagaaccaaaagatgtttttctttttcctaatttagaccctttgtgtgtgtttcttgttgcaagacaaccatatctattggttttggattgttggaaaagtttgtgttgaaacattcaaagtttcttatgagatgttattct

SEQ ID NO: 74034 - protein, 164 aa, Arabidopsis thaliana
  peptide (1)..(164): Ceres Seq. ID no. 4991899
  misc_feature (52)..(88): Pfam Name: KOW motif Pfam Description: KOW motif
  misc_feature (27)..(152): Homolog of NCBI NO: 9295717 NR Description: T24P13.1 [Arabidopsis thaliana]
  misc_feature (27)..(152): Homolog of NCBI NO: 15222741 NR Description: initiation factor 5A-4, putative; protein id: supported by cDNA: 118823., supported by cDNA: gi_14517505,
  misc_feature (27)..(150): Homolog of NCBI NO: 40805177 NR Description: eukaryotic translation initiation factor-5A
  misc_feature (27)..(152): Homolog of NCBI NO: 15222317 NR Description: Eukaryotic initiation factor 5A , putative; id: At1g69410.1, supported by cDNA: 30884., supported by cDNA: supported by cDNA: gi_16974502 [Arabidopsis thaliana] putative
  misc_feature (27)..(152): Homolog of NCBI NO: 13937159 NR Description: At1g69410/F10D13.8 [Arabidopsis thaliana]
  misc_feature (27)..(152): Homolog of NCBI NO: 20138709 NR Description: Eukaryotic translation initiation factor 5A >gi|12407783|gb|AAG53645.1|AF296081_1 eukaryotic translation
  misc_feature (27)..(152): Homolog of NCBI NO: 20138708 NR Description: Eukaryotic translation initiation factor 5A-1
  misc_feature (27)..(152): Homolog of NCBI NO: 15223002 NR Description: initiation factor 5A-4; protein id: At1g13950.1, by cDNA: gi_12407784, supported by cDNA: gi_17380799 [Arabidopsis
  misc_feature (27)..(152): Homolog of NCBI NO: 3024022 NR Description: Eukaryotic translation initiation factor 5A-5
  misc_feature (27)..(152): Homolog of NCBI NO: 20138664 NR Description: Eukaryotic translation initiation factor 5A-2
SLLGFFSLLPISSSPKTFLLSNFCENMSDDEHHFEASESGASKTYPQSAGNIRKGGHIVIKNRPCKVVEVSTSKTGKHGHAKCHFVAIDIFTAKKLEDIVPSSHNCDVPHVNRVDYQLIDITEDGFVSLLTDSGGTKDDLKLPTDDGLTAQLLCFVNADEAWIR

SEQ ID NO: 74035 - protein, 138 aa, Arabidopsis thaliana
  peptide (1)..(138): Ceres Seq. ID no. 4991900
  misc_feature (26)..(62): Pfam Name: KOW motif Pfam Description: KOW motif
  misc_feature (1)..(126): Homolog of NCBI NO: 9295717 NR Description: T24P13.1 [Arabidopsis thaliana]
  misc_feature (1)..(126): Homolog of NCBI NO: 15222741 NR Description: initiation factor 5A-4, putative; protein id: supported by cDNA: 118823., supported by cDNA: gi_14517505,
  misc_feature (1)..(124): Homolog of NCBI NO: 40805177 NR Description: eukaryotic translation initiation factor-5A
  misc_feature (1)..(126): Homolog of NCBI NO: 15222317 NR Description: Eukaryotic initiation factor 5A , putative; id: At1g69410.1, supported by cDNA: 30884., supported by cDNA: supported by cDNA: gi_16974502 [Arabidopsis thaliana] putative
  misc_feature (1)..(126): Homolog of NCBI NO: 13937159 NR Description: At1g69410/F10D13.8 [Arabidopsis thaliana]
  misc_feature (1)..(126): Homolog of NCBI NO: 20138709 NR Description: Eukaryotic translation initiation factor 5A >gi|12407783|gb|AAG53645.1|AF296081_1 eukaryotic translation
  misc_feature (1)..(126): Homolog of NCBI NO: 20138708 NR Description: Eukaryotic translation initiation factor 5A-1
  misc_feature (1)..(126): Homolog of NCBI NO: 15223002 NR Description: initiation factor 5A-4; protein id: At1g13950.1, by cDNA: gi_12407784, supported by cDNA: gi_17380799 [Arabidopsis
  misc_feature (1)..(126): Homolog of NCBI NO: 3024022 NR Description: Eukaryotic translation initiation factor 5A-5
  misc_feature (1)..(126): Homolog of NCBI NO: 20138664 NR Description: Eukaryotic translation initiation factor 5A-2
MSDDEHHFEASESGASKTYPQSAGNIRKGGHIVIKNRPCKVVEVSTSKTGKHGHAKCHFVAIDIFTAKKLEDIVPSSHNCDVPHVNRVDYQLIDITEDGFVSLLTDSGGTKDDLKLPTDDGLTAQLLCFVNADEAWIR

SEQ ID NO: 74036 - DNA, 1208 bp, Arabidopsis thaliana
  misc_feature (1)..(1208): Ceres Seq. ID no. 4992056
  misc_feature: MA Experiment ID: 108461 Result: Up-regulated in Transcription
  misc_feature: MA Experiment 108461 PARAMETER Experiment Name: At_Germinating_Seeds_cDNA_P Parameter: Age (day) Value: 1 vs. 0
  misc_feature: MA Experiment 108461 PARAMETER Experiment Name: At_Germinating_Seeds_cDNA_P Parameter: Tissue Value: Germinating Seeds
  misc_feature: MA Experiment ID: 108462 Result: Up-regulated in Transcription
  misc_feature: MA Experiment 108462 PARAMETER Experiment Name: At_Germinating_Seeds_cDNA_P Parameter: Age (day) Value: 2 vs. 0
  misc_feature: MA Experiment 108462 PARAMETER Experiment Name: At_Germinating_Seeds_cDNA_P Parameter: Tissue Value: Germinating Seeds
  misc_feature: MA Experiment ID: 108464 Result: Up-regulated in Transcription
  misc_feature: MA Experiment 108464 PARAMETER Experiment Name: At_Germinating_Seeds_cDNA_P Parameter: Age (day) Value: 4 vs. 0
  misc_feature: MA Experiment 108464 PARAMETER Experiment Name: At_Germinating_Seeds_cDNA_P Parameter: Tissue Value: Germinating Seeds
  misc_feature: MA Experiment ID: 108595 Result: Up-regulated in Transcription
  misc_feature: MA Experiment 108595 PARAMETER Experiment Name: At_Ler-pi_Ovule_cDNA_P Parameter: Plant Line Value: null
  misc_feature: MA Experiment ID: 20000113 Result: Up-regulated in Transcription
  misc_feature: MA Experiment 20000113 PARAMETER Experiment Name: At_42deg_Heat_cDNA_P Parameter: Temperature (deg C) Value: 42 vs. 22
  misc_feature: MA Experiment 20000113 PARAMETER Experiment Name: At_42deg_Heat_cDNA_P Parameter: Timepoint (hr) Value: 8
  misc_feature: MA Experiment 20000113 PARAMETER Experiment Name: At_42deg_Heat_cDNA_P Parameter: Tissue Value: Aerial
  misc_feature: MA Experiment ID: 20000185 Result: Up-regulated in Transcription
  misc_feature: MA Experiment 20000185 PARAMETER Experiment Name: At_Roots__P Parameter: Age (day) Value: 7 vs. 21
  misc_feature: MA Experiment 20000185 PARAMETER Experiment Name: At_Roots__P Parameter: Organism Value: A. thaliana
  misc_feature: MA Experiment 20000185 PARAMETER Experiment Name: At_Roots__P Parameter: Tissue Value: Roots vs. Whole Plant
aacacctaactcatttgatagtgatttccaaatctgcaaacaacaaagtatatttgatcatcactatactgatttcacaatccattaatcactgataggtttttggtggaatacatacatgtatgtgtttgatccaacaacagaagctggattgagattagagatggcgtttcctcaacatggttttatgttccaacaacttcatgaagacaacagtcaagatcagctcccttcttgtcctcctcatctcttcaatggaggaggaaactacatgatgaacagatctatgtctttaatgaacgtgcaagaagatcataatcaaaccttggatgaggagaatctatcagacgatggggcacatactatgctgggagagaagaagaagaggctgcaattagagcaagttaaggcattagagaagagctttgagcttggtaacaagctggagccagagaggaagatacaactagctaaagcattagggatgcaaccaagacagatcgcgatttggtttcaaaacaggagagctaggtggaagactagacagctcgagagagattatgattcactcaagaaacagtttgagtctcttaaatccgacaatgcttctctacttgcctataacaagaaactccttgctgaggtaatggctttaaagaacaaagaatgtaatgaaggaaacatagtaaagagagaagcagaagcttcatggagcaacaacggaagcacagagaatagttcagacatcaatctggagatgcctagagagaccattacaacacatgtgaacacgatcaaagacctattcccttcatcgattcgatcatctgcacatgatgatgatcatcatcagaatcatgaaatagttcaagaagaaagcctttgtaacatgtttaatggcattgatgaaacgacgccggctggttactgggcatggtctgacccaaaccacaaccaccaccaccaccagttcaactgattcatgattctaaagctcaaaaaaaagtcatcagcacgcatcaagacaaatgatcataatcatcatcatcatatcatcaggagaagatcaagacacaattcttctctttggaattatgttattgctactcatttcaatttaaattaatggagcattttgttttctttgggtttgtagagcattggtgtatagtgcgaaaatttgttgttgctttaatttaataaaaatc

SEQ ID NO: 74037 - protein, 286 aa, Arabidopsis thaliana; identical to SEQ ID NO: 26724
  peptide (1)..(286): Ceres Seq. ID no. 4992057
  misc_feature (87)..(141): Pfam Name: Homeobox domain Pfam Description: Homeobox domain
  misc_feature (1)..(286): Homolog of NCBI NO: 15232066 NR Description: HD-Zip transcription factor; protein id:
  misc_feature (16)..(286): Homolog of NCBI NO: 21593221 NR Description: putative homeobox-leucine zipper protein, HAT7
  misc_feature (41)..(286): Homolog of NCBI NO: 30685207 NR Description: Homeobox-leucine zipper protein HAT7 (HD-ZIP
  misc_feature (51)..(286): Homolog of NCBI NO: 25453564 NR Description: homeobox protein HAT7 [imported] - Arabidopsis
  misc_feature (50)..(286): Homolog of NCBI NO: 21431775 NR Description: Homeobox-leucine zipper protein HAT7 (HD-ZIP
  misc_feature (20)..(273): Homolog of NCBI NO: 7446243 NR Description: homeotic protein - carrot
  misc_feature (51)..(185): Homolog of NCBI NO: 99712 NR Description: homeotic protein Athb-3 - Arabidopsis thaliana
  misc_feature (16)..(218): Homolog of NCBI NO: 15222452 NR Description: HD-Zip transcription factor, Athb-13; protein id: supported by cDNA: 2913., supported by cDNA: gi_15982928, by cDNA: gi_6644294 [Arabidopsis thaliana]
  misc_feature (16)..(218): Homolog of NCBI NO: 21555784 NR Description: homeobox gene 13 protein [Arabidopsis thaliana]
  misc_feature (16)..(233): Homolog of NCBI NO: 7446247 NR Description: homeotic protein - common sunflower

SEQ ID NO: 74038 - protein, 271 aa, Arabidopsis thaliana; identical to SEQ ID NO: 26725
  peptide (1)..(271): Ceres Seq. ID no. 4992058
  misc_feature (72)..(126): Pfam Name: Homeobox domain Pfam Description: Homeobox domain
  misc_feature (1)..(271): Homolog of NCBI NO: 15232066 NR Description: HD-Zip transcription factor; protein id:
  misc_feature (1)..(271): Homolog of NCBI NO: 21593221 NR Description: putative homeobox-leucine zipper protein, HAT7
  misc_feature (26)..(271): Homolog of NCBI NO: 30685207 NR Description: Homeobox-leucine zipper protein HAT7 (HD-ZIP
  misc_feature (36)..(271): Homolog of NCBI NO: 25453564 NR Description: homeobox protein HAT7 [imported] - Arabidopsis
  misc_feature (35)..(271): Homolog of NCBI NO: 21431775 NR Description: Homeobox-leucine zipper protein HAT7 (HD-ZIP
  misc_feature (5)..(258): Homolog of NCBI NO: 7446243 NR Description: homeotic protein - carrot
  misc_feature (36)..(170): Homolog of NCBI NO: 99712 NR Description: homeotic protein Athb-3 - Arabidopsis thaliana
  misc_feature (1)..(203): Homolog of NCBI NO: 15222452 NR Description: HD-Zip transcription factor, Athb-13; protein id: supported by cDNA: 2913., supported by cDNA: gi_15982928, by cDNA: gi_6644294 [Arabidopsis thaliana]
  misc_feature (1)..(203): Homolog of NCBI NO: 21555784 NR Description: homeobox gene 13 protein [Arabidopsis thaliana]
  misc_feature (1)..(218): Homolog of NCBI NO: 7446247 NR Description: homeotic protein - common sunflower

SEQ ID NO: 74039 - protein, 263 aa, Arabidopsis thaliana; identical to SEQ ID NO: 26726
  peptide (1)..(263): Ceres Seq. ID no. 4992059
  misc_feature (64)..(118): Pfam Name: Homeobox domain Pfam Description: Homeobox domain
  misc_feature (1)..(263): Homolog of NCBI NO: 15232066 NR Description: HD-Zip transcription factor; protein id:
  misc_feature (1)..(263): Homolog of NCBI NO: 21593221 NR Description: putative homeobox-leucine zipper protein, HAT7
  misc_feature (18)..(263): Homolog of NCBI NO: 30685207 NR Description: Homeobox-leucine zipper protein HAT7 (HD-ZIP
  misc_feature (28)..(263): Homolog of NCBI NO: 25453564 NR Description: homeobox protein HAT7 [imported] - Arabidopsis
  misc_feature (27)..(263): Homolog of NCBI NO: 21431775 NR Description: Homeobox-leucine zipper protein HAT7 (HD-ZIP
  misc_feature (1)..(250): Homolog of NCBI NO: 7446243 NR Description: homeotic protein - carrot
  misc_feature (28)..(162): Homolog of NCBI NO: 99712 NR Description: homeotic protein Athb-3 - Arabidopsis thaliana
  misc_feature (1)..(195): Homolog of NCBI NO: 15222452 NR Description: HD-Zip transcription factor, Athb-13; protein id: supported by cDNA: 2913., supported by cDNA: gi_15982928, by cDNA: gi_6644294 [Arabidopsis thaliana]
  misc_feature (1)..(195): Homolog of NCBI NO: 21555784 NR Description: homeobox gene 13 protein [Arabidopsis thaliana]
  misc_feature (1)..(210): Homolog of NCBI NO: 7446247 NR Description: homeotic protein - common sunflower

SEQ ID NO: 74040 - DNA, 838 bp, Arabidopsis thaliana
  misc_feature (1)..(838): Ceres Seq. ID no. 4992184
  misc_feature: MA Experiment ID: 108573 Result: Up-regulated in Transcription
  misc_feature: MA Experiment 108573 PARAMETER Experiment Name: At_Drought_cDNA_P Parameter: Timepoint (hr) Value: 6
  misc_feature: MA Experiment 108573 PARAMETER Experiment Name: At_Drought_cDNA_P Parameter: Tissue Value: Aerial
  misc_feature: MA Experiment 108573 PARAMETER Experiment Name: At_Drought_cDNA_P Parameter: Treatment Value: Drought vs. No Drought
  misc_feature: MA Experiment ID: 108577 Result: Down-regulated in Transcription
  misc_feature: MA Experiment 108577 PARAMETER Experiment Name: At_42deg_Heat_cDNA_P Parameter: Temperature (deg C) Value: 42 vs. 22
  misc_feature: MA Experiment 108577 PARAMETER Experiment Name: At_42deg_Heat_cDNA_P Parameter: Timepoint (hr) Value: 6
  misc_feature: MA Experiment 108577 PARAMETER Experiment Name: At_42deg_Heat_cDNA_P Parameter: Tissue Value: Aerial
  misc_feature: MA Experiment ID: 20000179 Result: Up-regulated in Transcription
  misc_feature: MA Experiment 20000179 PARAMETER Experiment Name: At_Germinating_Seeds_P Parameter: Age (hr) Value: 6 vs. 0
  misc_feature: MA Experiment 20000179 PARAMETER Experiment Name: At_Germinating_Seeds_P Parameter: Tissue Value: Germinating Seeds
  misc_feature: MA Experiment ID: 20000180 Result: Up-regulated in Transcription
  misc_feature: MA Experiment 20000180 PARAMETER Experiment Name: At_Germinating_Seeds_P Parameter: Age (hr) Value: 24 vs. 0
  misc_feature: MA Experiment 20000180 PARAMETER Experiment Name: At_Germinating_Seeds_P Parameter: Tissue Value: Germinating Seeds
  misc_feature: MA Experiment ID: 20000224 Result: Down-regulated in Transcription
aactactctctctctctctctttcttctgccatcgccaaaaacttgtcttttgcttcttatttgctctgatcttttgattcaacggctcccggagacgacggaagcaatgcagttcttcggtggatctgagattagtccgtcgccgccagttccgacggcgagtggaaacaacgcgcacatgatgtacgttttcaatcgtaacggtgtatgtcttctctacaaagaatggaatcggcctcttcatacacttaatcctcagcaagatcacaagctcatgtttggtcttctcttctctctcaaatctctcaccgctaagatggatccagtcaatgcggataaaggaaatcttggggttccacagttgccaggacaaggttgctctttccatagtttccgtacgaatacttacaagctaagtttcatggagactccctctggtattaagattatcttagtaactcatccaaagaccggagatttacgcgaatccttgaagtacatctacagtttatacgttgaatatgtcgtaaaaaatcctatatacagcccaggatctccaatcaagtcggagttgttcaacactgcacttgaccagtacgtaaggagcatctcttagtgtgtgcattacagatttgtccattggaacttctctccttcaacagaactatcgtctgaacaatctctgaaaagaagagagaattgtagtagagagatttatcttgagttcgactgttttctctgcaaatctatgtttcgtttaccctttttattaactccactgtattggcttgctatcaatgatgttcatggtttactcaaatcttgaaatgcgacatg

SEQ ID NO: 74041 - protein, 204 aa, Arabidopsis thaliana; identical to SEQ ID NO: 30868
  peptide (1)..(204): Ceres Seq. ID no. 4992185
  misc_feature (58)..(203): Pfam Name: Sybindin-like family Pfam Description: Sybindin-like family
  misc_feature (36)..(204): Homolog of NCBI NO: 15223752 NR Description: unknown protein; protein id: At1g51160.1
  misc_feature (43)..(203): Homolog of NCBI NO: 34914656 NR Description: P0504D03.19 [Oryza sativa (japonica
  misc_feature (59)..(203): Homolog of NCBI NO: 20881775 NR Description: similar to MUM2 protein [Homo sapiens] [Mus >gi|25057275|ref|XP_203455.1| similar to MUM2 protein [Homo [Mus musculus] >gi|27672872|ref|XP_213342.1| similar to MUM2
  misc_feature (59)..(203): Homolog of NCBI NO: 10864021 NR Description: MUM2 protein [Homo sapiens]
  misc_feature (61)..(201): Homolog of NCBI NO: 24651330 NR Description: CG1359-PA [Drosophila melanogaster]
  misc_feature (84)..(203): Homolog of NCBI NO: 28828451 NR Description: similar to Homo sapiens (Human). MUM2 protein
  misc_feature (59)..(204): Homolog of NCBI NO: 19114985 NR Description: hypothetical protein [Schizosaccharomyces pombe] TRAPP golgi traffic protein; similar to S. cerevisiae BET5
  misc_feature (48)..(169): Homolog of NCBI NO: 31200485 NR Description: ENSANGP00000018747 [Anopheles gambiae]
  misc_feature (88)..(203): Homolog of NCBI NO: 40740926 NR Description: hypothetical protein AN8828.2 [Aspergillus
  misc_feature (128)..(204): Homolog of NCBI NO: 19115000 NR Description: conserved hypothetical protein pombe] >gi|6066732|emb|CAB58227.1| SPAC3G9.16c

SEQ ID NO: 74042 - protein, 169 aa, Arabidopsis thaliana; identical to SEQ ID NO: 24678
  peptide (1)..(169): Ceres Seq. ID no. 4992186
  misc_feature (23)..(168): Pfam Name: Sybindin-like family Pfam Description: Sybindin-like family
  misc_feature (1)..(169): Homolog of NCBI NO: 15223752 NR Description: unknown protein; protein id: At1g51160.1
  misc_feature (8)..(168): Homolog of NCBI NO: 34914656 NR Description: P0504D03.19 [Oryza sativa (japonica
  misc_feature (24)..(168): Homolog of NCBI NO: 20881775 NR Description: similar to MUM2 protein [Homo sapiens] [Mus >gi|25057275|ref|XP_203455.1| similar to MUM2 protein [Homo [Mus musculus] >gi|27672872|ref|XP_213342.1| similar to MUM2
  misc_feature (24)..(168): Homolog of NCBI NO: 10864021 NR Description: MUM2 protein [Homo sapiens]
  misc_feature (26)..(166): Homolog of NCBI NO: 24651330 NR Description: CG1359-PA [Drosophila melanogaster]
  misc_feature (49)..(168): Homolog of NCBI NO: 28828451 NR Description: similar to Homo sapiens (Human). MUM2 protein
  misc_feature (24)..(169): Homolog of NCBI NO: 19114985 NR Description: hypothetical protein [Schizosaccharomyces pombe] TRAPP golgi traffic protein; similar to S. cerevisiae BET5
  misc_feature (13)..(134): Homolog of NCBI NO: 31200485 NR Description: ENSANGP00000018747 [Anopheles gambiae]
  misc_feature (53)..(168): Homolog of NCBI NO: 40740926 NR Description: hypothetical protein AN8828.2 [Aspergillus
  misc_feature (93)..(169): Homolog of NCBI NO: 19115000 NR Description: conserved hypothetical protein pombe] >gi|6066732|emb|CAB58227.1| SPAC3G9.16c

SEQ ID NO: 74043 - protein, 145 aa, Arabidopsis thaliana; identical to SEQ ID NO: 24679
  peptide (1)..(145): Ceres Seq. ID no. 4992187
  misc_feature (1)..(144): Pfam Name: Sybindin-like family Pfam Description: Sybindin-like family
  misc_feature (1)..(145): Homolog of NCBI NO: 15223752 NR Description: unknown protein; protein id: At1g51160.1
  misc_feature (1)..(144): Homolog of NCBI NO: 34914656 NR Description: P0504D03.19 [Oryza sativa (japonica
  misc_feature (1)..(144): Homolog of NCBI NO: 20881775 NR Description: similar to MUM2 protein [Homo sapiens] [Mus >gi|25057275|ref|XP_203455.1| similar to MUM2 protein [Homo [Mus musculus] >gi|27672872|ref|XP_213342.1| similar to MUM2
  misc_feature (1)..(144): Homolog of NCBI NO: 10864021 NR Description: MUM2 protein [Homo sapiens]
  misc_feature (2)..(142): Homolog of NCBI NO: 24651330 NR Description: CG1359-PA [Drosophila melanogaster]
  misc_feature (25)..(144): Homolog of NCBI NO: 28828451 NR Description: similar to Homo sapiens (Human). MUM2 protein
  misc_feature (1)..(145): Homolog of NCBI NO: 19114985 NR Description: hypothetical protein [Schizosaccharomyces pombe] TRAPP golgi traffic protein; similar to S. cerevisiae BET5
  misc_feature (1)..(110): Homolog of NCBI NO: 31200485 NR Description: ENSANGP00000018747 [Anopheles gambiae]
  misc_feature (29)..(144): Homolog of NCBI NO: 40740926 NR Description: hypothetical protein AN8828.2 [Aspergillus
  misc_feature (69)..(145): Homolog of NCBI NO: 19115000 NR Description: conserved hypothetical protein pombe] >gi|6066732|emb|CAB58227.1| SPAC3G9.16c

SEQ ID NO: 74044 - DNA, 445 bp, Arabidopsis thaliana
  misc_feature (1)..(445): Ceres Seq. ID no. 4992207
  misc_feature: MA Experiment ID: 20000180 Result: Up-regulated in Transcription
  misc_feature: MA Experiment 20000180 PARAMETER Experiment Name: At_Germinating_Seeds_P Parameter: Age (hr) Value: 24 vs. 0
  misc_feature: MA Experiment 20000180 PARAMETER Experiment Name: At_Germinating_Seeds_P Parameter: Tissue Value: Germinating Seeds
  misc_feature: MA Experiment ID: 20000185 Result: Down-regulated in Transcription
  misc_feature: MA Experiment 20000185 PARAMETER Experiment Name: At_Roots__P Parameter: Age (day) Value: 7 vs. 21
  misc_feature: MA Experiment 20000185 PARAMETER Experiment Name: At_Roots__P Parameter: Organism Value: A. thaliana
  misc_feature: MA Experiment 20000185 PARAMETER Experiment Name: At_Roots__P Parameter: Tissue Value: Roots vs. Whole Plant
  misc_feature: MA Experiment ID: 20000264 Result: Down-regulated in Transcription
  misc_feature: MA Experiment 20000264 PARAMETER Experiment Name: At_Open_Flower_P Parameter: Age (day) Value: 21
  misc_feature: MA Experiment 20000264 PARAMETER Experiment Name: At_Open_Flower_P Parameter: Plant Line Value: WS
  misc_feature: MA Experiment 20000264 PARAMETER Experiment Name: At_Open_Flower_P Parameter: Tissue Value: Open Flower vs. Whole Plant
  misc_feature: MA Experiment ID: 20000286 Result: Down-regulated in Transcription
  misc_feature: MA Experiment 20000286 PARAMETER Experiment Name: At_Open_Flower_P Parameter: Age (day) Value: 21
  misc_feature: MA Experiment 20000286 PARAMETER Experiment Name: At_Open_Flower_P Parameter: Plant Line Value: WS
  misc_feature: MA Experiment 20000286 PARAMETER Experiment Name: At_Open_Flower_P Parameter: Tissue Value: Half Open vs. Whole Plant
  misc_feature: MA Experiment ID: 20000438 Result: Up-regulated in Transcription
  misc_feature: MA Experiment 20000438 PARAMETER Experiment Name: At_Shoots__P Parameter: Age (day) Value: 14
  misc_feature: MA Experiment 20000438 PARAMETER Experiment Name: At_Shoots__P Parameter: Tissue Value: Shoots vs. Whole Plant
  misc_feature: MA Experiment ID: 20000439 Result: Down-regulated in Transcription
  misc_feature: MA Experiment 20000439 PARAMETER Experiment Name: At_Roots__P Parameter: Age (day) Value: 14 vs. 21
  misc_feature: MA Experiment 20000439 PARAMETER Experiment Name: At_Roots__P Parameter: Organism Value: A. thaliana
  misc_feature: MA Experiment 20000439 PARAMETER Experiment Name: At_Roots__P Parameter: Tissue Value: Roots vs. Whole Plant
  misc_feature: MA Experiment ID: 20000794 Result: Down-regulated in Transcription
  misc_feature: MA Experiment 20000794 PARAMETER Experiment Name: At_Petals_P Parameter: Age (day) Value: 23-25 days
  misc_feature: MA Experiment 20000794 PARAMETER Experiment Name: At_Petals_P Parameter: Plant Line Value: WS
  misc_feature: MA Experiment 20000794 PARAMETER Experiment Name: At_Petals_P Parameter: Tissue Value: Petals vs. Whole plant
  misc_feature: MA Experiment ID: 20001451 Result: Down-regulated in Transcription
  misc_feature: MA Experiment 20001451 PARAMETER Experiment Name: At_Far-red-induction_P Parameter: Age (day) Value: 7
  misc_feature: MA Experiment 20001451 PARAMETER Experiment Name: At_Far-red-induction_P Parameter: Light Value: Far-red vs. White
  misc_feature: MA Experiment 20001451 PARAMETER Experiment Name: At_Far-red-induction_P Parameter: Organism Value: A. thaliana
  misc_feature: MA Experiment 20001451 PARAMETER Experiment Name: At_Far-red-induction_P Parameter: Plant Line Value: Columbia
  misc_feature: MA Experiment 20001451 PARAMETER Experiment Name: At_Far-red-induction_P Parameter: Timepoint (hr) Value: 24
  misc_feature: MA Experiment 20001451 PARAMETER Experiment Name: At_Far-red-induction_P Parameter: Tissue Value: Whole Plant
  misc_feature: MA Experiment ID: 20001557 Result: Down-regulated in Transcription
  misc_feature: MA Experiment 20001557 PARAMETER Experiment Name: At_Drought_Soil_Dry_P Parameter: Age (day) Value: 27
  misc_feature: MA Experiment 20001557 PARAMETER Experiment Name: At_Drought_Soil_Dry_P Parameter: Organism Value: A. thaliana
  misc_feature: MA Experiment 20001557 PARAMETER Experiment Name: At_Drought_Soil_Dry_P Parameter: Plant Line Value: WS
  misc_feature: MA Experiment 20001557 PARAMETER Experiment Name: At_Drought_Soil_Dry_P Parameter: Post Timepoint (hr) Value: 3
  misc_feature: MA Experiment 20001557 PARAMETER Experiment Name: At_Drought_Soil_Dry_P Parameter: Post-Treatment Value: Re-Water vs. No Drought
  misc_feature: MA Experiment 20001557 PARAMETER Experiment Name: At_Drought_Soil_Dry_P Parameter: Timepoint (day) Value: 13
  misc_feature: MA Experiment 20001557 PARAMETER Experiment Name: At_Drought_Soil_Dry_P Parameter: Treatment Value: Drought vs. No Drought
  misc_feature: MA Experiment ID: 20001757 Result: Up-regulated in Transcription
  misc_feature: MA Experiment 20001757 PARAMETER Experiment Name: At_50mM_NH4NO3_L-to-H_P Parameter: Timepoint (hr) Value: 6
  misc_feature: MA Experiment 20001757 PARAMETER Experiment Name: At_50mM_NH4NO3_L-to-H_P Parameter: Tissue Value: Leaf
  misc_feature: MA Experiment 20001757 PARAMETER Experiment Name: At_50mM_NH4NO3_L-to-H_P Parameter: Treatment Value: 50mM NH4NO3 vs 100mM Mannitol
  misc_feature: MA Experiment ID: 20001905 Result: Down-regulated in Transcription
  misc_feature: MA Experiment 20001905 PARAMETER Experiment Name: At_Drought_Reproduction_P Parameter: Age (day) Value: 40
  misc_feature: MA Experiment 20001905 PARAMETER Experiment Name: At_Drought_Reproduction_P Parameter: Organism Value: A. thaliana
  misc_feature: MA Experiment 20001905 PARAMETER Experiment Name: At_Drought_Reproduction_P Parameter: Plant Line Value: WS
  misc_feature: MA Experiment 20001905 PARAMETER Experiment Name: At_Drought_Reproduction_P Parameter: Timepoint (day) Value: 10
  misc_feature: MA Experiment 20001905 PARAMETER Experiment Name: At_Drought_Reproduction_P Parameter: Tissue Value: Rosettes
  misc_feature: MA Experiment 20001905 PARAMETER Experiment Name: At_Drought_Reproduction_P Parameter: Treatment Value: Drought vs. No Drought
  misc_feature: MA Experiment ID: 20001906 Result: Down-regulated in Transcription
  misc_feature: MA Experiment 20001906 PARAMETER Experiment Name: At_Drought_Reproduction_P Parameter: Age (day) Value: 35
  misc_feature: MA Experiment 20001906 PARAMETER Experiment Name: At_Drought_Reproduction_P Parameter: Organism Value: A. thaliana
  misc_feature: MA Experiment 20001906 PARAMETER Experiment Name: At_Drought_Reproduction_P Parameter: Plant Line Value: WS
  misc_feature: MA Experiment 20001906 PARAMETER Experiment Name: At_Drought_Reproduction_P Parameter: Timepoint (day) Value: 5
  misc_feature: MA Experiment 20001906 PARAMETER Experiment Name: At_Drought_Reproduction_P Parameter: Tissue Value: Siliques
  misc_feature: MA Experiment 20001906 PARAMETER Experiment Name: At_Drought_Reproduction_P Parameter: Treatment Value: Drought vs. No Drought
  misc_feature: MA Experiment ID: 20001908 Result: Down-regulated in Transcription
  misc_feature: MA Experiment 20001908 PARAMETER Experiment Name: At_Drought_Reproduction_P Parameter: Age (day) Value: 40
  misc_feature: MA Experiment 20001908 PARAMETER Experiment Name: At_Drought_Reproduction_P Parameter: Organism Value: A. thaliana
  misc_feature: MA Experiment 20001908 PARAMETER Experiment Name: At_Drought_Reproduction_P Parameter: Plant Line Value: WS
  misc_feature: MA Experiment 20001908 PARAMETER Experiment Name: At_Drought_Reproduction_P Parameter: Timepoint (day) Value: 10
  misc_feature: MA Experiment 20001908 PARAMETER Experiment Name: At_Drought_Reproduction_P Parameter: Tissue Value: Siliques
  misc_feature: MA Experiment 20001908 PARAMETER Experiment Name: At_Drought_Reproduction_P Parameter: Treatment Value: Drought vs. No Drought
ttcaacttccagagagagaacgtagcaaaacagggcttaccggagcagaacggaaaaacccatttcgaagctggagatgatcgtgctaaggagtacgtcagtctcttgaaatcgaacgatccaattggattcaacattgttgatgttcttgcttggggttctattggacacatcgttgcttactacatcttggctacttccagcaatggatacgacccaagcttctttggatgattcgtttcaatgtcaatctctcgtatatgtatatgtatatgtttgacttgtgttgcaagctatctaatctgttctctatctctgtttcttcttctgttgttgttgttgttgtctaagacttgtccctctttttgcaaatgttttatttctccatttacaaagattggtttgcagagttttataagaagaacataatagtatatacactatg

SEQ ID NO: 74045 - protein, 77 aa, Arabidopsis thaliana
  peptide (1)..(77): Ceres Seq. ID no. 4992208
  misc_feature (1)..(73): Pfam Name: Photosystem I psaG / psaK Pfam Description: Photosystem I psaG / psaK
  misc_feature (1)..(77): Homolog of NCBI NO: 15222757 NR Description: photosystem I subunit V precursor, putative; id: At1g55670.1, supported by cDNA: gi_11908045, supported by gi_12642863, supported by cDNA: gi_13265559, supported by cDNA:
  misc_feature (1)..(77): Homolog of NCBI NO: 131192 NR Description: Photosystem I reaction center subunit V,
  misc_feature (1)..(76): Homolog of NCBI NO: 131194 NR Description: Photosystem I reaction center subunit V,
  misc_feature (3)..(72): Homolog of NCBI NO: 17369611 NR Description: Photosystem I reaction center subunit V,
  misc_feature (14)..(68): Homolog of NCBI NO: 131191 NR Description: Photosystem I reaction center subunit V,
FNFQRENVAKQGLPEQNGKTHFEAGDDRAKEYVSLLKSNDPIGFNIVDVLAWGSIGHIVAYYILATSSNGYDPSFFG

SEQ ID NO: 74046 - protein, 61 aa, Arabidopsis thaliana
  peptide (1)..(61): Ceres Seq. ID no. 4992209
MSISRICICICLTCVASYLICSLSLFLLLLLLLLSKTCPSFCKCFISPFTKIGLQSFIRRT

SEQ ID NO: 74047 - protein, 45 aa, Arabidopsis thaliana; identical to SEQ ID NO: 323
  peptide (1)..(45): Ceres Seq. ID no. 4992210

SEQ ID NO: 74048 - DNA, 1114 bp, Arabidopsis thaliana
  misc_feature (1)..(1114): Ceres Seq. ID no. 4992379
  misc_feature: MA Experiment ID: 108434 Result: Up-regulated in Transcription
  misc_feature: MA Experiment 108434 PARAMETER Experiment Name: At_Root_Tips_cDNA_P Parameter: Tissue Value: Root Tips
  misc_feature: MA Experiment ID: 108461 Result: Up-regulated in Transcription
  misc_feature: MA Experiment 108461 PARAMETER Experiment Name: At_Germinating_Seeds_cDNA_P Parameter: Age (day) Value: 1 vs. 0
  misc_feature: MA Experiment 108461 PARAMETER Experiment Name: At_Germinating_Seeds_cDNA_P Parameter: Tissue Value: Germinating Seeds
  misc_feature: MA Experiment ID: 108595 Result: Up-regulated in Transcription
  misc_feature: MA Experiment 108595 PARAMETER Experiment Name: At_Ler-pi_Ovule_cDNA_P Parameter: Plant Line Value: null
  misc_feature: MA Experiment ID: 20000179 Result: Up-regulated in Transcription
  misc_feature: MA Experiment 20000179 PARAMETER Experiment Name: At_Germinating_Seeds_P Parameter: Age (hr) Value: 6 vs. 0
  misc_feature: MA Experiment 20000179 PARAMETER Experiment Name: At_Germinating_Seeds_P Parameter: Tissue Value: Germinating Seeds
  misc_feature: MA Experiment ID: 20000227 Result: Up-regulated in Transcription
  misc_feature: MA Experiment 20000227 PARAMETER Experiment Name: At_Root-Tips-vs-Tops_P Parameter: Tissue Value: Root Tips vs. Root Tops
  misc_feature: MA Experiment ID: 20000234 Result: Up-regulated in Transcription
  misc_feature: MA Experiment 20000234 PARAMETER Experiment Name: At_Siliques_P Parameter: Age (day) Value: 21
  misc_feature: MA Experiment 20000234 PARAMETER Experiment Name: At_Siliques_P Parameter: Organism Value: A. thaliana
  misc_feature: MA Experiment 20000234 PARAMETER Experiment Name: At_Siliques_P Parameter: Plant Line Value: WS
  misc_feature: MA Experiment 20000234 PARAMETER Experiment Name: At_Siliques_P Parameter: Tissue Value: Less Than 5mm Siliques vs. Whole Plant
  misc_feature: MA Experiment ID: 20000235 Result: Up-regulated in Transcription
  misc_feature: MA Experiment 20000235 PARAMETER Experiment Name: At_Siliques_P Parameter: Age (day) Value: 21
  misc_feature: MA Experiment 20000235 PARAMETER Experiment Name: At_Siliques_P Parameter: Organism Value: A. thaliana
  misc_feature: MA Experiment 20000235 PARAMETER Experiment Name: At_Siliques_P Parameter: Plant Line Value: WS
  misc_feature: MA Experiment 20000235 PARAMETER Experiment Name: At_Siliques_P Parameter: Tissue Value: 5-10mm Siliques vs. Whole Plant
  misc_feature: MA Experiment ID: 20000264 Result: Up-regulated in Transcription
  misc_feature: MA Experiment 20000264 PARAMETER Experiment Name: At_Open_Flower_P Parameter: Age (day) Value: 21
  misc_feature: MA Experiment 20000264 PARAMETER Experiment Name: At_Open_Flower_P Parameter: Plant Line Value: WS
  misc_feature: MA Experiment 20000264 PARAMETER Experiment Name: At_Open_Flower_P Parameter: Tissue Value: Open Flower vs. Whole Plant
  misc_feature: MA Experiment ID: 20000286 Result: Up-regulated in Transcription
  misc_feature: MA Experiment 20000286 PARAMETER Experiment Name: At_Open_Flower_P Parameter: Age (day) Value: 21
  misc_feature: MA Experiment 20000286 PARAMETER Experiment Name: At_Open_Flower_P Parameter: Plant Line Value: WS
  misc_feature: MA Experiment 20000286 PARAMETER Experiment Name: At_Open_Flower_P Parameter: Tissue Value: Half Open vs. Whole Plant
  misc_feature: MA Experiment ID: 20001771 Result: Up-regulated in Transcription
  misc_feature: MA Experiment 20001771 PARAMETER Experiment Name: At_Far-red-enriched-adult_P Parameter: Age (day) Value: 28
  misc_feature: MA Experiment 20001771 PARAMETER Experiment Name: At_Far-red-enriched-adult_P Parameter: Light Value: Far-red enriched vs. White
  misc_feature: MA Experiment 20001771 PARAMETER Experiment Name: At_Far-red-enriched-adult_P Parameter: Organism Value: A. thaliana
  misc_feature: MA Experiment 20001771 PARAMETER Experiment Name: At_Far-red-enriched-adult_P Parameter: Plant Line Value: Columbia
  misc_feature: MA Experiment 20001771 PARAMETER Experiment Name: At_Far-red-enriched-adult_P Parameter: Timepoint (hr) Value: 16
  misc_feature: MA Experiment 20001771 PARAMETER Experiment Name: At_Far-red-enriched-adult_P Parameter: Tissue Value: Aerial
  misc_feature: Pfam Name: S1-P1_nuclease Pfam Description: S1/P1 Nuclease
atactccatggagtagaaaaaggaaaaattcaaggctctttggcttcttctttcttctctgcacttgaatcagaagcttttctcagaatgggttggtcgttgagaatgtggattgtgagtatactcgtgcttacacagctcgttaatggagctctctgttggggagacgctggtcattacgctgtctgcaaaatagctcagagttattttgaggaagatactgtagttgctgtgaagaaacttctgcctgaatctgcaaatggtgagctagcagctgtttgctcatggcctgatgaaatcaaaaagctcccgcaatggcgatggactagtgctttgcattttgctgatacgcctgattacaaatgcaactatgagtactctcgggactgtcctaaagactggtgtgtgacaggggcaatcttcaattacactaaccaactaatgtctacttctgaaaactcacagagtatagtccactataacttaacagaggctctcatgttcttatcacattatatgggagatatccatcagcctttacatgaaggttttattggagatctaggtggtaacaagataaaagttcactggtacaatcaggaaactaatttgcaccgtgtgtgggatgatatgataattgagtctgctctagaaacatactacaattcaagccttccacgcatgattcatgaacttcaagccaaactcaagaacggctggtcaaacgatgtaccttcatgggagtcatgtcaacttaaccaaacggcctgcccaaatccgtatgcttctgaaagcattgatcttgcctgcaagtatgcttacaggaacgccaccgcagggactactttaggagattactatttcgtctctcggttaccggtggtagagaagagacttgcacaaggcggaattcgcttggcagggactcttaaccgaatattttctgcaaaacggaagcttgctagagcatgaaaaaagatccaggagaatcacttgaacatccatgaacactcttatgtattaataatgtgtaatggtagtagttaaggttatggtttggtattgttcctgcgttttaactataataagtatgaaacgaaaactgtacgtctac

SEQ ID NO: 74049 - protein, 323 aa, Arabidopsis thaliana; identical to SEQ ID NO: 36521
  peptide (1)..(323): Ceres Seq. ID no. 4992380
  misc_feature: Pfam Name: S1-P1_nuclease Pfam Description: S1/P1 Nuclease
  misc_feature (30)..(323): Homolog of NCBI NO: 18415727 NR Description: putative bifunctional nuclease; protein id: supported by cDNA: 17760. [Arabidopsis thaliana]
  misc_feature (34)..(321): Homolog of NCBI NO: 18415729 NR Description: endonuclease, putative; protein id: At4g21600.1,
  misc_feature (34)..(321): Homolog of NCBI NO: 21593575 NR Description: endonuclease, putative [Arabidopsis thaliana]
  misc_feature (30)..(321): Homolog of NCBI NO: 22328857 NR Description: expressed protein; protein id: At4g21585.1
  misc_feature (160)..(323): Homolog of NCBI NO: 7485717 NR Description: hypothetical protein F18E5.210 - Arabidopsis >gi|3080403|emb|CAA18723.1| hypothetical protein [Arabidopsis >gi|4455267|emb|CAB36803.1| putative bifunctional nuclease
  misc_feature (65)..(129): Homolog of NCBI NO: 7485717 NR Description: hypothetical protein F18E5.210 - Arabidopsis >gi|3080403|emb|CAA18723.1| hypothetical protein [Arabidopsis >gi|4455267|emb|CAB36803.1| putative bifunctional nuclease
  misc_feature (37)..(314): Homolog of NCBI NO: 4099835 NR Description: bifunctional nuclease [Zinnia elegans]
  misc_feature (39)..(314): Homolog of NCBI NO: 9558456 NR Description: unnamed protein product [Oryza sativa (japonica
  misc_feature (39)..(314): Homolog of NCBI NO: 34895514 NR Description: putative bifunctional nuclease [Oryza sativa
  misc_feature (31)..(314): Homolog of NCBI NO: 15221343 NR Description: putative bifunctional nuclease; protein id: supported by cDNA: 256130. [Arabidopsis thaliana]

SEQ ID NO: 74050 - protein, 294 aa, Arabidopsis thaliana; identical to SEQ ID NO: 30425
  peptide (1)..(294): Ceres Seq. ID no. 4992381
  misc_feature: Pfam Name: S1-P1_nuclease Pfam Description: S1/P1 Nuclease
  misc_feature (1)..(294): Homolog of NCBI NO: 18415727 NR Description: putative bifunctional nuclease; protein id: supported by cDNA: 17760. [Arabidopsis thaliana]
  misc_feature (5)..(292): Homolog of NCBI NO: 18415729 NR Description: endonuclease, putative; protein id: At4g21600.1,
  misc_feature (5)..(292): Homolog of NCBI NO: 21593575 NR Description: endonuclease, putative [Arabidopsis thaliana]
  misc_feature (1)..(292): Homolog of NCBI NO: 22328857 NR Description: expressed protein; protein id: At4g21585.1
  misc_feature (131)..(294): Homolog of NCBI NO: 7485717 NR Description: hypothetical protein F18E5.210 - Arabidopsis >gi|3080403|emb|CAA18723.1| hypothetical protein [Arabidopsis >gi|4455267|emb|CAB36803.1| putative bifunctional nuclease
  misc_feature (36)..(100): Homolog of NCBI NO: 7485717 NR Description: hypothetical protein F18E5.210 - Arabidopsis >gi|3080403|emb|CAA18723.1| hypothetical protein [Arabidopsis >gi|4455267|emb|CAB36803.1| putative bifunctional nuclease
  misc_feature (8)..(285): Homolog of NCBI NO: 4099835 NR Description: bifunctional nuclease [Zinnia elegans]
  misc_feature (10)..(285): Homolog of NCBI NO: 9558456 NR Description: unnamed protein product [Oryza sativa (japonica
  misc_feature (10)..(285): Homolog of NCBI NO: 34895514 NR Description: putative bifunctional nuclease [Oryza sativa
  misc_feature (2)..(285): Homolog of NCBI NO: 15221343 NR Description: putative bifunctional nuclease; protein id: supported by cDNA: 256130. [Arabidopsis thaliana]

SEQ ID NO: 74051 - protein, 288 aa, Arabidopsis thaliana; identical to SEQ ID NO: 30426
  peptide (1)..(288): Ceres Seq. ID no. 4992382
  misc_feature: Pfam Name: S1-P1_nuclease Pfam Description: S1/P1 Nuclease
  misc_feature (1)..(288): Homolog of NCBI NO: 18415727 NR Description: putative bifunctional nuclease; protein id: supported by cDNA: 17760. [Arabidopsis thaliana]
  misc_feature (1)..(286): Homolog of NCBI NO: 18415729 NR Description: endonuclease, putative; protein id: At4g21600.1,
  misc_feature (1)..(286): Homolog of NCBI NO: 21593575 NR Description: endonuclease, putative [Arabidopsis thaliana]
  misc_feature (1)..(286): Homolog of NCBI NO: 22328857 NR Description: expressed protein; protein id: At4g21585.1
  misc_feature (125)..(288): Homolog of NCBI NO: 7485717 NR Description: hypothetical protein F18E5.210 - Arabidopsis >gi|3080403|emb|CAA18723.1| hypothetical protein [Arabidopsis >gi|4455267|emb|CAB36803.1| putative bifunctional nuclease
  misc_feature (30)..(94): Homolog of NCBI NO: 7485717 NR Description: hypothetical protein F18E5.210 - Arabidopsis >gi|3080403|emb|CAA18723.1| hypothetical protein [Arabidopsis >gi|4455267|emb|CAB36803.1| putative bifunctional nuclease
  misc_feature (2)..(279): Homolog of NCBI NO: 4099835 NR Description: bifunctional nuclease [Zinnia elegans]
  misc_feature (4)..(279): Homolog of NCBI NO: 9558456 NR Description: unnamed protein product [Oryza sativa (japonica
  misc_feature (4)..(279): Homolog of NCBI NO: 34895514 NR Description: putative bifunctional nuclease [Oryza sativa
  misc_feature (1)..(279): Homolog of NCBI NO: 15221343 NR Description: putative bifunctional nuclease; protein id: supported by cDNA: 256130. [Arabidopsis thaliana]

SEQ ID NO: 74052 - DNA, 750 bp, Arabidopsis thaliana
  misc_feature (1)..(750): Ceres Seq. ID no. 4992540
  misc_feature: MA Experiment ID: 108434 Result: Down-regulated in Transcription
  misc_feature: MA Experiment 108434 PARAMETER Experiment Name: At_Root_Tips_cDNA_P Parameter: Tissue Value: Root Tips
  misc_feature: MA Experiment ID: 20000185 Result: Up-regulated in Transcription
  misc_feature: MA Experiment 20000185 PARAMETER Experiment Name: At_Roots__P Parameter: Age (day) Value: 7 vs. 21
  misc_feature: MA Experiment 20000185 PARAMETER Experiment Name: At_Roots__P Parameter: Organism Value: A. thaliana
  misc_feature: MA Experiment 20000185 PARAMETER Experiment Name: At_Roots__P Parameter: Tissue Value: Roots vs. Whole Plant
  misc_feature: MA Experiment ID: 20000439 Result: Up-regulated in Transcription
  misc_feature: MA Experiment 20000439 PARAMETER Experiment Name: At_Roots__P Parameter: Age (day) Value: 14 vs. 21
  misc_feature: MA Experiment 20000439 PARAMETER Experiment Name: At_Roots__P Parameter: Organism Value: A. thaliana
  misc_feature: MA Experiment 20000439 PARAMETER Experiment Name: At_Roots__P Parameter: Tissue Value: Roots vs. Whole Plant
aaaatcttctctatcctttctcgagagaatatggatcagatcttcaacaaggttggatcctactggttaggccaaaaggctaacaagcagtttgactccgtcggcaacgatctcaactcggtgtcaacgagcattgaaggaggaacaaaatggttggtcaacaaaatcaaagggaaaatgcagaagccgttgcctgagttactaaaagaatatgatttgccgattggaatcttcccgggagatgctacaaactacgagttcgatgaagagacaaagaaactaaccgttttgatcccatcgatatgcgaagttggatacaaggattcatcagtgttgaagttcacaacaacagtaacaggacatcttgagaaaggaaagctaacagatgtggaaggaatcaagacaaaagtaatgatatgggtaaaagtgacaagcatatctacagatgcatcaaaggtctatttcactgcaggaatgaagaagagcagaagcagagatgcttatgaggttcaaagaaatggtctccgagtcgataaattctaacacctgtctgtgttctgtctggttccaaagtttcaagcttttccatttacgttttggttttgatttaaagcctcctactgtgagtatacatcaacttatttataaatctgatcataacttcaatatggccggagcaattctactttgttcttttttttttccaattgtaaagaactactattcgtgtgctcaatgatttggtcttac

SEQ ID NO: 74053 - protein, 180 aa, Arabidopsis thaliana; identical to SEQ ID NO: 35119
  peptide (1)..(180): Ceres Seq. ID no. 4992541
  misc_feature (42)..(180): Pfam Name: Protein of unknown function, DUF538 Pfam Description: Protein of unknown function, DUF538
  misc_feature (11)..(180): Homolog of NCBI NO: 15241019 NR Description: putative protein; protein id: At5g01610.1, by cDNA: 21740. [Arabidopsis thaliana] >gi|11290054|pir||T48182
  misc_feature (11)..(180): Homolog of NCBI NO: 28466909 NR Description: At5g01610 [Arabidopsis thaliana]
  misc_feature (11)..(180): Homolog of NCBI NO: 18398279 NR Description: expressed protein; protein id: At3g08890.1, by cDNA: 20180. [Arabidopsis thaliana] unknown protein [Arabidopsis thaliana]
  misc_feature (11)..(180): Homolog of NCBI NO: 15240103 NR Description: putative protein; protein id: At5g37070.1 thaliana] >gi|10177986|dbj|BAB11359.1|
  misc_feature (11)..(180): Homolog of NCBI NO: 40642817 NR Description: cp protein [Celosia cristata]
  misc_feature (11)..(180): Homolog of NCBI NO: 34914210 NR Description: OSJNBb0049O23.18 [Oryza sativa (japonica
  misc_feature (17)..(177): Homolog of NCBI NO: 18395537 NR Description: expressed protein; protein id: At2g03350.1, by cDNA: 1697. [Arabidopsis thaliana] >gi|25364434|pir||D84447
  misc_feature (17)..(177): Homolog of NCBI NO: 21553803 NR Description: unknown [Arabidopsis thaliana]
  misc_feature (67)..(178): Homolog of NCBI NO: 18379014 NR Description: Expressed protein; protein id: At1g02816.1, by cDNA: 28445., supported by cDNA: gi_14423479, supported by
  misc_feature (66)..(158): Homolog of NCBI NO: 28273408 NR Description: unknown protein [Oryza sativa (japonica

SEQ ID NO: 74054 - protein, 170 aa, Arabidopsis thaliana; identical to SEQ ID NO: 35120
  peptide (1)..(170): Ceres Seq. ID no. 4992542
  misc_feature (32)..(170): Pfam Name: Protein of unknown function, DUF538 Pfam Description: Protein of unknown function, DUF538
  misc_feature (1)..(170): Homolog of NCBI NO: 15241019 NR Description: putative protein; protein id: At5g01610.1, by cDNA: 21740. [Arabidopsis thaliana] >gi|11290054|pir||T48182
  misc_feature (1)..(170): Homolog of NCBI NO: 28466909 NR Description: At5g01610 [Arabidopsis thaliana]
  misc_feature (1)..(170): Homolog of NCBI NO: 18398279 NR Description: expressed protein; protein id: At3g08890.1, by cDNA: 20180. [Arabidopsis thaliana] unknown protein [Arabidopsis thaliana]
  misc_feature (1)..(170): Homolog of NCBI NO: 15240103 NR Description: putative protein; protein id: At5g37070.1 thaliana] >gi|10177986|dbj|BAB11359.1|
  misc_feature (1)..(170): Homolog of NCBI NO: 40642817 NR Description: cp protein [Celosia cristata]
  misc_feature (1)..(170): Homolog of NCBI NO: 34914210 NR Description: OSJNBb0049O23.18 [Oryza sativa (japonica
  misc_feature (7)..(167): Homolog of NCBI NO: 18395537 NR Description: expressed protein; protein id: At2g03350.1, by cDNA: 1697. [Arabidopsis thaliana] >gi|25364434|pir||D84447
  misc_feature (7)..(167): Homolog of NCBI NO: 21553803 NR Description: unknown [Arabidopsis thaliana]
  misc_feature (57)..(168): Homolog of NCBI NO: 18379014 NR Description: Expressed protein; protein id: At1g02816.1, by cDNA: 28445., supported by cDNA: gi_14423479, supported by
  misc_feature (56)..(148): Homolog of NCBI NO: 28273408 NR Description: unknown protein [Oryza sativa (japonica

SEQ ID NO: 74055 - protein, 121 aa, Arabidopsis thaliana; identical to SEQ ID NO: 35121
  peptide (1)..(121): Ceres Seq. ID no. 4992543
  misc_feature (1)..(121): Pfam Name: Protein of unknown function, DUF538 Pfam Description: Protein of unknown function, DUF538
  misc_feature (1)..(121): Homolog of NCBI NO: 15241019 NR Description: putative protein; protein id: At5g01610.1, by cDNA: 21740. [Arabidopsis thaliana] >gi|11290054|pir||T48182
  misc_feature (1)..(121): Homolog of NCBI NO: 28466909 NR Description: At5g01610 [Arabidopsis thaliana]
  misc_feature (1)..(121): Homolog of NCBI NO: 18398279 NR Description: expressed protein; protein id: At3g08890.1, by cDNA: 20180. [Arabidopsis thaliana] unknown protein [Arabidopsis thaliana]
  misc_feature (1)..(121): Homolog of NCBI NO: 15240103 NR Description: putative protein; protein id: At5g37070.1 thaliana] >gi|10177986|dbj|BAB11359.1|
  misc_feature (1)..(121): Homolog of NCBI NO: 40642817 NR Description: cp protein [Celosia cristata]
  misc_feature (1)..(121): Homolog of NCBI NO: 34914210 NR Description: OSJNBb0049O23.18 [Oryza sativa (japonica
  misc_feature (1)..(118): Homolog of NCBI NO: 18395537 NR Description: expressed protein; protein id: At2g03350.1, by cDNA: 1697. [Arabidopsis thaliana] >gi|25364434|pir||D84447
  misc_feature (1)..(118): Homolog of NCBI NO: 21553803 NR Description: unknown [Arabidopsis thaliana]
  misc_feature (8)..(119): Homolog of NCBI NO: 18379014 NR Description: Expressed protein; protein id: At1g02816.1, by cDNA: 28445., supported by cDNA: gi_14423479, supported by
  misc_feature (7)..(99): Homolog of NCBI NO: 28273408 NR Description: unknown protein [Oryza sativa (japonica

SEQ ID NO: 74056 - DNA, 1648 bp, Arabidopsis thaliana
  misc_feature (1)..(1648): Ceres Seq. ID no. 4992547
  misc_feature: MA Experiment ID: 108434 Result: Up-regulated in Transcription
  misc_feature: MA Experiment 108434 PARAMETER Experiment Name: At_Root_Tips_cDNA_P Parameter: Tissue Value: Root Tips
  misc_feature: MA Experiment ID: 108461 Result: Up-regulated in Transcription
  misc_feature: MA Experiment 108461 PARAMETER Experiment Name: At_Germinating_Seeds_cDNA_P Parameter: Age (day) Value: 1 vs. 0
  misc_feature: MA Experiment 108461 PARAMETER Experiment Name: At_Germinating_Seeds_cDNA_P Parameter: Tissue Value: Germinating Seeds
  misc_feature: MA Experiment ID: 108462 Result: Up-regulated in Transcription
  misc_feature: MA Experiment 108462 PARAMETER Experiment Name: At_Germinating_Seeds_cDNA_P Parameter: Age (day) Value: 2 vs. 0
  misc_feature: MA Experiment 108462 PARAMETER Experiment Name: At_Germinating_Seeds_cDNA_P Parameter: Tissue Value: Germinating Seeds
  misc_feature: MA Experiment ID: 20000071 Result: Down-regulated in Transcription
  misc_feature: MA Experiment 20000071 PARAMETER Experiment Name: At_100uM_ABA_Mutants_cDNA_P Parameter: Plant Line Value: CS8104
  misc_feature: MA Experiment 20000071 PARAMETER Experiment Name: At_100uM_ABA_Mutants_cDNA_P Parameter: Timepoint (hr) Value: 6
  misc_feature: MA Experiment 20000071 PARAMETER Experiment Name: At_100uM_ABA_Mutants_cDNA_P Parameter: Tissue Value: Aerial
  misc_feature: MA Experiment 20000071 PARAMETER Experiment Name: At_100uM_ABA_Mutants_cDNA_P Parameter: Treatment Value: 100uM ABA vs. No Treatment
  misc_feature: MA Experiment ID: 20000185 Result: Up-regulated in Transcription
  misc_feature: MA Experiment 20000185 PARAMETER Experiment Name: At_Roots__P Parameter: Age (day) Value: 7 vs. 21
  misc_feature: MA Experiment 20000185 PARAMETER Experiment Name: At_Roots__P Parameter: Organism Value: A. thaliana
  misc_feature: MA Experiment 20000185 PARAMETER Experiment Name: At_Roots__P Parameter: Tissue Value: Roots vs. Whole Plant
  misc_feature: MA Experiment ID: 20000227 Result: Up-regulated in Transcription
  misc_feature: MA Experiment 20000227 PARAMETER Experiment Name: At_Root-Tips-vs-Tops_P Parameter: Tissue Value: Root Tips vs. Root Tops
  misc_feature: MA Experiment ID: 20000234 Result: Up-regulated in Transcription
  misc_feature: MA Experiment 20000234 PARAMETER Experiment Name: At_Siliques_P Parameter: Age (day) Value: 21
  misc_feature: MA Experiment 20000234 PARAMETER Experiment Name: At_Siliques_P Parameter: Organism Value: A. thaliana
  misc_feature: MA Experiment 20000234 PARAMETER Experiment Name: At_Siliques_P Parameter: Plant Line Value: WS
  misc_feature: MA Experiment 20000234 PARAMETER Experiment Name: At_Siliques_P Parameter: Tissue Value: Less Than 5mm Siliques vs. Whole Plant
  misc_feature: MA Experiment ID: 20000439 Result: Up-regulated in Transcription
  misc_feature: MA Experiment 20000439 PARAMETER Experiment Name: At_Roots__P Parameter: Age (day) Value: 14 vs. 21
  misc_feature: MA Experiment 20000439 PARAMETER Experiment Name: At_Roots__P Parameter: Organism Value: A. thaliana
  misc_feature: MA Experiment 20000439 PARAMETER Experiment Name: At_Roots__P Parameter: Tissue Value: Roots vs. Whole Plant
  misc_feature: MA Experiment ID: 20001560 Result: Up-regulated in Transcription
  misc_feature: MA Experiment 20001560 PARAMETER Experiment Name: At_Drought_Soil_Dry_P Parameter: Age (day) Value: 28
  misc_feature: MA Experiment 20001560 PARAMETER Experiment Name: At_Drought_Soil_Dry_P Parameter: Organism Value: A. thaliana
  misc_feature: MA Experiment 20001560 PARAMETER Experiment Name: At_Drought_Soil_Dry_P Parameter: Plant Line Value: WS
  misc_feature: MA Experiment 20001560 PARAMETER Experiment Name: At_Drought_Soil_Dry_P Parameter: Post Timepoint (hr) Value: None
  misc_feature: MA Experiment 20001560 PARAMETER Experiment Name: At_Drought_Soil_Dry_P Parameter: Post-Treatment Value: None
  misc_feature: MA Experiment 20001560 PARAMETER Experiment Name: At_Drought_Soil_Dry_P Parameter: Timepoint (day) Value: 14
  misc_feature: MA Experiment 20001560 PARAMETER Experiment Name: At_Drought_Soil_Dry_P Parameter: Treatment Value: Drought vs. No Drought
aaagaaacaaaaggatttattaaaaaaaaaaaaaaagagatgaagacagctcgagggatgcaatagagccaagaggaggagaaagatgggatctgctccaaacttgtaccagtcgcatcaaagcaagttttggtgaagaagaagagacgaggtcttcctcttactgtggtggtgacattttctctaaaaagaaagtctccgatatgtcgcagagatggagtagaaagaagagtagacttccattagcgggtctcctctttattctcgttgtcacctttatgattctcttcaacgagcgtagcattcagcagatccatcaccacgccgcgagtcacactcaaaatctccgagaaccttccacgttcgatttcgtcaagcctaatgttcctcggattaactacttgggagctcatgaggttttggatagattcagcaaatgcaactcgacgaaagagtacagtgggaagaaaatcggatgggttgacccgtttgaagaccacccgggtcaagtaacaaaggaggagcagaaatgtgatgtcttttctgggaaatgggtctttgataattcatcatcataccctttacacaaggaatctcagtgtccttacatgtccgaccagttggcttgtcagaagcatggtaggaaggatttggagtatcagcattggagatggcaacctcatgcctgcaacttgaagagatggaatgcgatagaaatgtgggagaagctgagaggaaagagattgatgtttgttggagactcgttaaacagaggccaatggatttcaatggtttgtctcttacagtctgtcattccacgtgacaagcagtctatgtctcctaacgctcacctcaccattttcagggctgaggactacaatgccacagtggagtttctctgggcaccgttgctcgtggagtcgaattctgatgaccctgttaatcacagattgagcgagcggattatccgacccgattctgttcttaaacatgcatcaaagtggcaacatgctgatattctaatcttcaacacctacttatggtggagacaagactctgtcaagctccgatggagcagtgaagaaaaagggtcatgcgaggaggtgaagagcgccgagggaatggagatggcaatggatagttggggtgattgggttgctaacaatgtcgatccaaacaaaaagcgagttttcttcgttacaatgtctcctacacatcaatggagccgagaatggaacccgggaagcgaaggaaactgctacggggagaagaaaccaatagaggaagagagttattggggaagtgggtcggacattccgacaatgaggatggtgaagagagttttggagagattgggaccaaaggtctcagttataaacatcactcagttgtctgagtatcgaaaagatggtcatccatcggtgtaccggaaattctgggaacctctaaatgaagaccggttgaaaaacccggcatcgtattctgactgtactcattggtgtgtacctggagttcctgatgtctggaatcaattgcttttccattttttgtgaaaatgaaatgaatataaccttaccttgatggccgaatatcacccataaattatataacggggtgattttagctagctataaggatccaaatttgt

SEQ ID NO: 74057 - protein, 449 aa, Arabidopsis thaliana; identical to SEQ ID NO: 38720
  peptide (1)..(449): Ceres Seq. ID no. 4992548
  misc_feature (280)..(449): Pfam Name: Arabidopsis proteins of unknown function Pfam Description: Arabidopsis proteins of unknown function
  misc_feature (1)..(449): Homolog of NCBI NO: 18413698 NR Description: putative protein; protein id: At5g01620.1, by cDNA: 108209., supported by cDNA: gi_19347853 [Arabidopsis >gi|19347854|gb|AAL86006.1| unknown protein [Arabidopsis
  misc_feature (1)..(449): Homolog of NCBI NO: 11291876 NR Description: hypothetical protein F7A7.140 - Arabidopsis >gi|7327821|emb|CAB82278.1| putative protein [Arabidopsis
  misc_feature (1)..(449): Homolog of NCBI NO: 21536676 NR Description: unknown [Arabidopsis thaliana]
  misc_feature (108)..(449): Homolog of NCBI NO: 7487161 NR Description: hypothetical protein At2g38320 [imported] -
  misc_feature (108)..(449): Homolog of NCBI NO: 18404712 NR Description: expressed protein; protein id: At2g38320.1, by cDNA: gi_13878094 [Arabidopsis thaliana] unknown protein [Arabidopsis thaliana]
  misc_feature (110)..(446): Homolog of NCBI NO: 28876013 NR Description: unknown protein [Oryza sativa (japonica
  misc_feature (103)..(446): Homolog of NCBI NO: 28393743 NR Description: unknown protein [Arabidopsis thaliana]
  misc_feature (103)..(446): Homolog of NCBI NO: 15226647 NR Description: hypothetical protein; protein id: At2g40320.1
  misc_feature (103)..(446): Homolog of NCBI NO: 15228429 NR Description: unknown protein; protein id: At3g11030.1 thaliana] >gi|6016691|gb|AAF01518.1|AC009991_14 unknown protein thaliana] >gi|27754560|gb|AAO22727.1| unknown protein
  misc_feature (103)..(449): Homolog of NCBI NO: 15219382 NR Description: hypothetical protein; protein id: At1g73140.1

SEQ ID NO: 74058 - protein, 424 aa, Arabidopsis thaliana; identical to SEQ ID NO: 38721
  peptide (1)..(424): Ceres Seq. ID no. 4992549
  misc_feature (255)..(424): Pfam Name: Arabidopsis proteins of unknown function Pfam Description: Arabidopsis proteins of unknown function
  misc_feature (1)..(424): Homolog of NCBI NO: 18413698 NR Description: putative protein; protein id: At5g01620.1, by cDNA: 108209., supported by cDNA: gi_19347853 [Arabidopsis >gi|19347854|gb|AAL86006.1| unknown protein [Arabidopsis
  misc_feature (1)..(424): Homolog of NCBI NO: 11291876 NR Description: hypothetical protein F7A7.140 - Arabidopsis >gi|7327821|emb|CAB82278.1| putative protein [Arabidopsis
  misc_feature (1)..(424): Homolog of NCBI NO: 21536676 NR Description: unknown [Arabidopsis thaliana]
  misc_feature (83)..(424): Homolog of NCBI NO: 7487161 NR Description: hypothetical protein At2g38320 [imported] -
  misc_feature (83)..(424): Homolog of NCBI NO: 18404712 NR Description: expressed protein; protein id: At2g38320.1, by cDNA: gi_13878094 [Arabidopsis thaliana] unknown protein [Arabidopsis thaliana]
  misc_feature (85)..(421): Homolog of NCBI NO: 28876013 NR Description: unknown protein [Oryza sativa (japonica
  misc_feature (78)..(421): Homolog of NCBI NO: 28393743 NR Description: unknown protein [Arabidopsis thaliana]
  misc_feature (78)..(421): Homolog of NCBI NO: 15226647 NR Description: hypothetical protein; protein id: At2g40320.1
  misc_feature (78)..(421): Homolog of NCBI NO: 15228429 NR Description: unknown protein; protein id: At3g11030.1 thaliana] >gi|6016691|gb|AAF01518.1|AC009991_14 unknown protein thaliana] >gi|27754560|gb|AAO22727.1| unknown protein
  misc_feature (78)..(424): Homolog of NCBI NO: 15219382 NR Description: hypothetical protein; protein id: At1g73140.1

SEQ ID NO: 74059 - protein, 314 aa, Arabidopsis thaliana; identical to SEQ ID NO: 38722
  peptide (1)..(314): Ceres Seq. ID no. 4992550
  misc_feature (145)..(314): Pfam Name: Arabidopsis proteins of unknown function Pfam Description: Arabidopsis proteins of unknown function
  misc_feature (1)..(314): Homolog of NCBI NO: 18413698 NR Description: putative protein; protein id: At5g01620.1, by cDNA: 108209., supported by cDNA: gi_19347853 [Arabidopsis >gi|19347854|gb|AAL86006.1| unknown protein [Arabidopsis
  misc_feature (1)..(314): Homolog of NCBI NO: 11291876 NR Description: hypothetical protein F7A7.140 - Arabidopsis >gi|7327821|emb|CAB82278.1| putative protein [Arabidopsis
  misc_feature (1)..(314): Homolog of NCBI NO: 21536676 NR Description: unknown [Arabidopsis thaliana]
  misc_feature (1)..(314): Homolog of NCBI NO: 7487161 NR Description: hypothetical protein At2g38320 [imported] -
  misc_feature (1)..(314): Homolog of NCBI NO: 18404712 NR Description: expressed protein; protein id: At2g38320.1, by cDNA: gi_13878094 [Arabidopsis thaliana] unknown protein [Arabidopsis thaliana]
  misc_feature (1)..(311): Homolog of NCBI NO: 28876013 NR Description: unknown protein [Oryza sativa (japonica
  misc_feature (1)..(311): Homolog of NCBI NO: 28393743 NR Description: unknown protein [Arabidopsis thaliana]
  misc_feature (1)..(311): Homolog of NCBI NO: 15226647 NR Description: hypothetical protein; protein id: At2g40320.1
  misc_feature (1)..(311): Homolog of NCBI NO: 15228429 NR Description: unknown protein; protein id: At3g11030.1 thaliana] >gi|6016691|gb|AAF01518.1|AC009991_14 unknown protein thaliana] >gi|27754560|gb|AAO22727.1| unknown protein
  misc_feature (1)..(314): Homolog of NCBI NO: 15219382 NR Description: hypothetical protein; protein id: At1g73140.1

SEQ ID NO: 74060 - DNA, 1575 bp, Arabidopsis thaliana
  misc_feature (1)..(1575): Ceres Seq. ID no. 4992687
  misc_feature: MA Experiment ID: 108434 Result: Up-regulated in Transcription
  misc_feature: MA Experiment 108434 PARAMETER Experiment Name: At_Root_Tips_cDNA_P Parameter: Tissue Value: Root Tips
cttcttcctcctcctctgttcgtcaatcgccgatctcgttgcttcattttccttgagatcgattggtacaagtgttcatccaatggttggaggaggagttatccggcagcttcttagaaggaaacttcattcccaatcagtcgtgagctttttccctgttacatctttttgattttctgctgtagcttaggatctgtttgaagatagaatcatatgatttgttttggttctgtctacaccttcattgctctgagagattgtccttgaagaattgtaactggaattgttgtggcgttggagattttgggatataagaaacttagacttattgatttgtgcttcgagagtatgattaatattcgatttcttttcagaaaaagtagtcttttgatttgttgagcatacaccttcttgtgtcttggcctttttttttgttttcttactgttgttctgtattatctaccaccataggcaactccggtattgtcatggttgtcttcgaagaaagcgaatgaagatgctgggtctgctggtttaagagcatttgctctcatgggtgctggtattaccggattattgagtttttctactgttgcatctgctgatgaggctgaacatggtctggagtgtcctaactacccttggccacatgagggcattctcagctcatatgaccatgcttcgatccgtcgtggtcaccaagtttatcagcaagtttgtgcgtcttgccattcgatgtctctgatctcataccgagacttggtgggtgttgcctacacagaggaagaggcgaaggccatggcagctgaaatcgaggttgttgatggaccaaatgatgagggtgagatgttcacccgacctggtaaactcagtgatcggcttcctgaaccatactcaaatgaatcggctgctaggttcgccaatggaggagcgtatccaccggatctaagtcttgtaactaaggcacgtcacaatggccaaaattatgtctttgctctgttgactggttatcgtgatcctcctgctggaatttcgatcagagaggggctacactacaatccttatttccctggtggagcaatcgctatgccaaaaatgctcaacgatgaagctgtggaatatgaagatggaactcctgcaacagaagcacagatgggtaaagatgttgtatccttcttgtcctgggcagctgaaccagagatggaagagaggaaattgatggggttcaaatggatattcttactgtctttggctctgcttcaagctgcgtattacaggagactgaaatggtcagtactcaaatcccgtaagcttgttctcgacgttgttaactaatcccgtgaagatcaccttttctctgggtaataatcattaatcttgaaagggataaatggtgaatcccactttttgtctcaaaagacatgtttctttgtttattgtttagaaagtctaatgaggcaaagaagtaaagcttttttaacctcaagtcacacatgattttgagattatattatttctttttggtttgttgtctcctaaaccggactcggtttgtcttaataaaaatgtggtttt

SEQ ID NO: 74061 - protein, 260 aa, Arabidopsis thaliana; identical to SEQ ID NO: 23964
  peptide (1)..(260): Ceres Seq. ID no. 4992688
  misc_feature (25)..(250): Pfam Name: Cytochrome C1 family Pfam Description: Cytochrome C1 family
  misc_feature (1)..(260): Homolog of NCBI NO: 15237497 NR Description: cytochrome c1 precursor; protein id: At5g40810.1, by cDNA: gi_15215623 [Arabidopsis thaliana]
  misc_feature (1)..(260): Homolog of NCBI NO: 15215624 NR Description: AT5g40810/MHK7_4 [Arabidopsis thaliana]
  misc_feature (1)..(260): Homolog of NCBI NO: 15232125 NR Description: cytochrome c, putative; protein id: At3g27240.1, by cDNA: 41320., supported by cDNA: gi_15809955, supported by gi_17981652 [Arabidopsis thaliana] >gi|9294217|dbj|BAB02119.1|
  misc_feature (1)..(260): Homolog of NCBI NO: 21593678 NR Description: cytochrome c, putative [Arabidopsis thaliana]
  misc_feature (1)..(260): Homolog of NCBI NO: 15809956 NR Description: AT3g27240/K17E12_6 [Arabidopsis thaliana]
  misc_feature (1)..(260): Homolog of NCBI NO: 82263 NR Description: ubiquinol-cytochrome-c reductase (EC 1.10.2.2)
  misc_feature (1)..(260): Homolog of NCBI NO: 7547401 NR Description: cytochrome c1 precursor [Solanum tuberosum]
  misc_feature (1)..(260): Homolog of NCBI NO: 117765 NR Description: Cytochrome c1, heme protein, mitochondrial (Clone PC13III) >gi|21439|emb|CAA44055.1| cytochrome c1 [Solanum
  misc_feature (1)..(260): Homolog of NCBI NO: 34907202 NR Description: putative cytochrome c1 precursor [Oryza sativa
  misc_feature (1)..(260): Homolog of NCBI NO: 82264 NR Description: ubiquinol-cytochrome-c reductase (EC 1.10.2.2)

SEQ ID NO: 74062 - protein, 199 aa, Arabidopsis thaliana; identical to SEQ ID NO: 23965
  peptide (1)..(199): Ceres Seq. ID no. 4992689
  misc_feature (1)..(189): Pfam Name: Cytochrome C1 family Pfam Description: Cytochrome C1 family
  misc_feature (1)..(199): Homolog of NCBI NO: 15237497 NR Description: cytochrome c1 precursor; protein id: At5g40810.1, by cDNA: gi_15215623 [Arabidopsis thaliana]
  misc_feature (1)..(199): Homolog of NCBI NO: 15215624 NR Description: AT5g40810/MHK7_4 [Arabidopsis thaliana]
  misc_feature (1)..(199): Homolog of NCBI NO: 15232125 NR Description: cytochrome c, putative; protein id: At3g27240.1, by cDNA: 41320., supported by cDNA: gi_15809955, supported by gi_17981652 [Arabidopsis thaliana] >gi|9294217|dbj|BAB02119.1|
  misc_feature (1)..(199): Homolog of NCBI NO: 21593678 NR Description: cytochrome c, putative [Arabidopsis thaliana]
  misc_feature (1)..(199): Homolog of NCBI NO: 15809956 NR Description: AT3g27240/K17E12_6 [Arabidopsis thaliana]
  misc_feature (1)..(199): Homolog of NCBI NO: 82263 NR Description: ubiquinol-cytochrome-c reductase (EC 1.10.2.2)
  misc_feature (1)..(199): Homolog of NCBI NO: 7547401 NR Description: cytochrome c1 precursor [Solanum tuberosum]
  misc_feature (1)..(199): Homolog of NCBI NO: 117765 NR Description: Cytochrome c1, heme protein, mitochondrial (Clone PC13III) >gi|21439|emb|CAA44055.1| cytochrome c1 [Solanum
  misc_feature (1)..(199): Homolog of NCBI NO: 34907202 NR Description: putative cytochrome c1 precursor [Oryza sativa
  misc_feature (1)..(199): Homolog of NCBI NO: 82264 NR Description: ubiquinol-cytochrome-c reductase (EC 1.10.2.2)

SEQ ID NO: 74063 - protein, 178 aa, Arabidopsis thaliana; identical to SEQ ID NO: 23966
  peptide (1)..(178): Ceres Seq. ID no. 4992690
  misc_feature (1)..(168): Pfam Name: Cytochrome C1 family Pfam Description: Cytochrome C1 family
  misc_feature (1)..(178): Homolog of NCBI NO: 15237497 NR Description: cytochrome c1 precursor; protein id: At5g40810.1, by cDNA: gi_15215623 [Arabidopsis thaliana]
  misc_feature (1)..(178): Homolog of NCBI NO: 15215624 NR Description: AT5g40810/MHK7_4 [Arabidopsis thaliana]
  misc_feature (1)..(178): Homolog of NCBI NO: 15232125 NR Description: cytochrome c, putative; protein id: At3g27240.1, by cDNA: 41320., supported by cDNA: gi_15809955, supported by gi_17981652 [Arabidopsis thaliana] >gi|9294217|dbj|BAB02119.1|
  misc_feature (1)..(178): Homolog of NCBI NO: 21593678 NR Description: cytochrome c, putative [Arabidopsis thaliana]
  misc_feature (1)..(178): Homolog of NCBI NO: 15809956 NR Description: AT3g27240/K17E12_6 [Arabidopsis thaliana]
  misc_feature (1)..(178): Homolog of NCBI NO: 82263 NR Description: ubiquinol-cytochrome-c reductase (EC 1.10.2.2)
  misc_feature (1)..(178): Homolog of NCBI NO: 7547401 NR Description: cytochrome c1 precursor [Solanum tuberosum]
  misc_feature (1)..(178): Homolog of NCBI NO: 117765 NR Description: Cytochrome c1, heme protein, mitochondrial (Clone PC13III) >gi|21439|emb|CAA44055.1| cytochrome c1 [Solanum
  misc_feature (1)..(178): Homolog of NCBI NO: 34907202 NR Description: putative cytochrome c1 precursor [Oryza sativa
  misc_feature (1)..(178): Homolog of NCBI NO: 82264 NR Description: ubiquinol-cytochrome-c reductase (EC 1.10.2.2)

SEQ ID NO: 74064 - DNA, 1624 bp, Arabidopsis thaliana
  misc_feature (1)..(1624): Ceres Seq. ID no. 4992709
  misc_feature: MA Experiment ID: 20000171 Result: Down-regulated in Transcription
  misc_feature: MA Experiment 20000171 PARAMETER Experiment Name: At_42deg_Heat_P Parameter: Age (day) Value: 14
  misc_feature: MA Experiment 20000171 PARAMETER Experiment Name: At_42deg_Heat_P Parameter: Organism Value: A. thaliana
  misc_feature: MA Experiment 20000171 PARAMETER Experiment Name: At_42deg_Heat_P Parameter: Plant Line Value: WS
  misc_feature: MA Experiment 20000171 PARAMETER Experiment Name: At_42deg_Heat_P Parameter: Temperature (deg C) Value: 42 vs. 22
  misc_feature: MA Experiment 20000171 PARAMETER Experiment Name: At_42deg_Heat_P Parameter: Timepoint (hr) Value: 1
  misc_feature: MA Experiment 20000171 PARAMETER Experiment Name: At_42deg_Heat_P Parameter: Tissue Value: Aerial
  misc_feature: MA Experiment ID: 20000173 Result: Down-regulated in Transcription
  misc_feature: MA Experiment 20000173 PARAMETER Experiment Name: At_42deg_Heat_P Parameter: Age (day) Value: 14
  misc_feature: MA Experiment 20000173 PARAMETER Experiment Name: At_42deg_Heat_P Parameter: Organism Value: A. thaliana
  misc_feature: MA Experiment 20000173 PARAMETER Experiment Name: At_42deg_Heat_P Parameter: Plant Line Value: WS
  misc_feature: MA Experiment 20000173 PARAMETER Experiment Name: At_42deg_Heat_P Parameter: Temperature (deg C) Value: 42 vs. 22
  misc_feature: MA Experiment 20000173 PARAMETER Experiment Name: At_42deg_Heat_P Parameter: Timepoint (hr) Value: 6
  misc_feature: MA Experiment 20000173 PARAMETER Experiment Name: At_42deg_Heat_P Parameter: Tissue Value: Aerial
  misc_feature: MA Experiment ID: 20000182 Result: Up-regulated in Transcription
  misc_feature: MA Experiment 20000182 PARAMETER Experiment Name: At_2mM_SA_P Parameter: Age (day) Value: 14
  misc_feature: MA Experiment 20000182 PARAMETER Experiment Name: At_2mM_SA_P Parameter: Organism Value: A. thaliana
  misc_feature: MA Experiment 20000182 PARAMETER Experiment Name: At_2mM_SA_P Parameter: Plant Line Value: WS
  misc_feature: MA Experiment 20000182 PARAMETER Experiment Name: At_2mM_SA_P Parameter: Timepoint (hr) Value: 6
  misc_feature: MA Experiment 20000182 PARAMETER Experiment Name: At_2mM_SA_P Parameter: Tissue Value: Aerial
  misc_feature: MA Experiment 20000182 PARAMETER Experiment Name: At_2mM_SA_P Parameter: Treatment Value: 2mM SA vs. No Treatment
  misc_feature: MA Experiment ID: 20000185 Result: Up-regulated in Transcription
  misc_feature: MA Experiment 20000185 PARAMETER Experiment Name: At_Roots__P Parameter: Age (day) Value: 7 vs. 21
  misc_feature: MA Experiment 20000185 PARAMETER Experiment Name: At_Roots__P Parameter: Organism Value: A. thaliana
  misc_feature: MA Experiment 20000185 PARAMETER Experiment Name: At_Roots__P Parameter: Tissue Value: Roots vs. Whole Plant
  misc_feature: MA Experiment ID: 20000439 Result: Up-regulated in Transcription
  misc_feature: MA Experiment 20000439 PARAMETER Experiment Name: At_Roots__P Parameter: Age (day) Value: 14 vs. 21
  misc_feature: MA Experiment 20000439 PARAMETER Experiment Name: At_Roots__P Parameter: Organism Value: A. thaliana
  misc_feature: MA Experiment 20000439 PARAMETER Experiment Name: At_Roots__P Parameter: Tissue Value: Roots vs. Whole Plant
  misc_feature: MA Experiment ID: 20000495 Result: Down-regulated in Transcription
  misc_feature: MA Experiment 20000495 PARAMETER Experiment Name: At_Guard_Cells_P Parameter: Harvest Date Value: 8/2/2002
  misc_feature: MA Experiment 20000495 PARAMETER Experiment Name: At_Guard_Cells_P Parameter: Organism Value: A. thaliana
  misc_feature: MA Experiment 20000495 PARAMETER Experiment Name: At_Guard_Cells_P Parameter: Tissue Value: Guard Cells vs. Leaves
  misc_feature: MA Experiment ID: 20001560 Result: Down-regulated in Transcription
  misc_feature: MA Experiment 20001560 PARAMETER Experiment Name: At_Drought_Soil_Dry_P Parameter: Age (day) Value: 28
  misc_feature: MA Experiment 20001560 PARAMETER Experiment Name: At_Drought_Soil_Dry_P Parameter: Organism Value: A. thaliana
  misc_feature: MA Experiment 20001560 PARAMETER Experiment Name: At_Drought_Soil_Dry_P Parameter: Plant Line Value: WS
  misc_feature: MA Experiment 20001560 PARAMETER Experiment Name: At_Drought_Soil_Dry_P Parameter: Post Timepoint (hr) Value: None
  misc_feature: MA Experiment 20001560 PARAMETER Experiment Name: At_Drought_Soil_Dry_P Parameter: Post-Treatment Value: None
  misc_feature: MA Experiment 20001560 PARAMETER Experiment Name: At_Drought_Soil_Dry_P Parameter: Timepoint (day) Value: 14
  misc_feature: MA Experiment 20001560 PARAMETER Experiment Name: At_Drought_Soil_Dry_P Parameter: Treatment Value: Drought vs. No Drought
  misc_feature: Pfam Name: GATA Pfam Description: GATA zinc finger
acaatcagtctctttctctaaaccttcaccaatttctctctctctctctcttgcccttttacacagccatttgttagattcctctctcaataagcctctcttctcttttctattggagtttttgcattagactgattagctcaaagcaaaacccataaaccaaaatcttctctttgtgttcttgtttttttcatttctccaatttttctttgtggaggaggtttttcactttttgtttttctgggtttttattggctttcttctgcaaaaaccataactttattttttctgggtttttcttcgtaaagaagcttcccaaaacccagttttttgtataagctcaattagtagcaaacaagaaaaaacaatcttaaactcaatttcacaaaatctctgattcttgtgaaaatttgtatattgcaaaactttggaaaaaaaagagaaaaaagatggggaagcaaggtccttgctatcactgtggagttacaagtacacctctatggagaaacgggccaccagagaagccggtgttgtgcaatgcgtgtggttcgaggtggagaactaaaggatcattagtaaactacacacctcttcatgctcgtgctgaaggtgatgagactgagattgaggatcatagaactcaaacggtgatgattaagggaatgtctttgaacaaaaagattcccaagaggaaaccatatcaagaaaacttcacagtgaaaagagctaacttggaattccataccggtttcaagaggaaggctctggatgaagaagctagcaatagatcgagttcaggatcggttgtatcaaactccgagagctgtgcacaatctaatgcgtgggactcgacttttccttgtaagagaaggacatgtgtgggacgtccaaaggcagcttcttctgttgaaaagctcacaaaggatctttatactattctacaagaacagcaatcttcttgtctctctggtacttcagaggaagatttgctttttgagaatgaaacaccaatgctgttaggacatggtagtgttcttatgagagatcctcactcaggtgctcgagaagaggaatctgaagctagctcactcttagttgagagcagcaagtcttcatcagttcattctgttaaatttggtggaaaagcaatgaagcaggagcaagtgaagaggagcaaatctcaagtcttaggaagacatagttcactactctgtagcatagatttgaaggatgttttcaactttgatgagttcatagaaaatttcacagaggaagaacagcaaaaactgatgaaattacttcctcaagttgactctgttgatcgtcctgatagcctcagaagcatgtttgagagttctcaattcaaagagaacttatccttgtttcagcaacttgtggcagatggtgtttttgagacaaattcgtcttatgcaaaacttgaagacattaagacacttgcaaagcttgctttatcagatcctaacaaatcccatttgttggaaagctattacatgctcaagagaagagagattgaagactgtgttactacaacatcaagggtctcaagcttgagtccatcgaataataatagtcttgtaaccattgaaagaccttgtgaaagctt

SEQ ID NO: 74065 - protein, 391 aa, Arabidopsis thaliana
  peptide (1)..(391): Ceres Seq. ID no. 4992710
  misc_feature: Pfam Name: GATA Pfam Description: GATA zinc finger
  misc_feature (1)..(390): Homolog of NCBI NO: 22327632 NR Description: GATA zinc finger protein; protein id: At5g47140.1
  misc_feature (13)..(390): Homolog of NCBI NO: 8978081 NR Description: gene_id:K14A3.9~pir||D71445~similar to unknown
  misc_feature (1)..(222): Homolog of NCBI NO: 30684095 NR Description: GATA zinc finger protein [Arabidopsis thaliana]
  misc_feature (209)..(390): Homolog of NCBI NO: 30684095 NR Description: GATA zinc finger protein [Arabidopsis thaliana]
  misc_feature (40)..(222): Homolog of NCBI NO: 7485111 NR Description: hypothetical protein - Arabidopsis thaliana hypothetical protein [Arabidopsis thaliana]
  misc_feature (209)..(377): Homolog of NCBI NO: 7485111 NR Description: hypothetical protein - Arabidopsis thaliana hypothetical protein [Arabidopsis thaliana]
  misc_feature (1)..(231): Homolog of NCBI NO: 38345953 NR Description: OSJNBb0038F03.10 [Oryza sativa (japonica
MGKQGPCYHCGVTSTPLWRNGPPEKPVLCNACGSRWRTKGSLVNYTPLHARAEGDETEIEDHRTQTVMIKGMSLNKKIPKRKPYQENFTVKRANLEFHTGFKRKALDEEASNRSSSGSVVSNSESCAQSNAWDSTFPCKRRTCVGRPKAASSVEKLTKDLYTILQEQQSSCLSGTSEEDLLFENETPMLLGHGSVLMRDPHSGAREEESEASSLLVESSKSSSVHSVKFGGKAMKQEQVKRSKSQVLGRHSSLLCSIDLKDVFNFDEFIENFTEEEQQKLMKLLPQVDSVDRPDSLRSMFESSQFKENLSLFQQLVADGVFETNSSYAKLEDIKTLAKLALSDPNKSHLLESYYMLKRREIEDCVTTTSRVSSLSPSNNNSLVTIERPCES

SEQ ID NO: 74066 - protein, 324 aa, Arabidopsis thaliana
  peptide (1)..(324): Ceres Seq. ID no. 4992711
  misc_feature: Pfam Name: GATA Pfam Description: GATA zinc finger
  misc_feature (1)..(323): Homolog of NCBI NO: 22327632 NR Description: GATA zinc finger protein; protein id: At5g47140.1
  misc_feature (1)..(323): Homolog of NCBI NO: 8978081 NR Description: gene_id:K14A3.9~pir||D71445~similar to unknown
  misc_feature (1)..(155): Homolog of NCBI NO: 30684095 NR Description: GATA zinc finger protein [Arabidopsis thaliana]
  misc_feature (142)..(323): Homolog of NCBI NO: 30684095 NR Description: GATA zinc finger protein [Arabidopsis thaliana]
  misc_feature (1)..(155): Homolog of NCBI NO: 7485111 NR Description: hypothetical protein - Arabidopsis thaliana hypothetical protein [Arabidopsis thaliana]
  misc_feature (142)..(310): Homolog of NCBI NO: 7485111 NR Description: hypothetical protein - Arabidopsis thaliana hypothetical protein [Arabidopsis thaliana]
  misc_feature (1)..(164): Homolog of NCBI NO: 38345953 NR Description: OSJNBb0038F03.10 [Oryza sativa (japonica
MIKGMSLNKKIPKRKPYQENFTVKRANLEFHTGFKRKALDEEASNRSSSGSVVSNSESCAQSNAWDSTFPCKRRTCVGRPKAASSVEKLTKDLYTILQEQQSSCLSGTSEEDLLFENETPMLLGHGSVLMRDPHSGAREEESEASSLLVESSKSSSVHSVKFGGKAMKQEQVKRSKSQVLGRHSSLLCSIDLKDVFNFDEFIENFTEEEQQKLMKLLPQVDSVDRPDSLRSMFESSQFKENLSLFQQLVADGVFETNSSYAKLEDIKTLAKLALSDPNKSHLLESYYMLKRREIEDCVTTTSRVSSLSPSNNNSLVTIERPCES

SEQ ID NO: 74067 - protein, 320 aa, Arabidopsis thaliana
  peptide (1)..(320): Ceres Seq. ID no. 4992712
  misc_feature: Pfam Name: GATA Pfam Description: GATA zinc finger
  misc_feature (1)..(319): Homolog of NCBI NO: 22327632 NR Description: GATA zinc finger protein; protein id: At5g47140.1
  misc_feature (1)..(319): Homolog of NCBI NO: 8978081 NR Description: gene_id:K14A3.9~pir||D71445~similar to unknown
  misc_feature (1)..(151): Homolog of NCBI NO: 30684095 NR Description: GATA zinc finger protein [Arabidopsis thaliana]
  misc_feature (138)..(319): Homolog of NCBI NO: 30684095 NR Description: GATA zinc finger protein [Arabidopsis thaliana]
  misc_feature (1)..(151): Homolog of NCBI NO: 7485111 NR Description: hypothetical protein - Arabidopsis thaliana hypothetical protein [Arabidopsis thaliana]
  misc_feature (138)..(306): Homolog of NCBI NO: 7485111 NR Description: hypothetical protein - Arabidopsis thaliana hypothetical protein [Arabidopsis thaliana]
  misc_feature (1)..(160): Homolog of NCBI NO: 38345953 NR Description: OSJNBb0038F03.10 [Oryza sativa (japonica
MSLNKKIPKRKPYQENFTVKRANLEFHTGFKRKALDEEASNRSSSGSVVSNSESCAQSNAWDSTFPCKRRTCVGRPKAASSVEKLTKDLYTILQEQQSSCLSGTSEEDLLFENETPMLLGHGSVLMRDPHSGAREEESEASSLLVESSKSSSVHSVKFGGKAMKQEQVKRSKSQVLGRHSSLLCSIDLKDVFNFDEFIENFTEEEQQKLMKLLPQVDSVDRPDSLRSMFESSQFKENLSLFQQLVADGVFETNSSYAKLEDIKTLAKLALSDPNKSHLLESYYMLKRREIEDCVTTTSRVSSLSPSNNNSLVTIERPCES

SEQ ID NO: 74068 - DNA, 1027 bp, Arabidopsis thaliana
  misc_feature (1)..(1027): Ceres Seq. ID no. 4992809
  misc_feature: MA Experiment ID: 108461 Result: Up-regulated in Transcription
  misc_feature: MA Experiment 108461 PARAMETER Experiment Name: At_Germinating_Seeds_cDNA_P Parameter: Age (day) Value: 1 vs. 0
  misc_feature: MA Experiment 108461 PARAMETER Experiment Name: At_Germinating_Seeds_cDNA_P Parameter: Tissue Value: Germinating Seeds
  misc_feature: MA Experiment ID: 108462 Result: Up-regulated in Transcription
  misc_feature: MA Experiment 108462 PARAMETER Experiment Name: At_Germinating_Seeds_cDNA_P Parameter: Age (day) Value: 2 vs. 0
  misc_feature: MA Experiment 108462 PARAMETER Experiment Name: At_Germinating_Seeds_cDNA_P Parameter: Tissue Value: Germinating Seeds
  misc_feature: MA Experiment ID: 108463 Result: Up-regulated in Transcription
  misc_feature: MA Experiment 108463 PARAMETER Experiment Name: At_Germinating_Seeds_cDNA_P Parameter: Age (day) Value: 3 vs. 0
  misc_feature: MA Experiment 108463 PARAMETER Experiment Name: At_Germinating_Seeds_cDNA_P Parameter: Tissue Value: Germinating Seeds
  misc_feature: MA Experiment ID: 108464 Result: Up-regulated in Transcription
  misc_feature: MA Experiment 108464 PARAMETER Experiment Name: At_Germinating_Seeds_cDNA_P Parameter: Age (day) Value: 4 vs. 0
  misc_feature: MA Experiment 108464 PARAMETER Experiment Name: At_Germinating_Seeds_cDNA_P Parameter: Tissue Value: Germinating Seeds
  misc_feature: MA Experiment ID: 108501 Result: Up-regulated in Transcription
  misc_feature: MA Experiment 108501 PARAMETER Experiment Name: At_ap2_floral_buds_cDNA_P Parameter: Plant Line Value: ap2 (Ler.)
  misc_feature: MA Experiment 108501 PARAMETER Experiment Name: At_ap2_floral_buds_cDNA_P Parameter: Tissue Value: Closed Flower
  misc_feature: MA Experiment ID: 20000111 Result: Down-regulated in Transcription
  misc_feature: MA Experiment 20000111 PARAMETER Experiment Name: At_42deg_Heat_cDNA_P Parameter: Temperature (deg C) Value: 42 vs. 22
  misc_feature: MA Experiment 20000111 PARAMETER Experiment Name: At_42deg_Heat_cDNA_P Parameter: Timepoint (hr) Value: 6
  misc_feature: MA Experiment 20000111 PARAMETER Experiment Name: At_42deg_Heat_cDNA_P Parameter: Tissue Value: Aerial
  misc_feature: MA Experiment ID: 20000113 Result: Down-regulated in Transcription
  misc_feature: MA Experiment 20000113 PARAMETER Experiment Name: At_42deg_Heat_cDNA_P Parameter: Temperature (deg C) Value: 42 vs. 22
  misc_feature: MA Experiment 20000113 PARAMETER Experiment Name: At_42deg_Heat_cDNA_P Parameter: Timepoint (hr) Value: 8
  misc_feature: MA Experiment 20000113 PARAMETER Experiment Name: At_42deg_Heat_cDNA_P Parameter: Tissue Value: Aerial
  misc_feature: MA Experiment ID: 20000224 Result: Up-regulated in Transcription
  misc_feature: MA Experiment ID: 20000307 Result: Up-regulated in Transcription
  misc_feature: MA Experiment 20000307 PARAMETER Experiment Name: At_Germinating_Seeds_Sub_P Parameter: Age (hr) Value: 24 vs. 0
  misc_feature: MA Experiment 20000307 PARAMETER Experiment Name: At_Germinating_Seeds_Sub_P Parameter: Organism Value: A. thaliana
  misc_feature: MA Experiment 20000307 PARAMETER Experiment Name: At_Germinating_Seeds_Sub_P Parameter: Plant Line Value: WS
  misc_feature: MA Experiment 20000307 PARAMETER Experiment Name: At_Germinating_Seeds_Sub_P Parameter: Tissue Value: Germinating Seeds
  misc_feature: MA Experiment ID: 20000314 Result: Up-regulated in Transcription
  misc_feature: MA Experiment 20000314 PARAMETER Experiment Name: At_14day_Shoots-Roots_Sub_P Parameter: Age (day) Value: 14
  misc_feature: MA Experiment 20000314 PARAMETER Experiment Name: At_14day_Shoots-Roots_Sub_P Parameter: Organism Value: A. thaliana
  misc_feature: MA Experiment 20000314 PARAMETER Experiment Name: At_14day_Shoots-Roots_Sub_P Parameter: Plant Line Value: WS
  misc_feature: MA Experiment 20000314 PARAMETER Experiment Name: At_14day_Shoots-Roots_Sub_P Parameter: Tissue Value: Roots vs. Whole Plant
  misc_feature: MA Experiment ID: 20000328 Result: Down-regulated in Transcription
  misc_feature: MA Experiment 20000328 PARAMETER Experiment Name: At_42deg_Heat_Sub_P Parameter: Age (day) Value: 14
  misc_feature: MA Experiment 20000328 PARAMETER Experiment Name: At_42deg_Heat_Sub_P Parameter: Organism Value: A. thaliana
  misc_feature: MA Experiment 20000328 PARAMETER Experiment Name: At_42deg_Heat_Sub_P Parameter: Plant Line Value: WS
  misc_feature: MA Experiment 20000328 PARAMETER Experiment Name: At_42deg_Heat_Sub_P Parameter: Temperature (deg C) Value: 42 vs. 22
  misc_feature: MA Experiment 20000328 PARAMETER Experiment Name: At_42deg_Heat_Sub_P Parameter: Timepoint (hr) Value: 6
  misc_feature: MA Experiment 20000328 PARAMETER Experiment Name: At_42deg_Heat_Sub_P Parameter: Tissue Value: Aerial
  misc_feature: MA Experiment ID: 20000355 Result: Up-regulated in Transcription
  misc_feature: MA Experiment 20000355 PARAMETER Experiment Name: At_Siliques_Sub_P Parameter: Age (day) Value: 21
  misc_feature: MA Experiment 20000355 PARAMETER Experiment Name: At_Siliques_Sub_P Parameter: Organism Value: A. thaliana
  misc_feature: MA Experiment 20000355 PARAMETER Experiment Name: At_Siliques_Sub_P Parameter: Plant Line Value: WS
  misc_feature: MA Experiment 20000355 PARAMETER Experiment Name: At_Siliques_Sub_P Parameter: Tissue Value: Less Than 5mm Siliques vs. Whole Plant
  misc_feature: MA Experiment ID: 20000440 Result: Up-regulated in Transcription
  misc_feature: MA Experiment 20000440 PARAMETER Experiment Name: At_Closed-Flower__Sub_P Parameter: Tissue Value: Closed Flower vs. Whole Plant
atgacaaaatgtttgttttttgggtttggtctgaaacaggatggggtaccaacgagaagctgatcatatcaatactagctcacaggaacgcagcacaacgcagcttgatccgcagcgtttatgcagctacctacaatgaggatcttctcaaagcattagacaaagagctttctagcgactttgagagagctgtgatgttgtggactcttgatccaccagagagagatgcttatttggctaaagaatccaccaagatgttcaccaagaacaattgggttcttgttgaaatcgcttgcacaaggcctgctcttgagcttatcaaggtcaagcaagcttaccaagctcgatacaagaaatcaatcgaggaagatgtcgcgcaacacacatctggtgaccttcgtaagctcttgcttcctcttgtgagcactttcaggtatgaaggagatgatgtgaacatgatgcttgcaagatctgaagctaagatacttcacgagaaggtctcagagaaatcttacagtgacgatgacttcatcagaatcttgacaacaagaagcaaagcacagctcggtgcaacactcaaccactacaacaacgagtatggaaacgccattaacaagaacttgaaggaagagtcggacgacaatgactacatgaaactactaagagctgtaatcacatgtttgacataccctgagaagcattttgagaaggttcttcgtctatcaatcaacaaaatgggaacagacgaatggggactaacccgagtcgtgactacacgaactgaagttgacatggaacgcatcaaagaggaatatcagcgaagaaacagcattcctttggaccgtgctatcgccaaagacacttctggtgactatgaggacatgcttgttgctcttctcggacatggcgatgcttgaaactgtttcaactttcgagttcctcctttctcttactgcatggtttgttttaaataaaagagttgtgaaactggttctgcaactatttatcaatgatcgtttgagtttgt

SEQ ID NO: 74069 - protein, 304 aa, Arabidopsis thaliana
  peptide (1)..(304): Ceres Seq. ID no. 4992810
  misc_feature (155)..(223): Pfam Name: Annexin Pfam Description: Annexin
  misc_feature (12)..(304): Homolog of NCBI NO: 15238320 NR Description: annexin; protein id: At5g65020.1, supported by supported by cDNA: gi_4959107 [Arabidopsis thaliana]
  misc_feature (13)..(304): Homolog of NCBI NO: 15238105 NR Description: annexin -like protein; protein id: At5g10230.1,
  misc_feature (13)..(304): Homolog of NCBI NO: 12667522 NR Description: calcium-binding protein annexin 7 [Arabidopsis
  misc_feature (13)..(304): Homolog of NCBI NO: 15238094 NR Description: annexin -like protein; protein id: At5g10220.1,
  misc_feature (13)..(304): Homolog of NCBI NO: 12667518 NR Description: calcium-binding protein annexin 6 [Arabidopsis
  misc_feature (13)..(303): Homolog of NCBI NO: 7441509 NR Description: annexin - alfalfa (fragment)
  misc_feature (13)..(304): Homolog of NCBI NO: 7441511 NR Description: annexin 2 - upland cotton (fragment)
  misc_feature (13)..(304): Homolog of NCBI NO: 4580920 NR Description: vacuole-associated annexin VCaB42 [Nicotiana
  misc_feature (13)..(304): Homolog of NCBI NO: 3928134 NR Description: annexin P38 [Capsicum annuum]
  misc_feature (12)..(301): Homolog of NCBI NO: 7484723 NR Description: fiber annexin - upland cotton
DKMFVFWVWSETGWGTNEKLIISILAHRNAAQRSLIRSVYAATYNEDLLKALDKELSSDFERAVMLWTLDPPERDAYLAKESTKMFTKNNWVLVEIACTRPALELIKVKQAYQARYKKSIEEDVAQHTSGDLRKLLLPLVSTFRYEGDDVNMMLARSEAKILHEKVSEKSYSDDDFIRILTTRSKAQLGATLNHYNNEYGNAINKNLKEESDDNDYMKLLRAVITCLTYPEKHFEKVLRLSINKMGTDEWGLTRVVTTRTEVDMERIKEEYQRRNSIPLDRAIAKDTSGDYEDMLVALLGHGDA

SEQ ID NO: 74070 - protein, 302 aa, Arabidopsis thaliana
  peptide (1)..(302): Ceres Seq. ID no. 4992811
  misc_feature (153)..(221): Pfam Name: Annexin Pfam Description: Annexin
  misc_feature (10)..(302): Homolog of NCBI NO: 15238320 NR Description: annexin; protein id: At5g65020.1, supported by supported by cDNA: gi_4959107 [Arabidopsis thaliana]
  misc_feature (11)..(302): Homolog of NCBI NO: 15238105 NR Description: annexin -like protein; protein id: At5g10230.1,
  misc_feature (11)..(302): Homolog of NCBI NO: 12667522 NR Description: calcium-binding protein annexin 7 [Arabidopsis
  misc_feature (11)..(302): Homolog of NCBI NO: 15238094 NR Description: annexin -like protein; protein id: At5g10220.1,
  misc_feature (11)..(302): Homolog of NCBI NO: 12667518 NR Description: calcium-binding protein annexin 6 [Arabidopsis
  misc_feature (11)..(301): Homolog of NCBI NO: 7441509 NR Description: annexin - alfalfa (fragment)
  misc_feature (11)..(302): Homolog of NCBI NO: 7441511 NR Description: annexin 2 - upland cotton (fragment)
  misc_feature (11)..(302): Homolog of NCBI NO: 4580920 NR Description: vacuole-associated annexin VCaB42 [Nicotiana
  misc_feature (11)..(302): Homolog of NCBI NO: 3928134 NR Description: annexin P38 [Capsicum annuum]
  misc_feature (10)..(299): Homolog of NCBI NO: 7484723 NR Description: fiber annexin - upland cotton
MFVFWVWSETGWGTNEKLIISILAHRNAAQRSLIRSVYAATYNEDLLKALDKELSSDFERAVMLWTLDPPERDAYLAKESTKMFTKNNWVLVEIACTRPALELIKVKQAYQARYKKSIEEDVAQHTSGDLRKLLLPLVSTFRYEGDDVNMMLARSEAKILHEKVSEKSYSDDDFIRILTTRSKAQLGATLNHYNNEYGNAINKNLKEESDDNDYMKLLRAVITCLTYPEKHFEKVLRLSINKMGTDEWGLTRVVTTRTEVDMERIKEEYQRRNSIPLDRAIAKDTSGDYEDMLVALLGHGDA

SEQ ID NO: 74071 - protein, 240 aa, Arabidopsis thaliana; identical to SEQ ID NO: 26097
  peptide (1)..(240): Ceres Seq. ID no. 4992812
  misc_feature (91)..(159): Pfam Name: Annexin Pfam Description: Annexin
  misc_feature (1)..(240): Homolog of NCBI NO: 15238320 NR Description: annexin; protein id: At5g65020.1, supported by supported by cDNA: gi_4959107 [Arabidopsis thaliana]
  misc_feature (1)..(240): Homolog of NCBI NO: 15238105 NR Description: annexin -like protein; protein id: At5g10230.1,
  misc_feature (1)..(240): Homolog of NCBI NO: 12667522 NR Description: calcium-binding protein annexin 7 [Arabidopsis
  misc_feature (1)..(240): Homolog of NCBI NO: 15238094 NR Description: annexin -like protein; protein id: At5g10220.1,
  misc_feature (1)..(240): Homolog of NCBI NO: 12667518 NR Description: calcium-binding protein annexin 6 [Arabidopsis
  misc_feature (1)..(239): Homolog of NCBI NO: 7441509 NR Description: annexin - alfalfa (fragment)
  misc_feature (1)..(240): Homolog of NCBI NO: 7441511 NR Description: annexin 2 - upland cotton (fragment)
  misc_feature (1)..(240): Homolog of NCBI NO: 4580920 NR Description: vacuole-associated annexin VCaB42 [Nicotiana
  misc_feature (1)..(240): Homolog of NCBI NO: 3928134 NR Description: annexin P38 [Capsicum annuum]
  misc_feature (1)..(237): Homolog of NCBI NO: 7484723 NR Description: fiber annexin - upland cotton

SEQ ID NO: 74072 - DNA, 887 bp, Arabidopsis thaliana
  misc_feature (1)..(887): Ceres Seq. ID no. 4992853
  misc_feature: MA Experiment ID: 108434 Result: Down-regulated in Transcription
  misc_feature: MA Experiment 108434 PARAMETER Experiment Name: At_Root_Tips_cDNA_P Parameter: Tissue Value: Root Tips
  misc_feature: MA Experiment ID: 108463 Result: Up-regulated in Transcription
  misc_feature: MA Experiment 108463 PARAMETER Experiment Name: At_Germinating_Seeds_cDNA_P Parameter: Age (day) Value: 3 vs. 0
  misc_feature: MA Experiment 108463 PARAMETER Experiment Name: At_Germinating_Seeds_cDNA_P Parameter: Tissue Value: Germinating Seeds
  misc_feature: MA Experiment ID: 108464 Result: Up-regulated in Transcription
  misc_feature: MA Experiment 108464 PARAMETER Experiment Name: At_Germinating_Seeds_cDNA_P Parameter: Age (day) Value: 4 vs. 0
  misc_feature: MA Experiment 108464 PARAMETER Experiment Name: At_Germinating_Seeds_cDNA_P Parameter: Tissue Value: Germinating Seeds
  misc_feature: MA Experiment ID: 108469 Result: Up-regulated in Transcription
  misc_feature: MA Experiment ID: 108573 Result: Up-regulated in Transcription
  misc_feature: MA Experiment 108573 PARAMETER Experiment Name: At_Drought_cDNA_P Parameter: Timepoint (hr) Value: 6
  misc_feature: MA Experiment 108573 PARAMETER Experiment Name: At_Drought_cDNA_P Parameter: Tissue Value: Aerial
  misc_feature: MA Experiment 108573 PARAMETER Experiment Name: At_Drought_cDNA_P Parameter: Treatment Value: Drought vs. No Drought
  misc_feature: MA Experiment ID: 108579 Result: Up-regulated in Transcription
  misc_feature: MA Experiment 108579 PARAMETER Experiment Name: At_4deg_Cold_cDNA_P Parameter: Temperature (deg C) Value: 4 vs. 22
  misc_feature: MA Experiment 108579 PARAMETER Experiment Name: At_4deg_Cold_cDNA_P Parameter: Timepoint (hr) Value: 6
  misc_feature: MA Experiment 108579 PARAMETER Experiment Name: At_4deg_Cold_cDNA_P Parameter: Tissue Value: Aerial
  misc_feature: MA Experiment ID: 108667 Result: Up-regulated in Transcription
  misc_feature: MA Experiment 108667 PARAMETER Experiment Name: At_2mM_SA_cDNA_P Parameter: Plant Line Value: WS
  misc_feature: MA Experiment 108667 PARAMETER Experiment Name: At_2mM_SA_cDNA_P Parameter: Timepoint (hr) Value: 1
  misc_feature: MA Experiment 108667 PARAMETER Experiment Name: At_2mM_SA_cDNA_P Parameter: Treatment Value: 2mM SA vs. No Treatment
  misc_feature: MA Experiment ID: 108668 Result: Up-regulated in Transcription
  misc_feature: MA Experiment 108668 PARAMETER Experiment Name: At_2mM_SA_cDNA_P Parameter: Plant Line Value: WS
  misc_feature: MA Experiment 108668 PARAMETER Experiment Name: At_2mM_SA_cDNA_P Parameter: Timepoint (hr) Value: 6
  misc_feature: MA Experiment 108668 PARAMETER Experiment Name: At_2mM_SA_cDNA_P Parameter: Treatment Value: 2mM SA vs. No Treatment
  misc_feature: MA Experiment ID: 20000069 Result: Up-regulated in Transcription
  misc_feature: MA Experiment 20000069 PARAMETER Experiment Name: At_100uM_ABA_Mutants_cDNA_P Parameter: Plant Line Value: CS23
  misc_feature: MA Experiment 20000069 PARAMETER Experiment Name: At_100uM_ABA_Mutants_cDNA_P Parameter: Timepoint (hr) Value: 6
  misc_feature: MA Experiment 20000069 PARAMETER Experiment Name: At_100uM_ABA_Mutants_cDNA_P Parameter: Tissue Value: Aerial
  misc_feature: MA Experiment 20000069 PARAMETER Experiment Name: At_100uM_ABA_Mutants_cDNA_P Parameter: Treatment Value: 100uM ABA vs. No Treatment
  misc_feature: MA Experiment ID: 20000071 Result: Up-regulated in Transcription
  misc_feature: MA Experiment 20000071 PARAMETER Experiment Name: At_100uM_ABA_Mutants_cDNA_P Parameter: Plant Line Value: CS8104
  misc_feature: MA Experiment 20000071 PARAMETER Experiment Name: At_100uM_ABA_Mutants_cDNA_P Parameter: Timepoint (hr) Value: 6
  misc_feature: MA Experiment 20000071 PARAMETER Experiment Name: At_100uM_ABA_Mutants_cDNA_P Parameter: Tissue Value: Aerial
  misc_feature: MA Experiment 20000071 PARAMETER Experiment Name: At_100uM_ABA_Mutants_cDNA_P Parameter: Treatment Value: 100uM ABA vs. No Treatment
  misc_feature: MA Experiment ID: 20000072 Result: Up-regulated in Transcription
  misc_feature: MA Experiment 20000072 PARAMETER Experiment Name: At_100uM_ABA_Mutants_cDNA_P Parameter: Plant Line Value: CS8105
  misc_feature: MA Experiment 20000072 PARAMETER Experiment Name: At_100uM_ABA_Mutants_cDNA_P Parameter: Timepoint (hr) Value: 6
  misc_feature: MA Experiment 20000072 PARAMETER Experiment Name: At_100uM_ABA_Mutants_cDNA_P Parameter: Tissue Value: Aerial
  misc_feature: MA Experiment 20000072 PARAMETER Experiment Name: At_100uM_ABA_Mutants_cDNA_P Parameter: Treatment Value: 100uM ABA vs. No Treatment
  misc_feature: MA Experiment ID: 20000112 Result: Up-regulated in Transcription
  misc_feature: MA Experiment 20000112 PARAMETER Experiment Name: At_42deg_Heat_cDNA_P Parameter: Temperature (deg C) Value: 42 vs. 22
  misc_feature: MA Experiment 20000112 PARAMETER Experiment Name: At_42deg_Heat_cDNA_P Parameter: Timepoint (hr) Value: 2
  misc_feature: MA Experiment 20000112 PARAMETER Experiment Name: At_42deg_Heat_cDNA_P Parameter: Tissue Value: Aerial
  misc_feature: MA Experiment ID: 20000117 Result: Up-regulated in Transcription
  misc_feature: MA Experiment 20000117 PARAMETER Experiment Name: At_100uM_ABA_Mutants_cDNA_P Parameter: Plant Line Value: Columbia
  misc_feature: MA Experiment 20000117 PARAMETER Experiment Name: At_100uM_ABA_Mutants_cDNA_P Parameter: Timepoint (hr) Value: 6
  misc_feature: MA Experiment 20000117 PARAMETER Experiment Name: At_100uM_ABA_Mutants_cDNA_P Parameter: Tissue Value: Aerial
  misc_feature: MA Experiment 20000117 PARAMETER Experiment Name: At_100uM_ABA_Mutants_cDNA_P Parameter: Treatment Value: 100uM ABA vs. No Treatment
  misc_feature: MA Experiment ID: 20000182 Result: Up-regulated in Transcription
  misc_feature: MA Experiment 20000182 PARAMETER Experiment Name: At_2mM_SA_P Parameter: Age (day) Value: 14
  misc_feature: MA Experiment 20000182 PARAMETER Experiment Name: At_2mM_SA_P Parameter: Organism Value: A. thaliana
  misc_feature: MA Experiment 20000182 PARAMETER Experiment Name: At_2mM_SA_P Parameter: Plant Line Value: WS
  misc_feature: MA Experiment 20000182 PARAMETER Experiment Name: At_2mM_SA_P Parameter: Timepoint (hr) Value: 6
  misc_feature: MA Experiment 20000182 PARAMETER Experiment Name: At_2mM_SA_P Parameter: Tissue Value: Aerial
  misc_feature: MA Experiment 20000182 PARAMETER Experiment Name: At_2mM_SA_P Parameter: Treatment Value: 2mM SA vs. No Treatment
  misc_feature: MA Experiment ID: 20000184 Result: Down-regulated in Transcription
  misc_feature: MA Experiment 20000184 PARAMETER Experiment Name: At_Shoots__P Parameter: Age (day) Value: 7
  misc_feature: MA Experiment 20000184 PARAMETER Experiment Name: At_Shoots__P Parameter: Tissue Value: Shoots vs. Whole Plant
  misc_feature: MA Experiment ID: 20000213 Result: Up-regulated in Transcription
  misc_feature: MA Experiment 20000213 PARAMETER Experiment Name: At_4deg_Cold_P Parameter: Timepoint (hr) Value: 2
  misc_feature: MA Experiment ID: 20000234 Result: Down-regulated in Transcription
  misc_feature: MA Experiment 20000234 PARAMETER Experiment Name: At_Siliques_P Parameter: Age (day) Value: 21
  misc_feature: MA Experiment 20000234 PARAMETER Experiment Name: At_Siliques_P Parameter: Organism Value: A. thaliana
  misc_feature: MA Experiment 20000234 PARAMETER Experiment Name: At_Siliques_P Parameter: Plant Line Value: WS
  misc_feature: MA Experiment 20000234 PARAMETER Experiment Name: At_Siliques_P Parameter: Tissue Value: Less Than 5mm Siliques vs. Whole Plant
  misc_feature: MA Experiment ID: 20000265 Result: Down-regulated in Transcription
  misc_feature: MA Experiment 20000265 PARAMETER Experiment Name: At_Open_Flower_P Parameter: Age (day) Value: 21
  misc_feature: MA Experiment 20000265 PARAMETER Experiment Name: At_Open_Flower_P Parameter: Plant Line Value: WS
  misc_feature: MA Experiment 20000265 PARAMETER Experiment Name: At_Open_Flower_P Parameter: Tissue Value: Closed Flower vs. Whole Plant
  misc_feature: MA Experiment ID: 20000286 Result: Down-regulated in Transcription
  misc_feature: MA Experiment 20000286 PARAMETER Experiment Name: At_Open_Flower_P Parameter: Age (day) Value: 21
  misc_feature: MA Experiment 20000286 PARAMETER Experiment Name: At_Open_Flower_P Parameter: Plant Line Value: WS
  misc_feature: MA Experiment 20000286 PARAMETER Experiment Name: At_Open_Flower_P Parameter: Tissue Value: Half Open vs. Whole Plant
  misc_feature: MA Experiment ID: 20000436 Result: Up-regulated in Transcription
  misc_feature: MA Experiment 20000436 PARAMETER Experiment Name: At_Drought_P Parameter: Age (day) Value: 7
  misc_feature: MA Experiment 20000436 PARAMETER Experiment Name: At_Drought_P Parameter: Organism Value: A. thaliana
  misc_feature: MA Experiment 20000436 PARAMETER Experiment Name: At_Drought_P Parameter: Plant Line Value: WS
  misc_feature: MA Experiment 20000436 PARAMETER Experiment Name: At_Drought_P Parameter: Timepoint (hr) Value: 12
  misc_feature: MA Experiment 20000436 PARAMETER Experiment Name: At_Drought_P Parameter: Tissue Value: Whole Plant
  misc_feature: MA Experiment 20000436 PARAMETER Experiment Name: At_Drought_P Parameter: Treatment Value: Drought vs. No Drought
  misc_feature: MA Experiment ID: 20000437 Result: Up-regulated in Transcription
  misc_feature: MA Experiment 20000437 PARAMETER Experiment Name: At_Drought_P Parameter: Age (day) Value: 8
  misc_feature: MA Experiment 20000437 PARAMETER Experiment Name: At_Drought_P Parameter: Organism Value: A. thaliana
  misc_feature: MA Experiment 20000437 PARAMETER Experiment Name: At_Drought_P Parameter: Plant Line Value: WS
  misc_feature: MA Experiment 20000437 PARAMETER Experiment Name: At_Drought_P Parameter: Timepoint (hr) Value: 24
  misc_feature: MA Experiment 20000437 PARAMETER Experiment Name: At_Drought_P Parameter: Tissue Value: Whole Plant
  misc_feature: MA Experiment 20000437 PARAMETER Experiment Name: At_Drought_P Parameter: Treatment Value: Drought vs. No Drought
  misc_feature: MA Experiment ID: 20000438 Result: Down-regulated in Transcription
  misc_feature: MA Experiment 20000438 PARAMETER Experiment Name: At_Shoots__P Parameter: Age (day) Value: 14
  misc_feature: MA Experiment 20000438 PARAMETER Experiment Name: At_Shoots__P Parameter: Tissue Value: Shoots vs. Whole Plant
  misc_feature: MA Experiment ID: 20000460 Result: Up-regulated in Transcription
  misc_feature: MA Experiment 20000460 PARAMETER Experiment Name: At_10percent_PEG_P Parameter: Age (day) Value: 12
  misc_feature: MA Experiment 20000460 PARAMETER Experiment Name: At_10percent_PEG_P Parameter: Organism Value: A. thaliana
  misc_feature: MA Experiment 20000460 PARAMETER Experiment Name: At_10percent_PEG_P Parameter: Plant Line Value: WS
  misc_feature: MA Experiment 20000460 PARAMETER Experiment Name: At_10percent_PEG_P Parameter: Timepoint (day) Value: 12
  misc_feature: MA Experiment 20000460 PARAMETER Experiment Name: At_10percent_PEG_P Parameter: Tissue Value: Whole Plant
  misc_feature: MA Experiment 20000460 PARAMETER Experiment Name: At_10percent_PEG_P Parameter: Treatment Value: 10percent PEG vs. No Treatment
  misc_feature: MA Experiment ID: 20000527 Result: Up-regulated in Transcription
  misc_feature: MA Experiment 20000527 PARAMETER Experiment Name: At_10percent_PEG_P Parameter: Age (day) Value: 20
  misc_feature: MA Experiment 20000527 PARAMETER Experiment Name: At_10percent_PEG_P Parameter: Organism Value: A. thaliana
  misc_feature: MA Experiment 20000527 PARAMETER Experiment Name: At_10percent_PEG_P Parameter: Plant Line Value: WS
  misc_feature: MA Experiment 20000527 PARAMETER Experiment Name: At_10percent_PEG_P Parameter: Timepoint (day) Value: 20
  misc_feature: MA Experiment 20000527 PARAMETER Experiment Name: At_10percent_PEG_P Parameter: Tissue Value: Whole Plant
  misc_feature: MA Experiment 20000527 PARAMETER Experiment Name: At_10percent_PEG_P Parameter: Treatment Value: 10percent PEG vs. No Treatment
  misc_feature: MA Experiment ID: 20000794 Result: Down-regulated in Transcription
  misc_feature: MA Experiment 20000794 PARAMETER Experiment Name: At_Petals_P Parameter: Age (day) Value: 23-25 days
  misc_feature: MA Experiment 20000794 PARAMETER Experiment Name: At_Petals_P Parameter: Plant Line Value: WS
  misc_feature: MA Experiment 20000794 PARAMETER Experiment Name: At_Petals_P Parameter: Tissue Value: Petals vs. Whole plant
  misc_feature: MA Experiment ID: 20001905 Result: Up-regulated in Transcription
  misc_feature: MA Experiment 20001905 PARAMETER Experiment Name: At_Drought_Reproduction_P Parameter: Age (day) Value: 40
  misc_feature: MA Experiment 20001905 PARAMETER Experiment Name: At_Drought_Reproduction_P Parameter: Organism Value: A. thaliana
  misc_feature: MA Experiment 20001905 PARAMETER Experiment Name: At_Drought_Reproduction_P Parameter: Plant Line Value: WS
  misc_feature: MA Experiment 20001905 PARAMETER Experiment Name: At_Drought_Reproduction_P Parameter: Timepoint (day) Value: 10
  misc_feature: MA Experiment 20001905 PARAMETER Experiment Name: At_Drought_Reproduction_P Parameter: Tissue Value: Rosettes
  misc_feature: MA Experiment 20001905 PARAMETER Experiment Name: At_Drought_Reproduction_P Parameter: Treatment Value: Drought vs. No Drought
aaaggttccttgtttttccagacaaagaaaacacaaattcattccctcctcctcttcatctcttttgcagatatggatggttattattctctgtctcccatctctgtcctccaccggattaaagattccttccatttcgccgtctctgcccttctcgccaacctcttctccgctctcttcaccttcttcttcgctttaggggctttgatcggccaagaaacagagagcggtttcatcagaggagccgccgttggtgctatctcaggcgccgtcttctccatcgaagtctttgaatcttccctcctcctttggcaatccgatgagtctggaattggatgccttctctacttgccttttgagcgggaggcttgttcgtgagcgtatcggtcctgcaatgctaagtgccgtccagagtcagatgggagctgtggagtcccagttccaagatcatacagacatctttgacactgccatttcaaagggtctcactggggactctctcaacaggatccctaaggtccgaatcacagacacctctccggagattgtctcttgctctgtctgccttcaggactttcaggtgggagagacagttagaagtttgccgcactgccatcatatgttccacctaccatgcatcgacaaatggcttcgcaggcatgcttcttgtcccttgtgcagaagacatctttgaattgattttgaactcttctttcttctcttctttgtacatgaggtataggcatacacacacacacatatatacacactagtagtcttccttgattttttttagattacacgttacacagattttgatgcaccaatcattgtaacttcactcatctcttggagatcctgtttatttatgctacttattcttggct

SEQ ID NO: 74073 - protein, 125 aa, Arabidopsis thaliana
  peptide (1)..(125): Ceres Seq. ID no. 4992854
  misc_feature (25)..(117): Homolog of NCBI NO: 15239242 NR Description: putative protein; protein id: At5g66070.1 thaliana] >gi|10177122|dbj|BAB10412.1| contains similarity to
  misc_feature (21)..(117): Homolog of NCBI NO: 26452210 NR Description: unknown protein [Arabidopsis thaliana]
  misc_feature (21)..(117): Homolog of NCBI NO: 30680091 NR Description: expressed protein [Arabidopsis thaliana]
  misc_feature (21)..(117): Homolog of NCBI NO: 25411815 NR Description: hypothetical protein At2g17730 [imported] -
  misc_feature (37)..(117): Homolog of NCBI NO: 26451101 NR Description: unknown protein [Arabidopsis thaliana]
  misc_feature (37)..(117): Homolog of NCBI NO: 27524902 NR Description: NEP1-interacting protein [Arabidopsis thaliana]
  misc_feature (43)..(117): Homolog of NCBI NO: 7485279 NR Description: hypothetical protein A_TM017A05.9 - Arabidopsis
  misc_feature (21)..(102): Homolog of NCBI NO: 7485279 NR Description: hypothetical protein A_TM017A05.9 - Arabidopsis
  misc_feature (50)..(117): Homolog of NCBI NO: 37536572 NR Description: hypothetical protein [Oryza sativa (japonica group)] >gi|13357247|gb|AAK20044.1| hypothetical protein [Oryza
  misc_feature (51)..(117): Homolog of NCBI NO: 18855037 NR Description: putative zinc finger protein [Oryza sativa]
KGSLFFQTKKTQIHSLLLFISFADMDGYYSLSPISVLHRIKDSFHFAVSALLANLFSALFTFFFALGALIGQETESGFIRGAAVGAISGAVFSIEVFESSLLLWQSDESGIGCLLYLPFEREACS

SEQ ID NO: 74074 - protein, 124 aa, Arabidopsis thaliana; identical to SEQ ID NO: 42599
  peptide (1)..(124): Ceres Seq. ID no. 4992855
  misc_feature (79)..(120): Pfam Name: Zinc finger, C3HC4 type (RING finger) Pfam Description: Zinc finger, C3HC4 type (RING finger)
  misc_feature (5)..(124): Homolog of NCBI NO: 15239242 NR Description: putative protein; protein id: At5g66070.1 thaliana] >gi|10177122|dbj|BAB10412.1| contains similarity to
  misc_feature (1)..(124): Homolog of NCBI NO: 26452210 NR Description: unknown protein [Arabidopsis thaliana]
  misc_feature (1)..(124): Homolog of NCBI NO: 30680091 NR Description: expressed protein [Arabidopsis thaliana]
  misc_feature (1)..(119): Homolog of NCBI NO: 25411815 NR Description: hypothetical protein At2g17730 [imported] -
  misc_feature (1)..(124): Homolog of NCBI NO: 26451101 NR Description: unknown protein [Arabidopsis thaliana]
  misc_feature (1)..(124): Homolog of NCBI NO: 27524902 NR Description: NEP1-interacting protein [Arabidopsis thaliana]
  misc_feature (1)..(119): Homolog of NCBI NO: 7485279 NR Description: hypothetical protein A_TM017A05.9 - Arabidopsis
  misc_feature (5)..(124): Homolog of NCBI NO: 37536572 NR Description: hypothetical protein [Oryza sativa (japonica group)] >gi|13357247|gb|AAK20044.1| hypothetical protein [Oryza
  misc_feature (12)..(124): Homolog of NCBI NO: 18855037 NR Description: putative zinc finger protein [Oryza sativa]
  misc_feature (5)..(124): Homolog of NCBI NO: 34901682 NR Description: P0434A03.5 [Oryza sativa (japonica

SEQ ID NO: 74075 - protein, 101 aa, Arabidopsis thaliana; identical to SEQ ID NO: 42600
  peptide (1)..(101): Ceres Seq. ID no. 4992856
  misc_feature (1)..(93): Homolog of NCBI NO: 15239242 NR Description: putative protein; protein id: At5g66070.1 thaliana] >gi|10177122|dbj|BAB10412.1| contains similarity to
  misc_feature (1)..(93): Homolog of NCBI NO: 26452210 NR Description: unknown protein [Arabidopsis thaliana]
  misc_feature (1)..(93): Homolog of NCBI NO: 30680091 NR Description: expressed protein [Arabidopsis thaliana]
  misc_feature (1)..(93): Homolog of NCBI NO: 25411815 NR Description: hypothetical protein At2g17730 [imported] -
  misc_feature (13)..(93): Homolog of NCBI NO: 26451101 NR Description: unknown protein [Arabidopsis thaliana]
  misc_feature (13)..(93): Homolog of NCBI NO: 27524902 NR Description: NEP1-interacting protein [Arabidopsis thaliana]
  misc_feature (19)..(93): Homolog of NCBI NO: 7485279 NR Description: hypothetical protein A_TM017A05.9 - Arabidopsis
  misc_feature (1)..(78): Homolog of NCBI NO: 7485279 NR Description: hypothetical protein A_TM017A05.9 - Arabidopsis
  misc_feature (26)..(93): Homolog of NCBI NO: 37536572 NR Description: hypothetical protein [Oryza sativa (japonica group)] >gi|13357247|gb|AAK20044.1| hypothetical protein [Oryza
  misc_feature (27)..(93): Homolog of NCBI NO: 18855037 NR Description: putative zinc finger protein [Oryza sativa]

SEQ ID NO: 74076 - DNA, 1251 bp, Arabidopsis thaliana
  misc_feature (1)..(1251): Ceres Seq. ID no. 4993070
  misc_feature: MA Experiment ID: 20000307 Result: Up-regulated in Transcription
  misc_feature: MA Experiment 20000307 PARAMETER Experiment Name: At_Germinating_Seeds_Sub_P Parameter: Age (hr) Value: 24 vs. 0
  misc_feature: MA Experiment 20000307 PARAMETER Experiment Name: At_Germinating_Seeds_Sub_P Parameter: Organism Value: A. thaliana
  misc_feature: MA Experiment 20000307 PARAMETER Experiment Name: At_Germinating_Seeds_Sub_P Parameter: Plant Line Value: WS
  misc_feature: MA Experiment 20000307 PARAMETER Experiment Name: At_Germinating_Seeds_Sub_P Parameter: Tissue Value: Germinating Seeds
  misc_feature: MA Experiment ID: 20000347 Result: Down-regulated in Transcription
  misc_feature: MA Experiment 20000347 PARAMETER Experiment Name: At_2mM_SA_Sub_P Parameter: Age (day) Value: 14
  misc_feature: MA Experiment 20000347 PARAMETER Experiment Name: At_2mM_SA_Sub_P Parameter: Organism Value: A. thaliana
  misc_feature: MA Experiment 20000347 PARAMETER Experiment Name: At_2mM_SA_Sub_P Parameter: Plant Line Value: WS
  misc_feature: MA Experiment 20000347 PARAMETER Experiment Name: At_2mM_SA_Sub_P Parameter: Timepoint (hr) Value: 6
  misc_feature: MA Experiment 20000347 PARAMETER Experiment Name: At_2mM_SA_Sub_P Parameter: Tissue Value: Aerial
  misc_feature: MA Experiment 20000347 PARAMETER Experiment Name: At_2mM_SA_Sub_P Parameter: Treatment Value: 2mM SA vs. No Treatment
atgggaactggaagctcagagaattatctcaatttcgacataaagaatgctcctttcgatgtttatagaacagaacgtggtggtgaagttacttatcatggtcctggtcagcttgaggaagtagttattcgtgttctttcttcggctttcgccatcaatgcttctcgtctcgacggttttactggagtttgggttggcaacaaaaaaatggcggcgataggtattcgtgtgtcgaaatggatgacatatcatggtctagctcttaatgttacaacagatttaacaccctttaactccatagttccatgtgggataaggaaccgtggggttggaagcgtaaagggtttgattgaggatggagaacattataataagcttgaagatttgcagttgttagatatagctcatgagtcgttactaaaggaattctctgaagtttttcagcttcagatggaaaagcaaacaagatttgatttctctatttctctctccaaagaaagcttatctgcttcttggattgaccacaaagggatggctctggaagctgctttctccatgagtttttgctccttctctgtccctaaagcaatcttctgtgagagagaaacttcatcttttcaacgaatcacctcgagagcaaagggaattgcgggtgagagtcaagttcaaagctctgatggagttgagactcaagtcaaggaaacttctcccaaagtatttgataaactgcctgaaagaaatttagatacttggagcggtggcagagaaacagcaagaggactttcaggttcagtagtaagaaacactgtacgaaaagatactactttacgacatatctcaccttctagtcattcaacaaaggttagaggagataagccagagatttcagggggtgagaagaaagctattgtagatagaagcaaggcctacgtaaagctgaaatctttagggaaagaagtgagagacgcaggctatgtaccagagactaagtatgttcttcacgacattgatgaagaagctaaagagaaagccttgatgcatcatagtgaacggttagctattgctttcgggattataaacactcctccagggacgacaataagggtgatgaagaatctgaggatatgtggagattgccataacttcataaagatattatcgagtatcgaagatagagagatcattgtaagagataacaagaggttccatcattttagagatggtaactgctcttgtggagattattggtag

SEQ ID NO: 74077 - protein, 416 aa, Arabidopsis thaliana
  peptide (1)..(416): Ceres Seq. ID no. 4993071
  misc_feature (369)..(398): Pfam Name: PPR repeat Pfam Description: PPR repeat
  misc_feature (1)..(416): Homolog of NCBI NO: 15220259 NR Description: hypothetical protein; protein id: At1g47580.1
  misc_feature (156)..(416): Homolog of NCBI NO: 25405224 NR Description: F16N3.14 [imported] - Arabidopsis thaliana
  misc_feature (1)..(38): Homolog of NCBI NO: 25405224 NR Description: F16N3.14 [imported] - Arabidopsis thaliana
  misc_feature (37)..(302): Homolog of NCBI NO: 25405224 NR Description: F16N3.14 [imported] - Arabidopsis thaliana
  misc_feature (38)..(161): Homolog of NCBI NO: 18417727 NR Description: putative protein; protein id: At4g31050.1, by cDNA: gi_15887051 [Arabidopsis thaliana]
  misc_feature (1)..(38): Homolog of NCBI NO: 18417727 NR Description: putative protein; protein id: At4g31050.1, by cDNA: gi_15887051 [Arabidopsis thaliana]
  misc_feature (306)..(416): Homolog of NCBI NO: 31415922 NR Description: hypothetical protein [Oryza sativa (japonica
  misc_feature (241)..(416): Homolog of NCBI NO: 38347147 NR Description: OSJNBa0039G19.7 [Oryza sativa (japonica
  misc_feature (243)..(416): Homolog of NCBI NO: 18397896 NR Description: Expressed protein; protein id: At2g15690.1, by cDNA: gi_14335135 [Arabidopsis thaliana] At2g15690/F9O13.24 [Arabidopsis thaliana]
  misc_feature (243)..(416): Homolog of NCBI NO: 25411656 NR Description: hypothetical protein At2g15690 [imported] -
MGTGSSENYLNFDIKNAPFDVYRTERGGEVTYHGPGQLEEVVIRVLSSAFAINASRLDGFTGVWVGNKKMAAIGIRVSKWMTYHGLALNVTTDLTPFNSIVPCGIRNRGVGSVKGLIEDGEHYNKLEDLQLLDIAHESLLKEFSEVFQLQMEKQTRFDFSISLSKESLSASWIDHKGMALEAAFSMSFCSFSVPKAIFCERETSSFQRITSRAKGIAGESQVQSSDGVETQVKETSPKVFDKLPERNLDTWSGGRETARGLSGSVVRNTVRKDTTLRHISPSSHSTKVRGDKPEISGGEKKAIVDRSKAYVKLKSLGKEVRDAGYVPETKYVLHDIDEEAKEKALMHHSERLAIAFGIINTPPGTTIRVMKNLRICGDCHNFIKILSSIEDREIIVRDNKRFHHFRDGNCSCGDYW

SEQ ID NO: 74078 - protein, 347 aa, Arabidopsis thaliana
  peptide (1)..(347): Ceres Seq. ID no. 4993072
  misc_feature (300)..(329): Pfam Name: PPR repeat Pfam Description: PPR repeat
  misc_feature (1)..(347): Homolog of NCBI NO: 15220259 NR Description: hypothetical protein; protein id: At1g47580.1
  misc_feature (87)..(347): Homolog of NCBI NO: 25405224 NR Description: F16N3.14 [imported] - Arabidopsis thaliana
  misc_feature (1)..(233): Homolog of NCBI NO: 25405224 NR Description: F16N3.14 [imported] - Arabidopsis thaliana
  misc_feature (1)..(92): Homolog of NCBI NO: 18417727 NR Description: putative protein; protein id: At4g31050.1, by cDNA: gi_15887051 [Arabidopsis thaliana]
  misc_feature (237)..(347): Homolog of NCBI NO: 31415922 NR Description: hypothetical protein [Oryza sativa (japonica
  misc_feature (172)..(347): Homolog of NCBI NO: 38347147 NR Description: OSJNBa0039G19.7 [Oryza sativa (japonica
  misc_feature (174)..(347): Homolog of NCBI NO: 18397896 NR Description: Expressed protein; protein id: At2g15690.1, by cDNA: gi_14335135 [Arabidopsis thaliana] At2g15690/F9O13.24 [Arabidopsis thaliana]
  misc_feature (174)..(347): Homolog of NCBI NO: 25411656 NR Description: hypothetical protein At2g15690 [imported] -
  misc_feature (1)..(104): Homolog of NCBI NO: 25407707 NR Description: hypothetical protein AT4g31060 [imported] - thaliana >gi|2980760|emb|CAA18187.1| putative protein thaliana] >gi|7270008|emb|CAB79824.1| putative protein
  misc_feature (203)..(347): Homolog of NCBI NO: 37536510 NR Description: hypothetical protein [Oryza sativa (japonica group)] >gi|12039323|gb|AAG46111.1| hypothetical protein [Oryza >gi|31433315|gb|AAP54844.1| hypothetical protein [Oryza sativa
MAAIGIRVSKWMTYHGLALNVTTDLTPFNSIVPCGIRNRGVGSVKGLIEDGEHYNKLEDLQLLDIAHESLLKEFSEVFQLQMEKQTRFDFSISLSKESLSASWIDHKGMALEAAFSMSFCSFSVPKAIFCERETSSFQRITSRAKGIAGESQVQSSDGVETQVKETSPKVFDKLPERNLDTWSGGRETARGLSGSVVRNTVRKDTTLRHISPSSHSTKVRGDKPEISGGEKKAIVDRSKAYVKLKSLGKEVRDAGYVPETKYVLHDIDEEAKEKALMHHSERLAIAFGIINTPPGTTIRVMKNLRICGDCHNFIKILSSIEDREIIVRDNKRFHHFRDGNCSCGDYW

SEQ ID NO: 74079 - protein, 336 aa, Arabidopsis thaliana
  peptide (1)..(336): Ceres Seq. ID no. 4993073
  misc_feature (289)..(318): Pfam Name: PPR repeat Pfam Description: PPR repeat
  misc_feature (1)..(336): Homolog of NCBI NO: 15220259 NR Description: hypothetical protein; protein id: At1g47580.1
  misc_feature (76)..(336): Homolog of NCBI NO: 25405224 NR Description: F16N3.14 [imported] - Arabidopsis thaliana
  misc_feature (1)..(222): Homolog of NCBI NO: 25405224 NR Description: F16N3.14 [imported] - Arabidopsis thaliana
  misc_feature (1)..(81): Homolog of NCBI NO: 18417727 NR Description: putative protein; protein id: At4g31050.1, by cDNA: gi_15887051 [Arabidopsis thaliana]
  misc_feature (226)..(336): Homolog of NCBI NO: 31415922 NR Description: hypothetical protein [Oryza sativa (japonica
  misc_feature (161)..(336): Homolog of NCBI NO: 38347147 NR Description: OSJNBa0039G19.7 [Oryza sativa (japonica
  misc_feature (163)..(336): Homolog of NCBI NO: 18397896 NR Description: Expressed protein; protein id: At2g15690.1, by cDNA: gi_14335135 [Arabidopsis thaliana] At2g15690/F9O13.24 [Arabidopsis thaliana]
  misc_feature (163)..(336): Homolog of NCBI NO: 25411656 NR Description: hypothetical protein At2g15690 [imported] -
  misc_feature (1)..(93): Homolog of NCBI NO: 25407707 NR Description: hypothetical protein AT4g31060 [imported] - thaliana >gi|2980760|emb|CAA18187.1| putative protein thaliana] >gi|7270008|emb|CAB79824.1| putative protein
  misc_feature (192)..(336): Homolog of NCBI NO: 37536510 NR Description: hypothetical protein [Oryza sativa (japonica group)] >gi|12039323|gb|AAG46111.1| hypothetical protein [Oryza >gi|31433315|gb|AAP54844.1| hypothetical protein [Oryza sativa
MTYHGLALNVTTDLTPFNSIVPCGIRNRGVGSVKGLIEDGEHYNKLEDLQLLDIAHESLLKEFSEVFQLQMEKQTRFDFSISLSKESLSASWIDHKGMALEAAFSMSFCSFSVPKAIFCERETSSFQRITSRAKGIAGESQVQSSDGVETQVKETSPKVFDKLPERNLDTWSGGRETARGLSGSVVRNTVRKDTTLRHISPSSHSTKVRGDKPEISGGEKKAIVDRSKAYVKLKSLGKEVRDAGYVPETKYVLHDIDEEAKEKALMHHSERLAIAFGIINTPPGTTIRVMKNLRICGDCHNFIKILSSIEDREIIVRDNKRFHHFRDGNCSCGDYW

SEQ ID NO: 74080 - DNA, 3330 bp, Arabidopsis thaliana
  misc_feature (1)..(3330): Ceres Seq. ID no. 4993511
  misc_feature: MA Experiment ID: 20000314 Result: Down-regulated in Transcription
  misc_feature: MA Experiment 20000314 PARAMETER Experiment Name: At_14day_Shoots-Roots_Sub_P Parameter: Age (day) Value: 14
  misc_feature: MA Experiment 20000314 PARAMETER Experiment Name: At_14day_Shoots-Roots_Sub_P Parameter: Organism Value: A. thaliana
  misc_feature: MA Experiment 20000314 PARAMETER Experiment Name: At_14day_Shoots-Roots_Sub_P Parameter: Plant Line Value: WS
  misc_feature: MA Experiment 20000314 PARAMETER Experiment Name: At_14day_Shoots-Roots_Sub_P Parameter: Tissue Value: Roots vs. Whole Plant
  misc_feature: MA Experiment ID: 20000315 Result: Down-regulated in Transcription
  misc_feature: MA Experiment 20000315 PARAMETER Experiment Name: At_14day_Shoots-Roots_Sub_P Parameter: Age (day) Value: 14
  misc_feature: MA Experiment 20000315 PARAMETER Experiment Name: At_14day_Shoots-Roots_Sub_P Parameter: Organism Value: A. thaliana
  misc_feature: MA Experiment 20000315 PARAMETER Experiment Name: At_14day_Shoots-Roots_Sub_P Parameter: Plant Line Value: WS
  misc_feature: MA Experiment 20000315 PARAMETER Experiment Name: At_14day_Shoots-Roots_Sub_P Parameter: Tissue Value: Shoots vs. Whole Plant
  misc_feature: MA Experiment ID: 20000327 Result: Down-regulated in Transcription
  misc_feature: MA Experiment 20000327 PARAMETER Experiment Name: At_42deg_Heat_Sub_P Parameter: Age (day) Value: 14
  misc_feature: MA Experiment 20000327 PARAMETER Experiment Name: At_42deg_Heat_Sub_P Parameter: Organism Value: A. thaliana
  misc_feature: MA Experiment 20000327 PARAMETER Experiment Name: At_42deg_Heat_Sub_P Parameter: Plant Line Value: WS
  misc_feature: MA Experiment 20000327 PARAMETER Experiment Name: At_42deg_Heat_Sub_P Parameter: Temperature (deg C) Value: 42 vs. 22
  misc_feature: MA Experiment 20000327 PARAMETER Experiment Name: At_42deg_Heat_Sub_P Parameter: Timepoint (hr) Value: 1
  misc_feature: MA Experiment 20000327 PARAMETER Experiment Name: At_42deg_Heat_Sub_P Parameter: Tissue Value: Aerial
  misc_feature: MA Experiment ID: 20000328 Result: Down-regulated in Transcription
  misc_feature: MA Experiment 20000328 PARAMETER Experiment Name: At_42deg_Heat_Sub_P Parameter: Age (day) Value: 14
  misc_feature: MA Experiment 20000328 PARAMETER Experiment Name: At_42deg_Heat_Sub_P Parameter: Organism Value: A. thaliana
  misc_feature: MA Experiment 20000328 PARAMETER Experiment Name: At_42deg_Heat_Sub_P Parameter: Plant Line Value: WS
  misc_feature: MA Experiment 20000328 PARAMETER Experiment Name: At_42deg_Heat_Sub_P Parameter: Temperature (deg C) Value: 42 vs. 22
  misc_feature: MA Experiment 20000328 PARAMETER Experiment Name: At_42deg_Heat_Sub_P Parameter: Timepoint (hr) Value: 6
  misc_feature: MA Experiment 20000328 PARAMETER Experiment Name: At_42deg_Heat_Sub_P Parameter: Tissue Value: Aerial
atgaattcccagcaaagtactcggacaaagcaaatgttacaacaatcttcgacgcatttactctgcggtgttgttctgttacagctgtttgctgctcaagtcgatgctcaaagatctacaagtccatggcagacgctcagtggtgatgctccacttgtgattgctcgtggtggattttctggactttttccagattcgagtttagctgcataccaatttgcaatggtggtaagtgtagccgatgttgttctatggtgtgatgttcagctaaccaaagatgggcatgggatttgcttccctgatttaaatctggccaatgcctcaaatagtgaagaagtttacccaaatcgtcaaaaatcttaccctgttaatggagtcactactaagggttggttccccattgatttctccttgacagagctgcagaaagttttgttttctttgatccgaggaatattatcacgatcaggaaaatttgatgaaaatggatactcgatttcaacggttcaaaatgtagccacgcagatgaaaccagcattattctggttaaatgttcagcatgatgagttctatgagcagcataatcttagcatgagtagttttcttttatcaacttcaagaactgtttccattgacttcatctcttcccctgaagtaaatttctttaggaaaattgctggcggtttcgggaataatggaccgagttttgtgttccagtttatggggaaagaagatttcgagccgacaacaaatcgaacatacggttctatcttgagtaacctaagttttgtcaagacgtttgcttcagggattcttgtacccaaatcttacatattgcccctcgatgacaagcagtacttgcttcctcatacatccttagttcaagatgctcacaaagcagggctaaaactatatgcgtcaggttttgcaaatgatgttgatattgcatataactacagttgggatccagtttctgaatatctatcttttgttgacaatggcaatttttctgttgatggtatgctctctgattttcctttaactgcatctgcatctgttgactgcttctcccacattggcagaaacgctacaaaacaagtggattttcttgttatatcaaaaaatggtgcaagtggggagtatcctggatgtacaaaattggcatatgagaaggcaatcaaagatggttctgatgttattgattgcccagttcaaatgtctagcgacggtattcccttttgctcaagttcgatagatctcgtgaacagcacaacggtcggccaaactcatctcagaaaccgttccataatcgttcctgagattagctcagttgctggaatatttacttttagtctcacatggcatgagatccagagtttgactcctgcgatttcaaacccttttagggagaacggtatgtcgaggaatccgaatgagagaaattctgggaaccttatttcactctatgaattcctaaacttggcaaaaaactccacttctctatccggtattttgatcagtctagagaatgtagtatacctaagagagaagaaaggactcgacgtagttaaagtagttcttaatagactcacggaaactggttacatcgttggaacattaaaggtcatgattcagtctacgaccagattggttctagttgacttcaagaatcagagcacgtacaagactgtctacaaaattaaagaaaccattggtaatattactgactcggccatcgaagacataaagaaattcgctaacgctgttgtaatcaacaaagcttctgtttttcctaactctgattcgtttctcactggacaaacaacaaatgttttggagaggttgcagaagtttcagctcccggtttatgtggaactatttcagaatgagtttgtctctcaaccatttgacttcttcgcagatgaaactgttgagataaatgcatatatctttggagccggtatcaatggaaccatcacagagttcccttatacagctgcaagatataaaaggaatcgatgtttgggaagagaagaagtaccaccttacatgttacctgttaaccccggtggcgtcttaacgctcataagtacttcatccttacctccagcccaagatccaaacccgattttcacacacgatgatgtcactgagccaccactacctccagttatagcaaaatccccaacctcaactcttggaacaccatcaaccattgcaaaacctctaatttcatggtcagtagccggagttgtattgttcctggtcttattaacattagttttctgttttcaccgaaagagagaaacacggctgagacaacagaagctgaaggctcttattccactcgaacactatacttatgcacaagtgaagagaattacaaagtcatttgcggaagttgttgggagaggaggatttggaattgtttataaaggaacacttagtgatggccgggtggttgcggtgaaggtcttgaaagacacaaaaggtaatggtgaagacttcatcaatgaagttgcgaccatgagcagaacttctcatctcaacattgtttccttgcttggtttctgctctgaaggttccaaaagggcaattatatatgagtttttggaaaatgggtcacttgataagtttatattaggcaagacctccgtgaatatggattggacggcactatatagaattgctttaggagttgctcatggtttagagtacctgcaccatagctgcaaaacaaggatagtacatttcgacattaaaccacaaaatgtactcttggatgacagtttttgtcccaaagtttcggactttggcctcgctaaactctgtgagaagaaagagagcatcttgtctatgctggacacaagaggtaccatagggtacattgcaccagagatgatctcgagagtttatgggaatgtgtcacacaagtcagatgtgtatagctatggaatgttagtccttgagataattggtgcaagaaacaaagagaaagcaaatcaagcatgtgcttctaacacaagttcaatgtactttcctgaatgggtatatagggatcttgaatcatgcaagtctggaaggcatattgaggatggaattaacagcgaagaagatgagcttgcaaagaagatgacattggtgggtttgtggtgtattcagccttctccggtagatcgtcctgcgatgaacagagttgtggagatgatggaaggaagcttggaagctcttgaagtccctcctaggcctgttttgcagcaaatccccatatcaaatcttcatgaatcttctattctttcagaggatgtctctgtctacacagaaggatga

SEQ ID NO: 74081 - protein, 1109 aa, Arabidopsis thaliana
  peptide (1)..(1109): Ceres Seq. ID no. 4993512
  misc_feature (1)..(760): Homolog of NCBI NO: 30697435 NR Description: expressed protein [Arabidopsis thaliana]
  misc_feature (1)..(760): Homolog of NCBI NO: 30794041 NR Description: unknown protein [Arabidopsis thaliana]
  misc_feature (2)..(741): Homolog of NCBI NO: 7485338 NR Description: hypothetical protein F10M23.30 - Arabidopsis >gi|4455192|emb|CAB36515.1| putative protein [Arabidopsis >gi|7269521|emb|CAB79524.1| putative protein [Arabidopsis
  misc_feature (13)..(741): Homolog of NCBI NO: 18416801 NR Description: putative protein; protein id: At4g26690.1,
  misc_feature (1)..(762): Homolog of NCBI NO: 15240520 NR Description: putative protein; protein id: At5g55480.1 thaliana] >gi|9758180|dbj|BAB08565.1|
  misc_feature (21)..(730): Homolog of NCBI NO: 38344811 NR Description: OSJNBb0022F23.4 [Oryza sativa (japonica
  misc_feature (24)..(764): Homolog of NCBI NO: 15232292 NR Description: hypothetical protein; protein id: At3g20520.1
  misc_feature (24)..(764): Homolog of NCBI NO: 28393583 NR Description: unknown protein [Arabidopsis thaliana]
  misc_feature (745)..(1108): Homolog of NCBI NO: 15219781 NR Description: receptor serine/threonine kinase PR5K, putative; id: At1g66910.1 [Arabidopsis thaliana] >gi|25404649|pir||H96692
  misc_feature (747)..(1108): Homolog of NCBI NO: 9755446 NR Description: Putative protein kinase [Arabidopsis thaliana]
MNSQQSTRTKQMLQQSSTHLLCGVVLLQLFAAQVDAQRSTSPWQTLSGDAPLVIARGGFSGLFPDSSLAAYQFAMVVSVADVVLWCDVQLTKDGHGICFPDLNLANASNSEEVYPNRQKSYPVNGVTTKGWFPIDFSLTELQKVLFSLIRGILSRSGKFDENGYSISTVQNVATQMKPALFWLNVQHDEFYEQHNLSMSSFLLSTSRTVSIDFISSPEVNFFRKIAGGFGNNGPSFVFQFMGKEDFEPTTNRTYGSILSNLSFVKTFASGILVPKSYILPLDDKQYLLPHTSLVQDAHKAGLKLYASGFANDVDIAYNYSWDPVSEYLSFVDNGNFSVDGMLSDFPLTASASVDCFSHIGRNATKQVDFLVISKNGASGEYPGCTKLAYEKAIKDGSDVIDCPVQMSSDGIPFCSSSIDLVNSTTVGQTHLRNRSIIVPEISSVAGIFTFSLTWHEIQSLTPAISNPFRENGMSRNPNERNSGNLISLYEFLNLAKNSTSLSGILISLENVVYLREKKGLDVVKVVLNRLTETGYIVGTLKVMIQSTTRLVLVDFKNQSTYKTVYKIKETIGNITDSAIEDIKKFANAVVINKASVFPNSDSFLTGQTTNVLERLQKFQLPVYVELFQNEFVSQPFDFFADETVEINAYIFGAGINGTITEFPYTAARYKRNRCLGREEVPPYMLPVNPGGVLTLISTSSLPPAQDPNPIFTHDDVTEPPLPPVIAKSPTSTLGTPSTIAKPLISWSVAGVVLFLVLLTLVFCFHRKRETRLRQQKLKALIPLEHYTYAQVKRITKSFAEVVGRGGFGIVYKGTLSDGRVVAVKVLKDTKGNGEDFINEVATMSRTSHLNIVSLLGFCSEGSKRAIIYEFLENGSLDKFILGKTSVNMDWTALYRIALGVAHGLEYLHHSCKTRIVHFDIKPQNVLLDDSFCPKVSDFGLAKLCEKKESILSMLDTRGTIGYIAPEMISRVYGNVSHKSDVYSYGMLVLEIIGARNKEKANQACASNTSSMYFPEWVYRDLESCKSGRHIEDGINSEEDELAKKMTLVGLWCIQPSPVDRPAMNRVVEMMEGSLEALEVPPRPVLQQIPISNLHESSILSEDVSVYTEG

SEQ ID NO: 74082 - protein, 1098 aa, Arabidopsis thaliana
  peptide (1)..(1098): Ceres Seq. ID no. 4993513
  misc_feature (1)..(749): Homolog of NCBI NO: 30697435 NR Description: expressed protein [Arabidopsis thaliana]
  misc_feature (1)..(749): Homolog of NCBI NO: 30794041 NR Description: unknown protein [Arabidopsis thaliana]
  misc_feature (1)..(730): Homolog of NCBI NO: 7485338 NR Description: hypothetical protein F10M23.30 - Arabidopsis >gi|4455192|emb|CAB36515.1| putative protein [Arabidopsis >gi|7269521|emb|CAB79524.1| putative protein [Arabidopsis
  misc_feature (2)..(730): Homolog of NCBI NO: 18416801 NR Description: putative protein; protein id: At4g26690.1,
  misc_feature (1)..(751): Homolog of NCBI NO: 15240520 NR Description: putative protein; protein id: At5g55480.1 thaliana] >gi|9758180|dbj|BAB08565.1|
  misc_feature (10)..(719): Homolog of NCBI NO: 38344811 NR Description: OSJNBb0022F23.4 [Oryza sativa (japonica
  misc_feature (13)..(753): Homolog of NCBI NO: 15232292 NR Description: hypothetical protein; protein id: At3g20520.1
  misc_feature (13)..(753): Homolog of NCBI NO: 28393583 NR Description: unknown protein [Arabidopsis thaliana]
  misc_feature (734)..(1097): Homolog of NCBI NO: 15219781 NR Description: receptor serine/threonine kinase PR5K, putative; id: At1g66910.1 [Arabidopsis thaliana] >gi|25404649|pir||H96692
  misc_feature (736)..(1097): Homolog of NCBI NO: 9755446 NR Description: Putative protein kinase [Arabidopsis thaliana]
MLQQSSTHLLCGVVLLQLFAAQVDAQRSTSPWQTLSGDAPLVIARGGFSGLFPDSSLAAYQFAMVVSVADVVLWCDVQLTKDGHGICFPDLNLANASNSEEVYPNRQKSYPVNGVTTKGWFPIDFSLTELQKVLFSLIRGILSRSGKFDENGYSISTVQNVATQMKPALFWLNVQHDEFYEQHNLSMSSFLLSTSRTVSIDFISSPEVNFFRKIAGGFGNNGPSFVFQFMGKEDFEPTTNRTYGSILSNLSFVKTFASGILVPKSYILPLDDKQYLLPHTSLVQDAHKAGLKLYASGFANDVDIAYNYSWDPVSEYLSFVDNGNFSVDGMLSDFPLTASASVDCFSHIGRNATKQVDFLVISKNGASGEYPGCTKLAYEKAIKDGSDVIDCPVQMSSDGIPFCSSSIDLVNSTTVGQTHLRNRSIIVPEISSVAGIFTFSLTWHEIQSLTPAISNPFRENGMSRNPNERNSGNLISLYEFLNLAKNSTSLSGILISLENVVYLREKKGLDVVKVVLNRLTETGYIVGTLKVMIQSTTRLVLVDFKNQSTYKTVYKIKETIGNITDSAIEDIKKFANAVVINKASVFPNSDSFLTGQTTNVLERLQKFQLPVYVELFQNEFVSQPFDFFADETVEINAYIFGAGINGTITEFPYTAARYKRNRCLGREEVPPYMLPVNPGGVLTLISTSSLPPAQDPNPIFTHDDVTEPPLPPVIAKSPTSTLGTPSTIAKPLISWSVAGVVLFLVLLTLVFCFHRKRETRLRQQKLKALIPLEHYTYAQVKRITKSFAEVVGRGGFGIVYKGTLSDGRVVAVKVLKDTKGNGEDFINEVATMSRTSHLNIVSLLGFCSEGSKRAIIYEFLENGSLDKFILGKTSVNMDWTALYRIALGVAHGLEYLHHSCKTRIVHFDIKPQNVLLDDSFCPKVSDFGLAKLCEKKESILSMLDTRGTIGYIAPEMISRVYGNVSHKSDVYSYGMLVLEIIGARNKEKANQACASNTSSMYFPEWVYRDLESCKSGRHIEDGINSEEDELAKKMTLVGLWCIQPSPVDRPAMNRVVEMMEGSLEALEVPPRPVLQQIPISNLHESSILSEDVSVYTEG

SEQ ID NO: 74083 - protein, 1035 aa, Arabidopsis thaliana
  peptide (1)..(1035): Ceres Seq. ID no. 4993514
  misc_feature (1)..(686): Homolog of NCBI NO: 30697435 NR Description: expressed protein [Arabidopsis thaliana]
  misc_feature (1)..(686): Homolog of NCBI NO: 30794041 NR Description: unknown protein [Arabidopsis thaliana]
  misc_feature (1)..(667): Homolog of NCBI NO: 7485338 NR Description: hypothetical protein F10M23.30 - Arabidopsis >gi|4455192|emb|CAB36515.1| putative protein [Arabidopsis >gi|7269521|emb|CAB79524.1| putative protein [Arabidopsis
  misc_feature (1)..(667): Homolog of NCBI NO: 18416801 NR Description: putative protein; protein id: At4g26690.1,
  misc_feature (1)..(688): Homolog of NCBI NO: 15240520 NR Description: putative protein; protein id: At5g55480.1 thaliana] >gi|9758180|dbj|BAB08565.1|
  misc_feature (1)..(656): Homolog of NCBI NO: 38344811 NR Description: OSJNBb0022F23.4 [Oryza sativa (japonica
  misc_feature (1)..(690): Homolog of NCBI NO: 15232292 NR Description: hypothetical protein; protein id: At3g20520.1
  misc_feature (1)..(690): Homolog of NCBI NO: 28393583 NR Description: unknown protein [Arabidopsis thaliana]
  misc_feature (671)..(1034): Homolog of NCBI NO: 15219781 NR Description: receptor serine/threonine kinase PR5K, putative; id: At1g66910.1 [Arabidopsis thaliana] >gi|25404649|pir||H96692
  misc_feature (673)..(1034): Homolog of NCBI NO: 9755446 NR Description: Putative protein kinase [Arabidopsis thaliana]
MVVSVADVVLWCDVQLTKDGHGICFPDLNLANASNSEEVYPNRQKSYPVNGVTTKGWFPIDFSLTELQKVLFSLIRGILSRSGKFDENGYSISTVQNVATQMKPALFWLNVQHDEFYEQHNLSMSSFLLSTSRTVSIDFISSPEVNFFRKIAGGFGNNGPSFVFQFMGKEDFEPTTNRTYGSILSNLSFVKTFASGILVPKSYILPLDDKQYLLPHTSLVQDAHKAGLKLYASGFANDVDIAYNYSWDPVSEYLSFVDNGNFSVDGMLSDFPLTASASVDCFSHIGRNATKQVDFLVISKNGASGEYPGCTKLAYEKAIKDGSDVIDCPVQMSSDGIPFCSSSIDLVNSTTVGQTHLRNRSIIVPEISSVAGIFTFSLTWHEIQSLTPAISNPFRENGMSRNPNERNSGNLISLYEFLNLAKNSTSLSGILISLENVVYLREKKGLDVVKVVLNRLTETGYIVGTLKVMIQSTTRLVLVDFKNQSTYKTVYKIKETIGNITDSAIEDIKKFANAVVINKASVFPNSDSFLTGQTTNVLERLQKFQLPVYVELFQNEFVSQPFDFFADETVEINAYIFGAGINGTITEFPYTAARYKRNRCLGREEVPPYMLPVNPGGVLTLISTSSLPPAQDPNPIFTHDDVTEPPLPPVIAKSPTSTLGTPSTIAKPLISWSVAGVVLFLVLLTLVFCFHRKRETRLRQQKLKALIPLEHYTYAQVKRITKSFAEVVGRGGFGIVYKGTLSDGRVVAVKVLKDTKGNGEDFINEVATMSRTSHLNIVSLLGFCSEGSKRAIIYEFLENGSLDKFILGKTSVNMDWTALYRIALGVAHGLEYLHHSCKTRIVHFDIKPQNVLLDDSFCPKVSDFGLAKLCEKKESILSMLDTRGTIGYIAPEMISRVYGNVSHKSDVYSYGMLVLEIIGARNKEKANQACASNTSSMYFPEWVYRDLESCKSGRHIEDGINSEEDELAKKMTLVGLWCIQPSPVDRPAMNRVVEMMEGSLEALEVPPRPVLQQIPISNLHESSILSEDVSVYTEG

SEQ ID NO: 74084 - DNA, 549 bp, Arabidopsis thaliana
  misc_feature (1)..(549): Ceres Seq. ID no. 4993527
  misc_feature: MA Experiment ID: 20000180 Result: Up-regulated in Transcription
  misc_feature: MA Experiment 20000180 PARAMETER Experiment Name: At_Germinating_Seeds_P Parameter: Age (hr) Value: 24 vs. 0
  misc_feature: MA Experiment 20000180 PARAMETER Experiment Name: At_Germinating_Seeds_P Parameter: Tissue Value: Germinating Seeds
  misc_feature: MA Experiment ID: 20000182 Result: Up-regulated in Transcription
  misc_feature: MA Experiment 20000182 PARAMETER Experiment Name: At_2mM_SA_P Parameter: Age (day) Value: 14
  misc_feature: MA Experiment 20000182 PARAMETER Experiment Name: At_2mM_SA_P Parameter: Organism Value: A. thaliana
  misc_feature: MA Experiment 20000182 PARAMETER Experiment Name: At_2mM_SA_P Parameter: Plant Line Value: WS
  misc_feature: MA Experiment 20000182 PARAMETER Experiment Name: At_2mM_SA_P Parameter: Timepoint (hr) Value: 6
  misc_feature: MA Experiment 20000182 PARAMETER Experiment Name: At_2mM_SA_P Parameter: Tissue Value: Aerial
  misc_feature: MA Experiment 20000182 PARAMETER Experiment Name: At_2mM_SA_P Parameter: Treatment Value: 2mM SA vs. No Treatment
  misc_feature: MA Experiment ID: 20000234 Result: Down-regulated in Transcription
  misc_feature: MA Experiment 20000234 PARAMETER Experiment Name: At_Siliques_P Parameter: Age (day) Value: 21
  misc_feature: MA Experiment 20000234 PARAMETER Experiment Name: At_Siliques_P Parameter: Organism Value: A. thaliana
  misc_feature: MA Experiment 20000234 PARAMETER Experiment Name: At_Siliques_P Parameter: Plant Line Value: WS
  misc_feature: MA Experiment 20000234 PARAMETER Experiment Name: At_Siliques_P Parameter: Tissue Value: Less Than 5mm Siliques vs. Whole Plant
  misc_feature: MA Experiment ID: 20000264 Result: Down-regulated in Transcription
  misc_feature: MA Experiment 20000264 PARAMETER Experiment Name: At_Open_Flower_P Parameter: Age (day) Value: 21
  misc_feature: MA Experiment 20000264 PARAMETER Experiment Name: At_Open_Flower_P Parameter: Plant Line Value: WS
  misc_feature: MA Experiment 20000264 PARAMETER Experiment Name: At_Open_Flower_P Parameter: Tissue Value: Open Flower vs. Whole Plant
  misc_feature: MA Experiment ID: 20000265 Result: Down-regulated in Transcription
  misc_feature: MA Experiment 20000265 PARAMETER Experiment Name: At_Open_Flower_P Parameter: Age (day) Value: 21
  misc_feature: MA Experiment 20000265 PARAMETER Experiment Name: At_Open_Flower_P Parameter: Plant Line Value: WS
  misc_feature: MA Experiment 20000265 PARAMETER Experiment Name: At_Open_Flower_P Parameter: Tissue Value: Closed Flower vs. Whole Plant
  misc_feature: MA Experiment ID: 20000495 Result: Down-regulated in Transcription
  misc_feature: MA Experiment 20000495 PARAMETER Experiment Name: At_Guard_Cells_P Parameter: Harvest Date Value: 8/2/2002
  misc_feature: MA Experiment 20000495 PARAMETER Experiment Name: At_Guard_Cells_P Parameter: Organism Value: A. thaliana
  misc_feature: MA Experiment 20000495 PARAMETER Experiment Name: At_Guard_Cells_P Parameter: Tissue Value: Guard Cells vs. Leaves
  misc_feature: MA Experiment ID: 20000794 Result: Down-regulated in Transcription
  misc_feature: MA Experiment 20000794 PARAMETER Experiment Name: At_Petals_P Parameter: Age (day) Value: 23-25 days
  misc_feature: MA Experiment 20000794 PARAMETER Experiment Name: At_Petals_P Parameter: Plant Line Value: WS
  misc_feature: MA Experiment 20000794 PARAMETER Experiment Name: At_Petals_P Parameter: Tissue Value: Petals vs. Whole plant
  misc_feature: MA Experiment ID: 20001451 Result: Down-regulated in Transcription
  misc_feature: MA Experiment 20001451 PARAMETER Experiment Name: At_Far-red-induction_P Parameter: Age (day) Value: 7
  misc_feature: MA Experiment 20001451 PARAMETER Experiment Name: At_Far-red-induction_P Parameter: Light Value: Far-red vs. White
  misc_feature: MA Experiment 20001451 PARAMETER Experiment Name: At_Far-red-induction_P Parameter: Organism Value: A. thaliana
  misc_feature: MA Experiment 20001451 PARAMETER Experiment Name: At_Far-red-induction_P Parameter: Plant Line Value: Columbia
  misc_feature: MA Experiment 20001451 PARAMETER Experiment Name: At_Far-red-induction_P Parameter: Timepoint (hr) Value: 24
  misc_feature: MA Experiment 20001451 PARAMETER Experiment Name: At_Far-red-induction_P Parameter: Tissue Value: Whole Plant
atggattcgccaaactgggaactccgtggttgttgtaaccggaatcaaaatactttcctcatcaccatcggagtcttcaccgtagttatccttctgctatggaggacatttctattgactccatttaaactcattacggtgtttttgcacgaagctagtcatgccgttgcttgcaagcttacatgtggagatgtagaggggatggaggtgaatgcaaatgaagggggttcgaccacaacacgtggtggcatttattggttgatcttacctgctggctatcttggctcatcattttggggaatggcattgattcttgcatctaccaatctgcttacagcaagaatagctgctgctggtcttggtcttgctttattcatcgttctcttcattgccaaaaactggacgcttcgagggctttgtataggtttcatagttttcctcgctgtcatatgggttctacaagagttaactacagtcaaaattctccgttatgtcattctgtttattggtaagaataccatcaaactcttctctgtcttgttatcataa

SEQ ID NO: 74085 - protein, 182 aa, Arabidopsis thaliana
  peptide (1)..(182): Ceres Seq. ID no. 4993528
  misc_feature (1)..(182): Homolog of NCBI NO: 15219816 NR Description: hypothetical protein; protein id: At1g67060.1
  misc_feature (1)..(65): Homolog of NCBI NO: 26449599 NR Description: unknown protein [Arabidopsis thaliana]
  misc_feature (5)..(169): Homolog of NCBI NO: 23619420 NR Description: hypothetical protein, conserved [Plasmodium
  misc_feature (17)..(179): Homolog of NCBI NO: 40740899 NR Description: hypothetical protein AN4854.2 [Aspergillus
  misc_feature (17)..(179): Homolog of NCBI NO: 32405840 NR Description: hypothetical protein ( (AL451015) conserved protein [Neurospora crassa] ) >gi|11595731|emb|CAC18209.1| hypothetical protein [Neurospora crassa]
  misc_feature (68)..(151): Homolog of NCBI NO: 23485893 NR Description: hypothetical protein [Plasmodium yoelii yoelii]
  misc_feature (17)..(179): Homolog of NCBI NO: 24212750 NR Description: conserved hypothetical protein [Leptospira serovar lai str. 56601] >gi|24193391|gb|AAN47249.1|AE011197_1 hypothetical protein [Leptospira interrogans serovar lai str.
  misc_feature (24)..(170): Homolog of NCBI NO: 24374127 NR Description: hypothetical protein [Shewanella oneidensis MR-1]
MDSPNWELRGCCNRNQNTFLITIGVFTVVILLLWRTFLLTPFKLITVFLHEASHAVACKLTCGDVEGMEVNANEGGSTTTRGGIYWLILPAGYLGSSFWGMALILASTNLLTARIAAAGLGLALFIVLFIAKNWTLRGLCIGFIVFLAVIWVLQELTTVKILRYVILFIGKNTIKLFSVLLS

SEQ ID NO: 74086 - protein, 115 aa, Arabidopsis thaliana
  peptide (1)..(115): Ceres Seq. ID no. 4993529
  misc_feature (1)..(115): Homolog of NCBI NO: 15219816 NR Description: hypothetical protein; protein id: At1g67060.1
  misc_feature (1)..(102): Homolog of NCBI NO: 23619420 NR Description: hypothetical protein, conserved [Plasmodium
  misc_feature (1)..(112): Homolog of NCBI NO: 40740899 NR Description: hypothetical protein AN4854.2 [Aspergillus
  misc_feature (1)..(112): Homolog of NCBI NO: 32405840 NR Description: hypothetical protein ( (AL451015) conserved protein [Neurospora crassa] ) >gi|11595731|emb|CAC18209.1| hypothetical protein [Neurospora crassa]
  misc_feature (1)..(84): Homolog of NCBI NO: 23485893 NR Description: hypothetical protein [Plasmodium yoelii yoelii]
  misc_feature (1)..(112): Homolog of NCBI NO: 24212750 NR Description: conserved hypothetical protein [Leptospira serovar lai str. 56601] >gi|24193391|gb|AAN47249.1|AE011197_1 hypothetical protein [Leptospira interrogans serovar lai str.
  misc_feature (1)..(103): Homolog of NCBI NO: 24374127 NR Description: hypothetical protein [Shewanella oneidensis MR-1]
MEVNANEGGSTTTRGGIYWLILPAGYLGSSFWGMALILASTNLLTARIAAAGLGLALFIVLFIAKNWTLRGLCIGFIVFLAVIWVLQELTTVKILRYVILFIGKNTIKLFSVLLS

SEQ ID NO: 74087 - DNA, 2841 bp, Arabidopsis thaliana
  misc_feature (1)..(2841): Ceres Seq. ID no. 4993689
  misc_feature: MA Experiment ID: 20000180 Result: Down-regulated in Transcription
  misc_feature: MA Experiment 20000180 PARAMETER Experiment Name: At_Germinating_Seeds_P Parameter: Age (hr) Value: 24 vs. 0
  misc_feature: MA Experiment 20000180 PARAMETER Experiment Name: At_Germinating_Seeds_P Parameter: Tissue Value: Germinating Seeds
atgtccactcctccgccggatgacatgtttggtttcgacgatcctttctcccccagtgattcgcgggaagttgtggatttgactaaagagtactcctttttgcacgattctcttgtcgactatggaaacgttaatgttcatcaagtagtgcccattattactcaatcctctattgacgctagagccattgcagatgctgtttctggtgtcgacgatgtgtttgggagaaaatcccagaagtttcttaggcaatttagagagaaattgagtgagagtttagtgattgaggtgttgcgtttgatagcaagaccatctgctgttatcagtttcttcgtttgggcaggtaggcagataggttataagcatactgcacctgtgtataacgctttggttgaccttattgtacgtgatgatgacgaaaaagttcccgaagaattcctgcaacagattagagatgatgataaggaagtgtttggcgaatttctcaatgtgttggtaaggaaacattgcaggaatgggtcatttagtattgcgcttgaggagttagggaggctcaaggattttaggttcagaccttcaagatcgacttataattgtttgattcaggcatttctcaaggctgatcgtttggactctgcatctttgattcatagggaaatgtctcttgcaaatcttaggatggatgggtttacacttagatgctttgcttattctctctgtaaagtaggaaagtggagggaagctctaacattggtggaaacggaaaattttgtgcctgatactgtgttttatacaaaattgatatctggtctgtgtgaagcttcgctttttgaagaggctatggatttcctgaataggatgcgtgctacttcctgccttccaaatgttgttacatattcaactttgctgtgtggatgcttgaacaaaaaacagctgggtaggtgtaaaagggtgcttaatatgatgatgatggaaggttgttatccaagtcccaagatttttaattctcttgtacatgcttattgcacatcaggagatcattcatatgcatacaaattgctcaaaaaaatggttaaatgtggtcacatgccaggatatgttgtctacaatatattgattgggagtatttgtggtgacaaagactcccttaattgtgatctgttggacttagctgagaaagcttatagtgaaatgcttgctgcaggggttgttctgaataagattaatgtcagtagcttcacacggtgtctttgtagtgctgggaaatatgaaaaggcatttagtgttatccgtgaaatgattggtcagggatttataccagataccagtacctattccaaagtccttaattatttatgtaatgcttcgaaaatggagttggcgtttttgttatttgaagaaatgaaaaggggtggccttgttgctgatgtctacacgtatactattatggtagatagtttctgtaaagctggtctaattgaacaggctcgtaagtggttcaatgaaatgagagaggttggttgtacacctaacgtcgtcacatataccgctcttatccatgcttatcttaaggctaagaaggtcagctatgcaaatgagctgtttgaaacgatgctgtctgaagggtgtctccctaatattgttacatattctgccttaattgatggccattgcaaagctggacaagtggagaaagcctgccagatttttgaaagaatgtgtggcagcaaagatgtcccagatgtagatatgtacttcaagcagtatgatgacaacagcgagaggccaaatgtagttacatatggagctttactggatggtttctgcaagtcgcatagggtcgaagaagctcgtaagttgttggatgctatgtctatggaaggttgtgaaccgaatcagattgtatatgatgctctcattgatggactctgtaaggttgggaaactagacgaagcacaagaagtgaaaactgagatgtctgagcatggattccctgcaaccttatatacttacagttctctaattgatcgttatttcaaagtcaagcgccaagatttagcctcaaaagtattatctaagatgcttgagaattcctgtgcgcccaatgtggttatatacactgagatgattgatggcttatgcaaggttggtaaaactgatgaagcttataagcttatgcaaatgatggaagaaaaagggtgtcagcccaatgttgtgacatatacagcgatgattgatggatttggaatgattggtaaaatagaaacatgccttgagctcttagagcgaatgggttccaaaggtgttgctccaaattatgttacttacagggtcttgatagatcattgttgcaaaaatggtgcactggatgtggcccacaatcttctcgaagaaatgaaacagacacattggcctacacacacagcaggatatcgcaaagtcattgaaggattcaataaagagttcatagagtctctagggcttctcgatgagataggccaggatgatactgccccttttctttctgtatataggcttttgattgataatcttattaaagctcaaagactggaaatggctcttaggcttcttgaagaggttgcaacattttcagccacgttggttgactacagtagcacatataactcactgattgaaagcctttgccttgctaataaagtggaaacggcttttcagttgttctcagaaatgacaaagaaaggtgtcattccggagatgcaatcattctgtagtctaatcaagggacttttccgaaacagcaagatcagtgaagcactattgcttctagatttcatatctcatatggtttgtcctctctga

SEQ ID NO: 74088 - protein, 946 aa, Arabidopsis thaliana
  peptide (1)..(946): Ceres Seq. ID no. 4993690
  misc_feature (332)..(366): Pfam Name: PPR repeat Pfam Description: PPR repeat
  misc_feature (220)..(941): Homolog of NCBI NO: 38344241 NR Description: OJ991113_30.18 [Oryza sativa (japonica
  misc_feature (189)..(802): Homolog of NCBI NO: 30840221 NR Description: fertility restorer [Raphanus sativus]
  misc_feature (189)..(802): Homolog of NCBI NO: 30840327 NR Description: fertility restorer homologue [Raphanus sativus]
  misc_feature (163)..(944): Homolog of NCBI NO: 6630464 NR Description: F23N19.4 [Arabidopsis thaliana]
  misc_feature (267)..(944): Homolog of NCBI NO: 34015232 NR Description: putative fertility restorer [Oryza sativa
  misc_feature (258)..(663): Homolog of NCBI NO: 25404938 NR Description: protein F1N19.15 [imported] - Arabidopsis >gi|6633829|gb|AAF19688.1|AC009519_22 F1N19.15 [Arabidopsis
  misc_feature (596)..(937): Homolog of NCBI NO: 25404938 NR Description: protein F1N19.15 [imported] - Arabidopsis >gi|6633829|gb|AAF19688.1|AC009519_22 F1N19.15 [Arabidopsis
  misc_feature (258)..(663): Homolog of NCBI NO: 15217683 NR Description: hypothetical protein; protein id: At1g64580.1
  misc_feature (596)..(937): Homolog of NCBI NO: 15217683 NR Description: hypothetical protein; protein id: At1g64580.1
  misc_feature (171)..(802): Homolog of NCBI NO: 32452381 NR Description: fertility restorer homologue A [Raphanus sativus]
MSTPPPDDMFGFDDPFSPSDSREVVDLTKEYSFLHDSLVDYGNVNVHQVVPIITQSSIDARAIADAVSGVDDVFGRKSQKFLRQFREKLSESLVIEVLRLIARPSAVISFFVWAGRQIGYKHTAPVYNALVDLIVRDDDEKVPEEFLQQIRDDDKEVFGEFLNVLVRKHCRNGSFSIALEELGRLKDFRFRPSRSTYNCLIQAFLKADRLDSASLIHREMSLANLRMDGFTLRCFAYSLCKVGKWREALTLVETENFVPDTVFYTKLISGLCEASLFEEAMDFLNRMRATSCLPNVVTYSTLLCGCLNKKQLGRCKRVLNMMMMEGCYPSPKIFNSLVHAYCTSGDHSYAYKLLKKMVKCGHMPGYVVYNILIGSICGDKDSLNCDLLDLAEKAYSEMLAAGVVLNKINVSSFTRCLCSAGKYEKAFSVIREMIGQGFIPDTSTYSKVLNYLCNASKMELAFLLFEEMKRGGLVADVYTYTIMVDSFCKAGLIEQARKWFNEMREVGCTPNVVTYTALIHAYLKAKKVSYANELFETMLSEGCLPNIVTYSALIDGHCKAGQVEKACQIFERMCGSKDVPDVDMYFKQYDDNSERPNVVTYGALLDGFCKSHRVEEARKLLDAMSMEGCEPNQIVYDALIDGLCKVGKLDEAQEVKTEMSEHGFPATLYTYSSLIDRYFKVKRQDLASKVLSKMLENSCAPNVVIYTEMIDGLCKVGKTDEAYKLMQMMEEKGCQPNVVTYTAMIDGFGMIGKIETCLELLERMGSKGVAPNYVTYRVLIDHCCKNGALDVAHNLLEEMKQTHWPTHTAGYRKVIEGFNKEFIESLGLLDEIGQDDTAPFLSVYRLLIDNLIKAQRLEMALRLLEEVATFSATLVDYSSTYNSLIESLCLANKVETAFQLFSEMTKKGVIPEMQSFCSLIKGLFRNSKISEALLLLDFISHMVCPL

SEQ ID NO: 74089 - protein, 938 aa, Arabidopsis thaliana
  peptide (1)..(938): Ceres Seq. ID no. 4993691
  misc_feature (324)..(358): Pfam Name: PPR repeat Pfam Description: PPR repeat
  misc_feature (212)..(933): Homolog of NCBI NO: 38344241 NR Description: OJ991113_30.18 [Oryza sativa (japonica
  misc_feature (181)..(794): Homolog of NCBI NO: 30840221 NR Description: fertility restorer [Raphanus sativus]
  misc_feature (181)..(794): Homolog of NCBI NO: 30840327 NR Description: fertility restorer homologue [Raphanus sativus]
  misc_feature (155)..(936): Homolog of NCBI NO: 6630464 NR Description: F23N19.4 [Arabidopsis thaliana]
  misc_feature (259)..(936): Homolog of NCBI NO: 34015232 NR Description: putative fertility restorer [Oryza sativa
  misc_feature (250)..(655): Homolog of NCBI NO: 25404938 NR Description: protein F1N19.15 [imported] - Arabidopsis >gi|6633829|gb|AAF19688.1|AC009519_22 F1N19.15 [Arabidopsis
  misc_feature (588)..(929): Homolog of NCBI NO: 25404938 NR Description: protein F1N19.15 [imported] - Arabidopsis >gi|6633829|gb|AAF19688.1|AC009519_22 F1N19.15 [Arabidopsis
  misc_feature (250)..(655): Homolog of NCBI NO: 15217683 NR Description: hypothetical protein; protein id: At1g64580.1
  misc_feature (588)..(929): Homolog of NCBI NO: 15217683 NR Description: hypothetical protein; protein id: At1g64580.1
  misc_feature (163)..(794): Homolog of NCBI NO: 32452381 NR Description: fertility restorer homologue A [Raphanus sativus]
MFGFDDPFSPSDSREVVDLTKEYSFLHDSLVDYGNVNVHQVVPIITQSSIDARAIADAVSGVDDVFGRKSQKFLRQFREKLSESLVIEVLRLIARPSAVISFFVWAGRQIGYKHTAPVYNALVDLIVRDDDEKVPEEFLQQIRDDDKEVFGEFLNVLVRKHCRNGSFSIALEELGRLKDFRFRPSRSTYNCLIQAFLKADRLDSASLIHREMSLANLRMDGFTLRCFAYSLCKVGKWREALTLVETENFVPDTVFYTKLISGLCEASLFEEAMDFLNRMRATSCLPNVVTYSTLLCGCLNKKQLGRCKRVLNMMMMEGCYPSPKIFNSLVHAYCTSGDHSYAYKLLKKMVKCGHMPGYVVYNILIGSICGDKDSLNCDLLDLAEKAYSEMLAAGVVLNKINVSSFTRCLCSAGKYEKAFSVIREMIGQGFIPDTSTYSKVLNYLCNASKMELAFLLFEEMKRGGLVADVYTYTIMVDSFCKAGLIEQARKWFNEMREVGCTPNVVTYTALIHAYLKAKKVSYANELFETMLSEGCLPNIVTYSALIDGHCKAGQVEKACQIFERMCGSKDVPDVDMYFKQYDDNSERPNVVTYGALLDGFCKSHRVEEARKLLDAMSMEGCEPNQIVYDALIDGLCKVGKLDEAQEVKTEMSEHGFPATLYTYSSLIDRYFKVKRQDLASKVLSKMLENSCAPNVVIYTEMIDGLCKVGKTDEAYKLMQMMEEKGCQPNVVTYTAMIDGFGMIGKIETCLELLERMGSKGVAPNYVTYRVLIDHCCKNGALDVAHNLLEEMKQTHWPTHTAGYRKVIEGFNKEFIESLGLLDEIGQDDTAPFLSVYRLLIDNLIKAQRLEMALRLLEEVATFSATLVDYSSTYNSLIESLCLANKVETAFQLFSEMTKKGVIPEMQSFCSLIKGLFRNSKISEALLLLDFISHMVCPL

SEQ ID NO: 74090 - protein, 727 aa, Arabidopsis thaliana
  peptide (1)..(727): Ceres Seq. ID no. 4993692
  misc_feature (113)..(147): Pfam Name: PPR repeat Pfam Description: PPR repeat
  misc_feature (1)..(722): Homolog of NCBI NO: 38344241 NR Description: OJ991113_30.18 [Oryza sativa (japonica
  misc_feature (1)..(583): Homolog of NCBI NO: 30840221 NR Description: fertility restorer [Raphanus sativus]
  misc_feature (1)..(583): Homolog of NCBI NO: 30840327 NR Description: fertility restorer homologue [Raphanus sativus]
  misc_feature (1)..(725): Homolog of NCBI NO: 6630464 NR Description: F23N19.4 [Arabidopsis thaliana]
  misc_feature (48)..(725): Homolog of NCBI NO: 34015232 NR Description: putative fertility restorer [Oryza sativa
  misc_feature (39)..(444): Homolog of NCBI NO: 25404938 NR Description: protein F1N19.15 [imported] - Arabidopsis >gi|6633829|gb|AAF19688.1|AC009519_22 F1N19.15 [Arabidopsis
  misc_feature (377)..(718): Homolog of NCBI NO: 25404938 NR Description: protein F1N19.15 [imported] - Arabidopsis >gi|6633829|gb|AAF19688.1|AC009519_22 F1N19.15 [Arabidopsis
  misc_feature (39)..(444): Homolog of NCBI NO: 15217683 NR Description: hypothetical protein; protein id: At1g64580.1
  misc_feature (377)..(718): Homolog of NCBI NO: 15217683 NR Description: hypothetical protein; protein id: At1g64580.1
  misc_feature (1)..(583): Homolog of NCBI NO: 32452381 NR Description: fertility restorer homologue A [Raphanus sativus]
MSLANLRMDGFTLRCFAYSLCKVGKWREALTLVETENFVPDTVFYTKLISGLCEASLFEEAMDFLNRMRATSCLPNVVTYSTLLCGCLNKKQLGRCKRVLNMMMMEGCYPSPKIFNSLVHAYCTSGDHSYAYKLLKKMVKCGHMPGYVVYNILIGSICGDKDSLNCDLLDLAEKAYSEMLAAGVVLNKINVSSFTRCLCSAGKYEKAFSVIREMIGQGFIPDTSTYSKVLNYLCNASKMELAFLLFEEMKRGGLVADVYTYTIMVDSFCKAGLIEQARKWFNEMREVGCTPNVVTYTALIHAYLKAKKVSYANELFETMLSEGCLPNIVTYSALIDGHCKAGQVEKACQIFERMCGSKDVPDVDMYFKQYDDNSERPNVVTYGALLDGFCKSHRVEEARKLLDAMSMEGCEPNQIVYDALIDGLCKVGKLDEAQEVKTEMSEHGFPATLYTYSSLIDRYFKVKRQDLASKVLSKMLENSCAPNVVIYTEMIDGLCKVGKTDEAYKLMQMMEEKGCQPNVVTYTAMIDGFGMIGKIETCLELLERMGSKGVAPNYVTYRVLIDHCCKNGALDVAHNLLEEMKQTHWPTHTAGYRKVIEGFNKEFIESLGLLDEIGQDDTAPFLSVYRLLIDNLIKAQRLEMALRLLEEVATFSATLVDYSSTYNSLIESLCLANKVETAFQLFSEMTKKGVIPEMQSFCSLIKGLFRNSKISEALLLLDFISHMVCPL

SEQ ID NO: 74091 - DNA, 2310 bp, Arabidopsis thaliana
  misc_feature (1)..(2310): Ceres Seq. ID no. 4993776
  misc_feature: MA Experiment ID: 20000185 Result: Up-regulated in Transcription
  misc_feature: MA Experiment 20000185 PARAMETER Experiment Name: At_Roots__P Parameter: Age (day) Value: 7 vs. 21
  misc_feature: MA Experiment 20000185 PARAMETER Experiment Name: At_Roots__P Parameter: Organism Value: A. thaliana
  misc_feature: MA Experiment 20000185 PARAMETER Experiment Name: At_Roots__P Parameter: Tissue Value: Roots vs. Whole Plant
  misc_feature: MA Experiment ID: 20000227 Result: Down-regulated in Transcription
  misc_feature: MA Experiment 20000227 PARAMETER Experiment Name: At_Root-Tips-vs-Tops_P Parameter: Tissue Value: Root Tips vs. Root Tops
  misc_feature: MA Experiment ID: 20000439 Result: Up-regulated in Transcription
  misc_feature: MA Experiment 20000439 PARAMETER Experiment Name: At_Roots__P Parameter: Age (day) Value: 14 vs. 21
  misc_feature: MA Experiment 20000439 PARAMETER Experiment Name: At_Roots__P Parameter: Organism Value: A. thaliana
  misc_feature: MA Experiment 20000439 PARAMETER Experiment Name: At_Roots__P Parameter: Tissue Value: Roots vs. Whole Plant
  misc_feature: MA Experiment ID: 20000451 Result: Down-regulated in Transcription
  misc_feature: MA Experiment 20000451 PARAMETER Experiment Name: At_CS6879_Shoots-Roots_P Parameter: Age (day) Value: 14
  misc_feature: MA Experiment 20000451 PARAMETER Experiment Name: At_CS6879_Shoots-Roots_P Parameter: Organism Value: A. thaliana
  misc_feature: MA Experiment 20000451 PARAMETER Experiment Name: At_CS6879_Shoots-Roots_P Parameter: Plant Line Value: CS6879 vs. WS
  misc_feature: MA Experiment 20000451 PARAMETER Experiment Name: At_CS6879_Shoots-Roots_P Parameter: Tissue Value: Roots
  misc_feature: MA Experiment ID: 20000453 Result: Up-regulated in Transcription
  misc_feature: MA Experiment 20000453 PARAMETER Experiment Name: At_100uM_ABA_P Parameter: Age (day) Value: 15
  misc_feature: MA Experiment 20000453 PARAMETER Experiment Name: At_100uM_ABA_P Parameter: Organism Value: A. thaliana
  misc_feature: MA Experiment 20000453 PARAMETER Experiment Name: At_100uM_ABA_P Parameter: Plant Line Value: WS
  misc_feature: MA Experiment 20000453 PARAMETER Experiment Name: At_100uM_ABA_P Parameter: Timepoint (hr) Value: 24
  misc_feature: MA Experiment 20000453 PARAMETER Experiment Name: At_100uM_ABA_P Parameter: Tissue Value: Aerial
  misc_feature: MA Experiment 20000453 PARAMETER Experiment Name: At_100uM_ABA_P Parameter: Treatment Value: 100uM ABA vs. No Treatment
atggcgacattagcagatattggactagcagcagcgattaatattctaagtgcattgatatttctattgctatttgcaatcttgaggattcaaccattcaatgatagggtttatttccctaaatggtacttaaaaggtgttagaagcagccctgtgaattcgggtgctttcgttagcaagattatgaatttggactttcgatcatacgttcggtttttaaactggatgcctgatgctcttaagatgccagagcctgaacttattgatcatgctggtttggattctgctgtttacttgaggatttacttgattgggcttaagatctttggtccgattgcattactttcatggtcaattttagtacctgtaaattggacaagtgatggattgcagctagcaaaacttcgtaatgtaacatcgagtaatatcgataagctttcgatttcgaatgtcgaacgtggatcagacaggttttgggcacatcttgtgatggcttatgcattcacattttggacttgctatgtactaatgaaggaatatgagaaaattgctgcaatgcggttatcttttctccaatcagagaagcgacgtgctgatcaattcactgttctggttaggaacgtaccaccggactcagacgagtcgattagcgaaaacgtgcagcatttctttcttgttaaccacccagaccattatcttacacatcaggtggtgtacaatgcaaatgaattggctaaattggtagaagacaagaagaaaatgcagaattggttagattactaccagttgaagtatacaagaaacaaggaacaacggccacggatgggatttctcgggctatggggcaaaaaagtagatgcaatggatcattatacagcagagatcgagaaacttagcgagcaaataatggaagaaaggaagaggataaagaaagatgacaaaagtgtaatgcaagcagcttttgtgtcttttaaaacgcgttggggcgctgcggtctgcgcgcagacacaacagacgaagaatccaactgaatggttaaccgaatgggctcctgaggcaagagaaatgtactggccaaatctcgcaatgccttacgtatctctcactgtaaggagatttgtaatgcacatcgccttcttcttcctcacgttctttttcatcatcccaatcgcatttgtgcaatccttagcgagtattgaaggtatcgagaaatccgctccgttcctcagtcccattgtcaaaaacaagttaatgaaatcattgatccaaggttttcttcccggtattgtcttgaagctctttttgatattcctgccaacaatattgatgatcatgtcgaaattcgaagggtttatttcaatatcatcgttagagagaagagcggcttttcgatactatattttcaaccttgtgaatgttttcctcggtagcgtaatcactggatctgcttttgaacagctcgattcttttcttaaacaatccgcaaacgacattccgcggacagttggagtcgcgataccgataaaagcaacgttctttataacgtatataatggtagacggttgggcgggtgtggcgggagaaatctttaggctgaaaccattagtcattttccatttaaagaacttcttctttgtgaaaactgaaaaggatagagaagaagctatggatccgggacagattgatttctacgctaccgagcctcggattcaactatacttcctccttggccttgtctacgctcctgtcactcctgttcttcttcctttcatcatcttcttctttggtttcgcctacctcgtcttccgtcatcagaagtatgagagtgcgggtgcattctggccagacgttcatggacgtataatatcggcattgatcatctcacaaatccttttgttgggattaatgagcacgaaaggaaaagttcagtccacacctttcctcctcgttctagcgattctcaccttcggttttcatcggttttgcaaaggccggtacgaatcggcattcgtcattaacccgttgcaggaagctatgattaaggatacattggaacgagcaagagaaccaaacttgaatcttaaagggtttcttcagaatgcatatgttcatcctgtttttaaagacgaagaagattcagatgaagagggactaatcgaggattcagatgacgaagattgtgtagttgtacaaaccaaacgtcaaagatcacggagaaccaccgttgcgagcagcaatgcgagccgtggctcgtcacaatcaacgccttttaatcaacttgatttgggtaaggggaaaccggagacttga

SEQ ID NO: 74092 - protein, 769 aa, Arabidopsis thaliana
  peptide (1)..(769): Ceres Seq. ID no. 4993777
  misc_feature (302)..(720): Pfam Name: Domain of unknown function DUF221 Pfam Description: Domain of unknown function DUF221
  misc_feature (1)..(754): Homolog of NCBI NO: 15233476 NR Description: unknown protein; protein id: At4g04340.1, by cDNA: gi_15810532, supported by cDNA: gi_20260619 [Arabidopsis >gi|25407261|pir||H85054 hypothetical protein AT4g04340
  misc_feature (1)..(754): Homolog of NCBI NO: 15810533 NR Description: unknown protein [Arabidopsis thaliana]
  misc_feature (1)..(745): Homolog of NCBI NO: 15233100 NR Description: unknown protein; protein id: At3g21620.1 thaliana] >gi|11994398|dbj|BAB02357.1|
  misc_feature (217)..(758): Homolog of NCBI NO: 15234725 NR Description: putative protein; protein id: At4g22120.1
  misc_feature (1)..(203): Homolog of NCBI NO: 15234725 NR Description: putative protein; protein id: At4g22120.1
  misc_feature (1)..(749): Homolog of NCBI NO: 17381104 NR Description: unknown protein [Arabidopsis thaliana]
  misc_feature (1)..(756): Homolog of NCBI NO: 15236212 NR Description: hypothetical protein; protein id: At4g02900.1
  misc_feature (1)..(755): Homolog of NCBI NO: 37537172 NR Description: unknown protein [Oryza sativa (japonica
  misc_feature (1)..(725): Homolog of NCBI NO: 15222569 NR Description: hypothetical protein; protein id: At1g32090.1
  misc_feature (451)..(752): Homolog of NCBI NO: 34913548 NR Description: OJ1029_F04.25 [Oryza sativa (japonica
MATLADIGLAAAINILSALIFLLLFAILRIQPFNDRVYFPKWYLKGVRSSPVNSGAFVSKIMNLDFRSYVRFLNWMPDALKMPEPELIDHAGLDSAVYLRIYLIGLKIFGPIALLSWSILVPVNWTSDGLQLAKLRNVTSSNIDKLSISNVERGSDRFWAHLVMAYAFTFWTCYVLMKEYEKIAAMRLSFLQSEKRRADQFTVLVRNVPPDSDESISENVQHFFLVNHPDHYLTHQVVYNANELAKLVEDKKKMQNWLDYYQLKYTRNKEQRPRMGFLGLWGKKVDAMDHYTAEIEKLSEQIMEERKRIKKDDKSVMQAAFVSFKTRWGAAVCAQTQQTKNPTEWLTEWAPEAREMYWPNLAMPYVSLTVRRFVMHIAFFFLTFFFIIPIAFVQSLASIEGIEKSAPFLSPIVKNKLMKSLIQGFLPGIVLKLFLIFLPTILMIMSKFEGFISISSLERRAAFRYYIFNLVNVFLGSVITGSAFEQLDSFLKQSANDIPRTVGVAIPIKATFFITYIMVDGWAGVAGEIFRLKPLVIFHLKNFFFVKTEKDREEAMDPGQIDFYATEPRIQLYFLLGLVYAPVTPVLLPFIIFFFGFAYLVFRHQKYESAGAFWPDVHGRIISALIISQILLLGLMSTKGKVQSTPFLLVLAILTFGFHRFCKGRYESAFVINPLQEAMIKDTLERAREPNLNLKGFLQNAYVHPVFKDEEDSDEEGLIEDSDDEDCVVVQTKRQRSRRTTVASSNASRGSSQSTPFNQLDLGKGKPET

SEQ ID NO: 74093 - protein, 708 aa, Arabidopsis thaliana
  peptide (1)..(708): Ceres Seq. ID no. 4993778
  misc_feature (241)..(659): Pfam Name: Domain of unknown function DUF221 Pfam Description: Domain of unknown function DUF221
  misc_feature (1)..(693): Homolog of NCBI NO: 15233476 NR Description: unknown protein; protein id: At4g04340.1, by cDNA: gi_15810532, supported by cDNA: gi_20260619 [Arabidopsis >gi|25407261|pir||H85054 hypothetical protein AT4g04340
  misc_feature (1)..(693): Homolog of NCBI NO: 15810533 NR Description: unknown protein [Arabidopsis thaliana]
  misc_feature (1)..(684): Homolog of NCBI NO: 15233100 NR Description: unknown protein; protein id: At3g21620.1 thaliana] >gi|11994398|dbj|BAB02357.1|
  misc_feature (156)..(697): Homolog of NCBI NO: 15234725 NR Description: putative protein; protein id: At4g22120.1
  misc_feature (1)..(142): Homolog of NCBI NO: 15234725 NR Description: putative protein; protein id: At4g22120.1
  misc_feature (1)..(688): Homolog of NCBI NO: 17381104 NR Description: unknown protein [Arabidopsis thaliana]
  misc_feature (1)..(695): Homolog of NCBI NO: 15236212 NR Description: hypothetical protein; protein id: At4g02900.1
  misc_feature (1)..(694): Homolog of NCBI NO: 37537172 NR Description: unknown protein [Oryza sativa (japonica
  misc_feature (1)..(664): Homolog of NCBI NO: 15222569 NR Description: hypothetical protein; protein id: At1g32090.1
  misc_feature (390)..(691): Homolog of NCBI NO: 34913548 NR Description: OJ1029_F04.25 [Oryza sativa (japonica
MNLDFRSYVRFLNWMPDALKMPEPELIDHAGLDSAVYLRIYLIGLKIFGPIALLSWSILVPVNWTSDGLQLAKLRNVTSSNIDKLSISNVERGSDRFWAHLVMAYAFTFWTCYVLMKEYEKIAAMRLSFLQSEKRRADQFTVLVRNVPPDSDESISENVQHFFLVNHPDHYLTHQVVYNANELAKLVEDKKKMQNWLDYYQLKYTRNKEQRPRMGFLGLWGKKVDAMDHYTAEIEKLSEQIMEERKRIKKDDKSVMQAAFVSFKTRWGAAVCAQTQQTKNPTEWLTEWAPEAREMYWPNLAMPYVSLTVRRFVMHIAFFFLTFFFIIPIAFVQSLASIEGIEKSAPFLSPIVKNKLMKSLIQGFLPGIVLKLFLIFLPTILMIMSKFEGFISISSLERRAAFRYYIFNLVNVFLGSVITGSAFEQLDSFLKQSANDIPRTVGVAIPIKATFFITYIMVDGWAGVAGEIFRLKPLVIFHLKNFFFVKTEKDREEAMDPGQIDFYATEPRIQLYFLLGLVYAPVTPVLLPFIIFFFGFAYLVFRHQKYESAGAFWPDVHGRIISALIISQILLLGLMSTKGKVQSTPFLLVLAILTFGFHRFCKGRYESAFVINPLQEAMIKDTLERAREPNLNLKGFLQNAYVHPVFKDEEDSDEEGLIEDSDDEDCVVVQTKRQRSRRTTVASSNASRGSSQSTPFNQLDLGKGKPET

SEQ ID NO: 74094 - protein, 694 aa, Arabidopsis thaliana
  peptide (1)..(694): Ceres Seq. ID no. 4993779
  misc_feature (227)..(645): Pfam Name: Domain of unknown function DUF221 Pfam Description: Domain of unknown function DUF221
  misc_feature (1)..(679): Homolog of NCBI NO: 15233476 NR Description: unknown protein; protein id: At4g04340.1, by cDNA: gi_15810532, supported by cDNA: gi_20260619 [Arabidopsis >gi|25407261|pir||H85054 hypothetical protein AT4g04340
  misc_feature (1)..(679): Homolog of NCBI NO: 15810533 NR Description: unknown protein [Arabidopsis thaliana]
  misc_feature (1)..(670): Homolog of NCBI NO: 15233100 NR Description: unknown protein; protein id: At3g21620.1 thaliana] >gi|11994398|dbj|BAB02357.1|
  misc_feature (142)..(683): Homolog of NCBI NO: 15234725 NR Description: putative protein; protein id: At4g22120.1
  misc_feature (1)..(128): Homolog of NCBI NO: 15234725 NR Description: putative protein; protein id: At4g22120.1
  misc_feature (1)..(674): Homolog of NCBI NO: 17381104 NR Description: unknown protein [Arabidopsis thaliana]
  misc_feature (1)..(681): Homolog of NCBI NO: 15236212 NR Description: hypothetical protein; protein id: At4g02900.1
  misc_feature (1)..(680): Homolog of NCBI NO: 37537172 NR Description: unknown protein [Oryza sativa (japonica
  misc_feature (1)..(650): Homolog of NCBI NO: 15222569 NR Description: hypothetical protein; protein id: At1g32090.1
  misc_feature (376)..(677): Homolog of NCBI NO: 34913548 NR Description: OJ1029_F04.25 [Oryza sativa (japonica
MPDALKMPEPELIDHAGLDSAVYLRIYLIGLKIFGPIALLSWSILVPVNWTSDGLQLAKLRNVTSSNIDKLSISNVERGSDRFWAHLVMAYAFTFWTCYVLMKEYEKIAAMRLSFLQSEKRRADQFTVLVRNVPPDSDESISENVQHFFLVNHPDHYLTHQVVYNANELAKLVEDKKKMQNWLDYYQLKYTRNKEQRPRMGFLGLWGKKVDAMDHYTAEIEKLSEQIMEERKRIKKDDKSVMQAAFVSFKTRWGAAVCAQTQQTKNPTEWLTEWAPEAREMYWPNLAMPYVSLTVRRFVMHIAFFFLTFFFIIPIAFVQSLASIEGIEKSAPFLSPIVKNKLMKSLIQGFLPGIVLKLFLIFLPTILMIMSKFEGFISISSLERRAAFRYYIFNLVNVFLGSVITGSAFEQLDSFLKQSANDIPRTVGVAIPIKATFFITYIMVDGWAGVAGEIFRLKPLVIFHLKNFFFVKTEKDREEAMDPGQIDFYATEPRIQLYFLLGLVYAPVTPVLLPFIIFFFGFAYLVFRHQKYESAGAFWPDVHGRIISALIISQILLLGLMSTKGKVQSTPFLLVLAILTFGFHRFCKGRYESAFVINPLQEAMIKDTLERAREPNLNLKGFLQNAYVHPVFKDEEDSDEEGLIEDSDDEDCVVVQTKRQRSRRTTVASSNASRGSSQSTPFNQLDLGKGKPET

SEQ ID NO: 74095 - DNA, 1077 bp, Arabidopsis thaliana
  misc_feature (1)..(1077): Ceres Seq. ID no. 4993852
atggcgatttctcgttccatccttcaccggccagctaaatccttttcctcactgttcactcgttccttctcttcgtcatctcctctcgccaattcccctactgtttctcgatctgcgtcttcgttgttgaatcgttcacgttctctcgtttctggattctcagcgttggtccgtgccggtgtatctctagctagagacgagattattgattactacatcaaaaccctagctcaagttgttggcagtgaagaggaggcaaggatgaagatttactctgtgtcgcacaaatgctactttgcttttggagctcttgtttcagaagatctttcacataagatcaaagagttgcctaaggttaagtgggttcttcctgattcctacttggatgggaagaataaagactatggaggagaacctttcattgatggaaaggctgttccttatgacccaaagtatcatgaagaatggataagaaacaatgctaatgcaactaatgaaaacagacgccctcgcaggcctcgcaactcggatggaggcaggaacgataggggaaaccaagacacgggttacagacgtccaccaccaaaccaaggtatgggaggtgctccacctccaccgcctcacataggcaacaacccaaacatgcctcctcatatacaaccacctaacatgaaccagaactacagaggtcctcctccaccaccaaacatgaaccagaactatcagggaccaccagcaccaaacatgaaccagaactatcagggacctccaccatcaaacatgggtcagaactaccagggaccaccaccgccaaacatgaaccagagctatcagggacctccaccgccaaacatgaaccagagctatcagggacctccaccgtcgaacatgggccagaactacaggggaccttcactgccgccaccaaacatgagtcagaattacgagggaccaccaccaccgaacatgaatggaggatggtctggaaactaccagcagaacggtggataccaacaacaaggtcagggtggtggaatgcagcaacagccttacccacccaataggaaccagagttaa

SEQ ID NO: 74096 - protein, 358 aa, Arabidopsis thaliana
  peptide (1)..(358): Ceres Seq. ID no. 4993853
  misc_feature (194)..(354): Pfam Name: Single-stranded DNA binding protein, SSDP Pfam Description: Single-stranded DNA binding protein, SSDP
  misc_feature (1)..(358): Homolog of NCBI NO: 15219250 NR Description: plastid protein, putative; protein id: [Arabidopsis thaliana] >gi|7769870|gb|AAF69548.1|AC008007_23
  misc_feature (65)..(342): Homolog of NCBI NO: 18400602 NR Description: expressed protein; protein id: At3g15000.1, by cDNA: gi_16226542 [Arabidopsis thaliana] Unknown mitochondrial protein At3g15000
  misc_feature (3)..(61): Homolog of NCBI NO: 18400602 NR Description: expressed protein; protein id: At3g15000.1, by cDNA: gi_16226542 [Arabidopsis thaliana] Unknown mitochondrial protein At3g15000
  misc_feature (23)..(162): Homolog of NCBI NO: 15218508 NR Description: DAG-like protein; protein id: At1g72530.1
  misc_feature (66)..(318): Homolog of NCBI NO: 15235263 NR Description: DAG-like protein; protein id: At4g20020.1
  misc_feature (66)..(203): Homolog of NCBI NO: 27754695 NR Description: putative DAG protein [Arabidopsis thaliana]
  misc_feature (66)..(203): Homolog of NCBI NO: 15230785 NR Description: DAG protein, putative; protein id: At3g06790.1 thaliana] >gi|7549634|gb|AAF63819.1| DAG protein, putative
  misc_feature (160)..(357): Homolog of NCBI NO: 34858521 NR Description: hypothetical protein XP_347054 [Rattus norvegicus]
  misc_feature (160)..(350): Homolog of NCBI NO: 206712 NR Description: salivary proline-rich protein
  misc_feature (192)..(357): Homolog of NCBI NO: 206712 NR Description: salivary proline-rich protein
MAISRSILHRPAKSFSSLFTRSFSSSSPLANSPTVSRSASSLLNRSRSLVSGFSALVRAGVSLARDEIIDYYIKTLAQVVGSEEEARMKIYSVSHKCYFAFGALVSEDLSHKIKELPKVKWVLPDSYLDGKNKDYGGEPFIDGKAVPYDPKYHEEWIRNNANATNENRRPRRPRNSDGGRNDRGNQDTGYRRPPPNQGMGGAPPPPPHIGNNPNMPPHIQPPNMNQNYRGPPPPPNMNQNYQGPPAPNMNQNYQGPPPSNMGQNYQGPPPPNMNQSYQGPPPPNMNQSYQGPPPSNMGQNYRGPSLPPPNMSQNYEGPPPPNMNGGWSGNYQQNGGYQQQGQGGGMQQQPYPPNRNQS

SEQ ID NO: 74097 - protein, 271 aa, Arabidopsis thaliana
  peptide (1)..(271): Ceres Seq. ID no. 4993854
  misc_feature (107)..(267): Pfam Name: Single-stranded DNA binding protein, SSDP Pfam Description: Single-stranded DNA binding protein, SSDP
  misc_feature (1)..(271): Homolog of NCBI NO: 15219250 NR Description: plastid protein, putative; protein id: [Arabidopsis thaliana] >gi|7769870|gb|AAF69548.1|AC008007_23
  misc_feature (1)..(255): Homolog of NCBI NO: 18400602 NR Description: expressed protein; protein id: At3g15000.1, by cDNA: gi_16226542 [Arabidopsis thaliana] Unknown mitochondrial protein At3g15000
  misc_feature (1)..(75): Homolog of NCBI NO: 15218508 NR Description: DAG-like protein; protein id: At1g72530.1
  misc_feature (1)..(231): Homolog of NCBI NO: 15235263 NR Description: DAG-like protein; protein id: At4g20020.1
  misc_feature (1)..(116): Homolog of NCBI NO: 27754695 NR Description: putative DAG protein [Arabidopsis thaliana]
  misc_feature (1)..(116): Homolog of NCBI NO: 15230785 NR Description: DAG protein, putative; protein id: At3g06790.1 thaliana] >gi|7549634|gb|AAF63819.1| DAG protein, putative
  misc_feature (73)..(270): Homolog of NCBI NO: 34858521 NR Description: hypothetical protein XP_347054 [Rattus norvegicus]
  misc_feature (73)..(263): Homolog of NCBI NO: 206712 NR Description: salivary proline-rich protein
  misc_feature (105)..(270): Homolog of NCBI NO: 206712 NR Description: salivary proline-rich protein
  misc_feature (1)..(105): Homolog of NCBI NO: 38344141 NR Description: OSJNBa0041A02.8 [Oryza sativa (japonica
MKIYSVSHKCYFAFGALVSEDLSHKIKELPKVKWVLPDSYLDGKNKDYGGEPFIDGKAVPYDPKYHEEWIRNNANATNENRRPRRPRNSDGGRNDRGNQDTGYRRPPPNQGMGGAPPPPPHIGNNPNMPPHIQPPNMNQNYRGPPPPPNMNQNYQGPPAPNMNQNYQGPPPSNMGQNYQGPPPPNMNQSYQGPPPPNMNQSYQGPPPSNMGQNYRGPSLPPPNMSQNYEGPPPPNMNGGWSGNYQQNGGYQQQGQGGGMQQQPYPPNRNQS

SEQ ID NO: 74098 - DNA, 4161 bp, Arabidopsis thaliana
  misc_feature (1)..(4161): Ceres Seq. ID no. 4993910
  misc_feature: MA Experiment ID: 20000171 Result: Up-regulated in Transcription
  misc_feature: MA Experiment 20000171 PARAMETER Experiment Name: At_42deg_Heat_P Parameter: Age (day) Value: 14
  misc_feature: MA Experiment 20000171 PARAMETER Experiment Name: At_42deg_Heat_P Parameter: Organism Value: A. thaliana
  misc_feature: MA Experiment 20000171 PARAMETER Experiment Name: At_42deg_Heat_P Parameter: Plant Line Value: WS
  misc_feature: MA Experiment 20000171 PARAMETER Experiment Name: At_42deg_Heat_P Parameter: Temperature (deg C) Value: 42 vs. 22
  misc_feature: MA Experiment 20000171 PARAMETER Experiment Name: At_42deg_Heat_P Parameter: Timepoint (hr) Value: 1
  misc_feature: MA Experiment 20000171 PARAMETER Experiment Name: At_42deg_Heat_P Parameter: Tissue Value: Aerial
  misc_feature: MA Experiment ID: 20000184 Result: Down-regulated in Transcription
  misc_feature: MA Experiment 20000184 PARAMETER Experiment Name: At_Shoots__P Parameter: Age (day) Value: 7
  misc_feature: MA Experiment 20000184 PARAMETER Experiment Name: At_Shoots__P Parameter: Tissue Value: Shoots vs. Whole Plant
  misc_feature: MA Experiment ID: 20000286 Result: Up-regulated in Transcription
  misc_feature: MA Experiment 20000286 PARAMETER Experiment Name: At_Open_Flower_P Parameter: Age (day) Value: 21
  misc_feature: MA Experiment 20000286 PARAMETER Experiment Name: At_Open_Flower_P Parameter: Plant Line Value: WS
  misc_feature: MA Experiment 20000286 PARAMETER Experiment Name: At_Open_Flower_P Parameter: Tissue Value: Half Open vs. Whole Plant
  misc_feature: MA Experiment ID: 20000495 Result: Down-regulated in Transcription
  misc_feature: MA Experiment 20000495 PARAMETER Experiment Name: At_Guard_Cells_P Parameter: Harvest Date Value: 8/2/2002
  misc_feature: MA Experiment 20000495 PARAMETER Experiment Name: At_Guard_Cells_P Parameter: Organism Value: A. thaliana
  misc_feature: MA Experiment 20000495 PARAMETER Experiment Name: At_Guard_Cells_P Parameter: Tissue Value: Guard Cells vs. Leaves
  misc_feature: MA Experiment ID: 20000794 Result: Up-regulated in Transcription
  misc_feature: MA Experiment 20000794 PARAMETER Experiment Name: At_Petals_P Parameter: Age (day) Value: 23-25 days
  misc_feature: MA Experiment 20000794 PARAMETER Experiment Name: At_Petals_P Parameter: Plant Line Value: WS
  misc_feature: MA Experiment 20000794 PARAMETER Experiment Name: At_Petals_P Parameter: Tissue Value: Petals vs. Whole plant
  misc_feature: MA Experiment ID: 20001247 Result: Up-regulated in Transcription
  misc_feature: MA Experiment 20001247 PARAMETER Experiment Name: At_Far-red-induction_P Parameter: Age (day) Value: 7
  misc_feature: MA Experiment 20001247 PARAMETER Experiment Name: At_Far-red-induction_P Parameter: Light Value: Far-red vs. White
  misc_feature: MA Experiment 20001247 PARAMETER Experiment Name: At_Far-red-induction_P Parameter: Organism Value: A. thaliana
  misc_feature: MA Experiment 20001247 PARAMETER Experiment Name: At_Far-red-induction_P Parameter: Plant Line Value: Columbia
  misc_feature: MA Experiment 20001247 PARAMETER Experiment Name: At_Far-red-induction_P Parameter: Timepoint (hr) Value: 1
  misc_feature: MA Experiment 20001247 PARAMETER Experiment Name: At_Far-red-induction_P Parameter: Tissue Value: Whole Plant
atggttggaggaagtagtgcacagaagctaactacaaatgatgcacttgcatatcttaaagctgtcaaggataaatttcaagataaacgtgacaaatacgatgagtttcttgaggttatgaaagattttaaagctcagagagttgatactactggtgttatcttaagggtgaaagaactttttaaagggaacagagaattgattttggggtttaatactttcttaccaaagggtttcgagataactctccgacccgaggatgaccaacccgctgcaccaaagaagcctgttgagtttgaggaagctattagttttgttaacaagattaagacaaggtttcaaggcgatgatcgtgtatacaaatcgtttttagacattttgaacatgtatagaaaggaaaacaagtctattactgaggtctaccatgaggtggctatcctttttcgggaccatcacgatttgcttggagagttcactcactttctccctgatacttcagcaactgcatctactaatgattctgtaaaagttccagtacgtgatagaggcattaagtctcttcccaccatgcgtcaaatagatcttgataagaaggaccggattattacttcgcatcctaaccgtgccctcaaaaccgaaaatatggacgtagaccatgagaggtctttgttgaaagatagtaaagaagaagtgagacgcattgacaaaaagaatgatttcatggatgatagagacaggaaagattacagaggtcttgaccacgatagccataaagaacatttcttcaacagcaaaaagaaattgatacgtaaggatgatgattctgctgaaatgtcagatcaagccagggaaggagacaagttttctggagccattccgagttcatctacttatgatgaaaaaggtttcataattgatttcttagaaagtcatagccaagaacttgcttttgttgatagagtgaaggcaaagcttgataccgcggataaccaagagttcttacgatgtcttaatctctattcaaaggagataatcagccaaccagaattgcagtctttggtgagtgatttaattggtgtatatccagaccttatggacgccttcaaagtctttttggctcagtgtgacaagaatgatggattactctctggtatcgtgtctaagagtaagtctagtaccttttataatatacttctgacatacctcttcggacaatccttgtggagtgaaggcaaatgtcctcaacctactaagtcacttgacaaagatacagaccgagaacgtgagaagattgaaaggtatagagaaagagaccgtgagaaggagaggcttgaaaaggtggcagcgagtcagaaatgggctaaacctatcagtgaactagatctctcgaactgtgaacagtgcacacctagttatcggagacttccaaagaatttaaatgtacatacatactttgttctcttgcagtatccaattcctatagcaagccaaaaaatggagattggtagccaagtgcttaatgatcattgggtctctgtcacttcaggaagtgaagactattcattcaaacacatgcgcaagaaccaatacgaagagagcctattcaaatgtgaagatgacaggttcgagctagacatgttattagagtctgtgatctcggctactaatcgagttgaagagttattggcaaagattaacagtaatgaattgaaaaccgatactcccatctgtatcgaggatcacctcacagctctaaacctaagatgcatagaacggttatacagtgaccatgggctcgatgtgttggatttgttaaagaagaatgcatatcttgctttaccggtaatactaacccgtttgaaacaaaagcaagaagaatgggcaaggtgtcgtactgagtttaacaaagtctgggctgacatatatacaaagaactaccacaggtcgcttgatcatcgcagtttttatttcaaacagcaggattcaaagaatctgagcacaaaagcattgctggcagagataaaagagatctctgaaaagaagcgaggcgaagatgatgcacttcttgctcttgcggctggaaatagacgaactatttcttccaatatgagttttgattatccggatcctgatcttcacgaagatctgtatcagctgatcaagtattcatgtggagaaatgtgttcaacagaacagttagataaggtaatgaaggtatggacagaatttttggaaccaatatttggtgttccttctcgccctcaaggtgccgaagaccgagaagatgctgtcaagtctacaaaccatgaccgagaagaccaagaagatgctgtcagtcctcaaaatggagctagtattgccaactctatgcggtcaaatggccctcgaaaagtcaatgaaagtaatcaagtgcggcaagctagtgagttggataaagatgttacttctagtaagacctcagatgccttgttatcatgtgacaacactcagaatgataaaatgccgaagaatctgaccacacctgacgaaagagccgaaaccaaacaagctgtttctattgaacgtgcccataactcaaatgcactacctctggatggattgttacctcaaaggaatggaaaaatcagcagtttatccgttgcggatgaagaatggtatccttttcttttatactcgccagggcttagcaatagtaatccaaaacctgcattaaccagtggaacggaggagttgaagccaaattacgtaaatgggccacgcgtagagattggcgacaaccctgtaattccaaatgggacagtagcagaatggttcgctggggaagccaaagtcgaaagagaggagggtgaactttctccaacaggagattttgaagaagataattatgcagttcatggagagaatgacatggaggctctcagcaaaagtaaggagaatgatgcaactgcagatgatgcaagtgctccaagatcatcagatggtagcggaaacacatctcacaacggtgatgtttctggaactgactctggtgatggtgaagattgttatcgcgaagatgatatagaccataataaggtagaaagtgaaggtgaggctgaagaaggtatgtctgatggccatgatgatactgaaggagatatgcctgtgttgtccatctcagtaaaaaacctgctacatgtgaaacctcttgcaaagtatgtccctccagctttgtacgataaggacaacgatgattctcggaagaactcacaagtcttttatgggaatgattctttttatgttctattcaggcttcatcagattttgtatgacagaatattatcagcaaaaatcaattcatcatctccagatagaaagtggaagacctcaaatccaacaaaccccgctgattcgtacgccagaatcatggatgctctctacaatttgctcgatggcacatccgataattcaaagttcgaagatgattgccgagcaattatcgggacccagtcatatgttctcttcacattagacaaactgatctataagctcatcaagcattcgtcacatatgatccaactgaccaatgtgatcctccagctccaagcagtagcagctgatgagatggacaacaaattacaacagctttatgcttatgagaaatccagaaagcctgagaagtttctggatgctgtttattacgaaaatgctcttgtgcttcttcccgatgaggatatataccgcattgaatgtgaacaatcgacaccaagcaaactctctattcagcttctggactatggacatgataagcctgatgtgacatccatatccatggacccaacttttgcagcttacctccacaatgtattcctttcttatcaacctaatgcgaaagagaatcctcgaatctatttgaaacggaataagcgtaaaaatggtggtgacgatgaactctgcaccacggatgaagttaagattattaatggtttggaatgtaagataacctgcagttcttcaaaggtctcctatgtattagacaccgaggatgtgttgcatcgtgctaagaggaggaaacttttaaaccaaagcggtttacccctcgcacatgattctgtttgcagtggttctttaattaggcaaaggagaacacaaagatatcaaaaacttctcaccggtcaatga

SEQ ID NO: 74099 - protein, 1386 aa, Arabidopsis thaliana
  peptide (1)..(1386): Ceres Seq. ID no. 4993911
  misc_feature (117)..(163): Pfam Name: Paired amphipathic helix repeat Pfam Description: Paired amphipathic helix repeat
  misc_feature (38)..(1278): Homolog of NCBI NO: 15242192 NR Description: transcriptional regulatory - like protein; id: At5g15020.1 [Arabidopsis thaliana] >gi|11358896|pir||T51447
  misc_feature (1204)..(1384): Homolog of NCBI NO: 15242192 NR Description: transcriptional regulatory - like protein; id: At5g15020.1 [Arabidopsis thaliana] >gi|11358896|pir||T51447
  misc_feature (939)..(1351): Homolog of NCBI NO: 15218525 NR Description: unknown protein; protein id: At1g10450.1
  misc_feature (456)..(855): Homolog of NCBI NO: 15218525 NR Description: unknown protein; protein id: At1g10450.1
  misc_feature (12)..(200): Homolog of NCBI NO: 15218525 NR Description: unknown protein; protein id: At1g10450.1
  misc_feature (376)..(855): Homolog of NCBI NO: 25402600 NR Description: protein T10O24.5 [imported] - Arabidopsis >gi|5091536|gb|AAD39565.1|AC007067_5 T10O24.5 [Arabidopsis
  misc_feature (939)..(1338): Homolog of NCBI NO: 25402600 NR Description: protein T10O24.5 [imported] - Arabidopsis >gi|5091536|gb|AAD39565.1|AC007067_5 T10O24.5 [Arabidopsis
  misc_feature (12)..(200): Homolog of NCBI NO: 25402600 NR Description: protein T10O24.5 [imported] - Arabidopsis >gi|5091536|gb|AAD39565.1|AC007067_5 T10O24.5 [Arabidopsis
  misc_feature (209)..(1230): Homolog of NCBI NO: 34894158 NR Description: putative co-repressor protein [Oryza sativa
  misc_feature (3)..(245): Homolog of NCBI NO: 34894158 NR Description: putative co-repressor protein [Oryza sativa
MVGGSSAQKLTTNDALAYLKAVKDKFQDKRDKYDEFLEVMKDFKAQRVDTTGVILRVKELFKGNRELILGFNTFLPKGFEITLRPEDDQPAAPKKPVEFEEAISFVNKIKTRFQGDDRVYKSFLDILNMYRKENKSITEVYHEVAILFRDHHDLLGEFTHFLPDTSATASTNDSVKVPVRDRGIKSLPTMRQIDLDKKDRIITSHPNRALKTENMDVDHERSLLKDSKEEVRRIDKKNDFMDDRDRKDYRGLDHDSHKEHFFNSKKKLIRKDDDSAEMSDQAREGDKFSGAIPSSSTYDEKGFIIDFLESHSQELAFVDRVKAKLDTADNQEFLRCLNLYSKEIISQPELQSLVSDLIGVYPDLMDAFKVFLAQCDKNDGLLSGIVSKSKSSTFYNILLTYLFGQSLWSEGKCPQPTKSLDKDTDREREKIERYRERDREKERLEKVAASQKWAKPISELDLSNCEQCTPSYRRLPKNLNVHTYFVLLQYPIPIASQKMEIGSQVLNDHWVSVTSGSEDYSFKHMRKNQYEESLFKCEDDRFELDMLLESVISATNRVEELLAKINSNELKTDTPICIEDHLTALNLRCIERLYSDHGLDVLDLLKKNAYLALPVILTRLKQKQEEWARCRTEFNKVWADIYTKNYHRSLDHRSFYFKQQDSKNLSTKALLAEIKEISEKKRGEDDALLALAAGNRRTISSNMSFDYPDPDLHEDLYQLIKYSCGEMCSTEQLDKVMKVWTEFLEPIFGVPSRPQGAEDREDAVKSTNHDREDQEDAVSPQNGASIANSMRSNGPRKVNESNQVRQASELDKDVTSSKTSDALLSCDNTQNDKMPKNLTTPDERAETKQAVSIERAHNSNALPLDGLLPQRNGKISSLSVADEEWYPFLLYSPGLSNSNPKPALTSGTEELKPNYVNGPRVEIGDNPVIPNGTVAEWFAGEAKVEREEGELSPTGDFEEDNYAVHGENDMEALSKSKENDATADDASAPRSSDGSGNTSHNGDVSGTDSGDGEDCYREDDIDHNKVESEGEAEEGMSDGHDDTEGDMPVLSISVKNLLHVKPLAKYVPPALYDKDNDDSRKNSQVFYGNDSFYVLFRLHQILYDRILSAKINSSSPDRKWKTSNPTNPADSYARIMDALYNLLDGTSDNSKFEDDCRAIIGTQSYVLFTLDKLIYKLIKHSSHMIQLTNVILQLQAVAADEMDNKLQQLYAYEKSRKPEKFLDAVYYENALVLLPDEDIYRIECEQSTPSKLSIQLLDYGHDKPDVTSISMDPTFAAYLHNVFLSYQPNAKENPRIYLKRNKRKNGGDDELCTTDEVKIINGLECKITCSSSKVSYVLDTEDVLHRAKRRKLLNQSGLPLAHDSVCSGSLIRQRRTQRYQKLLTGQ

SEQ ID NO: 74100 - protein, 1347 aa, Arabidopsis thaliana
  peptide (1)..(1347): Ceres Seq. ID no. 4993912
  misc_feature (78)..(124): Pfam Name: Paired amphipathic helix repeat Pfam Description: Paired amphipathic helix repeat
  misc_feature (1)..(1239): Homolog of NCBI NO: 15242192 NR Description: transcriptional regulatory - like protein; id: At5g15020.1 [Arabidopsis thaliana] >gi|11358896|pir||T51447
  misc_feature (1165)..(1345): Homolog of NCBI NO: 15242192 NR Description: transcriptional regulatory - like protein; id: At5g15020.1 [Arabidopsis thaliana] >gi|11358896|pir||T51447
  misc_feature (900)..(1312): Homolog of NCBI NO: 15218525 NR Description: unknown protein; protein id: At1g10450.1
  misc_feature (417)..(816): Homolog of NCBI NO: 15218525 NR Description: unknown protein; protein id: At1g10450.1
  misc_feature (1)..(161): Homolog of NCBI NO: 15218525 NR Description: unknown protein; protein id: At1g10450.1
  misc_feature (337)..(816): Homolog of NCBI NO: 25402600 NR Description: protein T10O24.5 [imported] - Arabidopsis >gi|5091536|gb|AAD39565.1|AC007067_5 T10O24.5 [Arabidopsis
  misc_feature (900)..(1299): Homolog of NCBI NO: 25402600 NR Description: protein T10O24.5 [imported] - Arabidopsis >gi|5091536|gb|AAD39565.1|AC007067_5 T10O24.5 [Arabidopsis
  misc_feature (1)..(161): Homolog of NCBI NO: 25402600 NR Description: protein T10O24.5 [imported] - Arabidopsis >gi|5091536|gb|AAD39565.1|AC007067_5 T10O24.5 [Arabidopsis
  misc_feature (170)..(1191): Homolog of NCBI NO: 34894158 NR Description: putative co-repressor protein [Oryza sativa
  misc_feature (1)..(206): Homolog of NCBI NO: 34894158 NR Description: putative co-repressor protein [Oryza sativa
MKDFKAQRVDTTGVILRVKELFKGNRELILGFNTFLPKGFEITLRPEDDQPAAPKKPVEFEEAISFVNKIKTRFQGDDRVYKSFLDILNMYRKENKSITEVYHEVAILFRDHHDLLGEFTHFLPDTSATASTNDSVKVPVRDRGIKSLPTMRQIDLDKKDRIITSHPNRALKTENMDVDHERSLLKDSKEEVRRIDKKNDFMDDRDRKDYRGLDHDSHKEHFFNSKKKLIRKDDDSAEMSDQAREGDKFSGAIPSSSTYDEKGFIIDFLESHSQELAFVDRVKAKLDTADNQEFLRCLNLYSKEIISQPELQSLVSDLIGVYPDLMDAFKVFLAQCDKNDGLLSGIVSKSKSSTFYNILLTYLFGQSLWSEGKCPQPTKSLDKDTDREREKIERYRERDREKERLEKVAASQKWAKPISELDLSNCEQCTPSYRRLPKNLNVHTYFVLLQYPIPIASQKMEIGSQVLNDHWVSVTSGSEDYSFKHMRKNQYEESLFKCEDDRFELDMLLESVISATNRVEELLAKINSNELKTDTPICIEDHLTALNLRCIERLYSDHGLDVLDLLKKNAYLALPVILTRLKQKQEEWARCRTEFNKVWADIYTKNYHRSLDHRSFYFKQQDSKNLSTKALLAEIKEISEKKRGEDDALLALAAGNRRTISSNMSFDYPDPDLHEDLYQLIKYSCGEMCSTEQLDKVMKVWTEFLEPIFGVPSRPQGAEDREDAVKSTNHDREDQEDAVSPQNGASIANSMRSNGPRKVNESNQVRQASELDKDVTSSKTSDALLSCDNTQNDKMPKNLTTPDERAETKQAVSIERAHNSNALPLDGLLPQRNGKISSLSVADEEWYPFLLYSPGLSNSNPKPALTSGTEELKPNYVNGPRVEIGDNPVIPNGTVAEWFAGEAKVEREEGELSPTGDFEEDNYAVHGENDMEALSKSKENDATADDASAPRSSDGSGNTSHNGDVSGTDSGDGEDCYREDDIDHNKVESEGEAEEGMSDGHDDTEGDMPVLSISVKNLLHVKPLAKYVPPALYDKDNDDSRKNSQVFYGNDSFYVLFRLHQILYDRILSAKINSSSPDRKWKTSNPTNPADSYARIMDALYNLLDGTSDNSKFEDDCRAIIGTQSYVLFTLDKLIYKLIKHSSHMIQLTNVILQLQAVAADEMDNKLQQLYAYEKSRKPEKFLDAVYYENALVLLPDEDIYRIECEQSTPSKLSIQLLDYGHDKPDVTSISMDPTFAAYLHNVFLSYQPNAKENPRIYLKRNKRKNGGDDELCTTDEVKIINGLECKITCSSSKVSYVLDTEDVLHRAKRRKLLNQSGLPLAHDSVCSGSLIRQRRTQRYQKLLTGQ

SEQ ID NO: 74101 - protein, 1258 aa, Arabidopsis thaliana
  peptide (1)..(1258): Ceres Seq. ID no. 4993913
  misc_feature (1)..(35): Pfam Name: Paired amphipathic helix repeat Pfam Description: Paired amphipathic helix repeat
  misc_feature (1)..(1150): Homolog of NCBI NO: 15242192 NR Description: transcriptional regulatory - like protein; id: At5g15020.1 [Arabidopsis thaliana] >gi|11358896|pir||T51447
  misc_feature (1076)..(1256): Homolog of NCBI NO: 15242192 NR Description: transcriptional regulatory - like protein; id: At5g15020.1 [Arabidopsis thaliana] >gi|11358896|pir||T51447
  misc_feature (811)..(1223): Homolog of NCBI NO: 15218525 NR Description: unknown protein; protein id: At1g10450.1
  misc_feature (328)..(727): Homolog of NCBI NO: 15218525 NR Description: unknown protein; protein id: At1g10450.1
  misc_feature (1)..(72): Homolog of NCBI NO: 15218525 NR Description: unknown protein; protein id: At1g10450.1
  misc_feature (248)..(727): Homolog of NCBI NO: 25402600 NR Description: protein T10O24.5 [imported] - Arabidopsis >gi|5091536|gb|AAD39565.1|AC007067_5 T10O24.5 [Arabidopsis
  misc_feature (811)..(1210): Homolog of NCBI NO: 25402600 NR Description: protein T10O24.5 [imported] - Arabidopsis >gi|5091536|gb|AAD39565.1|AC007067_5 T10O24.5 [Arabidopsis
  misc_feature (1)..(72): Homolog of NCBI NO: 25402600 NR Description: protein T10O24.5 [imported] - Arabidopsis >gi|5091536|gb|AAD39565.1|AC007067_5 T10O24.5 [Arabidopsis
  misc_feature (81)..(1102): Homolog of NCBI NO: 34894158 NR Description: putative co-repressor protein [Oryza sativa
  misc_feature (1)..(117): Homolog of NCBI NO: 34894158 NR Description: putative co-repressor protein [Oryza sativa
MYRKENKSITEVYHEVAILFRDHHDLLGEFTHFLPDTSATASTNDSVKVPVRDRGIKSLPTMRQIDLDKKDRIITSHPNRALKTENMDVDHERSLLKDSKEEVRRIDKKNDFMDDRDRKDYRGLDHDSHKEHFFNSKKKLIRKDDDSAEMSDQAREGDKFSGAIPSSSTYDEKGFIIDFLESHSQELAFVDRVKAKLDTADNQEFLRCLNLYSKEIISQPELQSLVSDLIGVYPDLMDAFKVFLAQCDKNDGLLSGIVSKSKSSTFYNILLTYLFGQSLWSEGKCPQPTKSLDKDTDREREKIERYRERDREKERLEKVAASQKWAKPISELDLSNCEQCTPSYRRLPKNLNVHTYFVLLQYPIPIASQKMEIGSQVLNDHWVSVTSGSEDYSFKHMRKNQYEESLFKCEDDRFELDMLLESVISATNRVEELLAKINSNELKTDTPICIEDHLTALNLRCIERLYSDHGLDVLDLLKKNAYLALPVILTRLKQKQEEWARCRTEFNKVWADIYTKNYHRSLDHRSFYFKQQDSKNLSTKALLAEIKEISEKKRGEDDALLALAAGNRRTISSNMSFDYPDPDLHEDLYQLIKYSCGEMCSTEQLDKVMKVWTEFLEPIFGVPSRPQGAEDREDAVKSTNHDREDQEDAVSPQNGASIANSMRSNGPRKVNESNQVRQASELDKDVTSSKTSDALLSCDNTQNDKMPKNLTTPDERAETKQAVSIERAHNSNALPLDGLLPQRNGKISSLSVADEEWYPFLLYSPGLSNSNPKPALTSGTEELKPNYVNGPRVEIGDNPVIPNGTVAEWFAGEAKVEREEGELSPTGDFEEDNYAVHGENDMEALSKSKENDATADDASAPRSSDGSGNTSHNGDVSGTDSGDGEDCYREDDIDHNKVESEGEAEEGMSDGHDDTEGDMPVLSISVKNLLHVKPLAKYVPPALYDKDNDDSRKNSQVFYGNDSFYVLFRLHQILYDRILSAKINSSSPDRKWKTSNPTNPADSYARIMDALYNLLDGTSDNSKFEDDCRAIIGTQSYVLFTLDKLIYKLIKHSSHMIQLTNVILQLQAVAADEMDNKLQQLYAYEKSRKPEKFLDAVYYENALVLLPDEDIYRIECEQSTPSKLSIQLLDYGHDKPDVTSISMDPTFAAYLHNVFLSYQPNAKENPRIYLKRNKRKNGGDDELCTTDEVKIINGLECKITCSSSKVSYVLDTEDVLHRAKRRKLLNQSGLPLAHDSVCSGSLIRQRRTQRYQKLLTGQ

SEQ ID NO: 74102 - DNA, 471 bp, Arabidopsis thaliana
  misc_feature (1)..(471): Ceres Seq. ID no. 4994080
  misc_feature: MA Experiment ID: 20000306 Result: Down-regulated in Transcription
  misc_feature: MA Experiment 20000306 PARAMETER Experiment Name: At_Germinating_Seeds_Sub_P Parameter: Age (hr) Value: 6 vs. 0
  misc_feature: MA Experiment 20000306 PARAMETER Experiment Name: At_Germinating_Seeds_Sub_P Parameter: Organism Value: A. thaliana
  misc_feature: MA Experiment 20000306 PARAMETER Experiment Name: At_Germinating_Seeds_Sub_P Parameter: Plant Line Value: WS
  misc_feature: MA Experiment 20000306 PARAMETER Experiment Name: At_Germinating_Seeds_Sub_P Parameter: Tissue Value: Germinating Seeds
  misc_feature: MA Experiment ID: 20000307 Result: Down-regulated in Transcription
  misc_feature: MA Experiment 20000307 PARAMETER Experiment Name: At_Germinating_Seeds_Sub_P Parameter: Age (hr) Value: 24 vs. 0
  misc_feature: MA Experiment 20000307 PARAMETER Experiment Name: At_Germinating_Seeds_Sub_P Parameter: Organism Value: A. thaliana
  misc_feature: MA Experiment 20000307 PARAMETER Experiment Name: At_Germinating_Seeds_Sub_P Parameter: Plant Line Value: WS
  misc_feature: MA Experiment 20000307 PARAMETER Experiment Name: At_Germinating_Seeds_Sub_P Parameter: Tissue Value: Germinating Seeds
  misc_feature: MA Experiment ID: 20000315 Result: Up-regulated in Transcription
  misc_feature: MA Experiment 20000315 PARAMETER Experiment Name: At_14day_Shoots-Roots_Sub_P Parameter: Age (day) Value: 14
  misc_feature: MA Experiment 20000315 PARAMETER Experiment Name: At_14day_Shoots-Roots_Sub_P Parameter: Organism Value: A. thaliana
  misc_feature: MA Experiment 20000315 PARAMETER Experiment Name: At_14day_Shoots-Roots_Sub_P Parameter: Plant Line Value: WS
  misc_feature: MA Experiment 20000315 PARAMETER Experiment Name: At_14day_Shoots-Roots_Sub_P Parameter: Tissue Value: Shoots vs. Whole Plant
  misc_feature: MA Experiment ID: 20000327 Result: Up-regulated in Transcription
  misc_feature: MA Experiment 20000327 PARAMETER Experiment Name: At_42deg_Heat_Sub_P Parameter: Age (day) Value: 14
  misc_feature: MA Experiment 20000327 PARAMETER Experiment Name: At_42deg_Heat_Sub_P Parameter: Organism Value: A. thaliana
  misc_feature: MA Experiment 20000327 PARAMETER Experiment Name: At_42deg_Heat_Sub_P Parameter: Plant Line Value: WS
  misc_feature: MA Experiment 20000327 PARAMETER Experiment Name: At_42deg_Heat_Sub_P Parameter: Temperature (deg C) Value: 42 vs. 22
  misc_feature: MA Experiment 20000327 PARAMETER Experiment Name: At_42deg_Heat_Sub_P Parameter: Timepoint (hr) Value: 1
  misc_feature: MA Experiment 20000327 PARAMETER Experiment Name: At_42deg_Heat_Sub_P Parameter: Tissue Value: Aerial
  misc_feature: MA Experiment ID: 20000328 Result: Up-regulated in Transcription
  misc_feature: MA Experiment 20000328 PARAMETER Experiment Name: At_42deg_Heat_Sub_P Parameter: Age (day) Value: 14
  misc_feature: MA Experiment 20000328 PARAMETER Experiment Name: At_42deg_Heat_Sub_P Parameter: Organism Value: A. thaliana
  misc_feature: MA Experiment 20000328 PARAMETER Experiment Name: At_42deg_Heat_Sub_P Parameter: Plant Line Value: WS
  misc_feature: MA Experiment 20000328 PARAMETER Experiment Name: At_42deg_Heat_Sub_P Parameter: Temperature (deg C) Value: 42 vs. 22
  misc_feature: MA Experiment 20000328 PARAMETER Experiment Name: At_42deg_Heat_Sub_P Parameter: Timepoint (hr) Value: 6
  misc_feature: MA Experiment 20000328 PARAMETER Experiment Name: At_42deg_Heat_Sub_P Parameter: Tissue Value: Aerial
  misc_feature: MA Experiment ID: 20000347 Result: Up-regulated in Transcription
  misc_feature: MA Experiment 20000347 PARAMETER Experiment Name: At_2mM_SA_Sub_P Parameter: Age (day) Value: 14
  misc_feature: MA Experiment 20000347 PARAMETER Experiment Name: At_2mM_SA_Sub_P Parameter: Organism Value: A. thaliana
  misc_feature: MA Experiment 20000347 PARAMETER Experiment Name: At_2mM_SA_Sub_P Parameter: Plant Line Value: WS
  misc_feature: MA Experiment 20000347 PARAMETER Experiment Name: At_2mM_SA_Sub_P Parameter: Timepoint (hr) Value: 6
  misc_feature: MA Experiment 20000347 PARAMETER Experiment Name: At_2mM_SA_Sub_P Parameter: Tissue Value: Aerial
  misc_feature: MA Experiment 20000347 PARAMETER Experiment Name: At_2mM_SA_Sub_P Parameter: Treatment Value: 2mM SA vs. No Treatment
atgtctctagttccgagcttttttggaggccgaagaacaaacgtgttcgacccattttcactagacgtatgggatccgttcgaaggattcttgacgcccgggttgacaaacgcacctgccaaggacgtggcagcgttcacaaacgctaaagtggactggagggagacacctgaagcgcatgtgttcaaggcggacgtgcctgggcttaagaaggaagaggtgaaggtggaggttgaagatggtaacatacttcagataagcggtgagaggagcagtgagaatgaagagaagagtgacacatggcaccgtgtggagcggtcaagtgggaagttcatgaggaggtttcggttgccagagaatgcaaaggtggaggaagtaaaggcgagtatggagaatggggtgttgtcggttacggtgccgaaagttcaggagagtaagccggaggtcaagtccgttgatatctctggttaa

SEQ ID NO: 74103 - protein, 156 aa, Arabidopsis thaliana
  peptide (1)..(156): Ceres Seq. ID no. 4994081
  misc_feature (1)..(156): Homolog of NCBI NO: 15231372 NR Description: heat shock protein 17; protein id: At3g46230.1, by cDNA: gi_15294149 [Arabidopsis thaliana]
  misc_feature (1)..(156): Homolog of NCBI NO: 81639 NR Description: heat shock protein 17 - Arabidopsis thaliana
  misc_feature (1)..(156): Homolog of NCBI NO: 15294150 NR Description: AT3g46230/F12M12_200 [Arabidopsis thaliana]
  misc_feature (1)..(156): Homolog of NCBI NO: 7441319 NR Description: heat-shock protein 17.6, low molecular weight -
  misc_feature (1)..(156): Homolog of NCBI NO: 8671873 NR Description: Contains similarity to 17.6 KD class I heat shock from Arabidopsis thaliana gi|P13853 and contains Hsp20/alpha PF|00011 and signal peptidase I PF|00461 domains. ESTs
  misc_feature (1)..(156): Homolog of NCBI NO: 15220832 NR Description: 17.6 kDa heat shock protein (AA 1-156); protein At1g53540.1 [Arabidopsis thaliana]
  misc_feature (1)..(156): Homolog of NCBI NO: 8250119 NR Description: HSP17.7-a protein [Brassica oleracea]
  misc_feature (1)..(156): Homolog of NCBI NO: 21618106 NR Description: heat shock protein 18 [Arabidopsis thaliana]
  misc_feature (1)..(156): Homolog of NCBI NO: 15238509 NR Description: heat shock protein 18; protein id: At5g59720.1, by cDNA: 97197. [Arabidopsis thaliana]
  misc_feature (1)..(156): Homolog of NCBI NO: 7441323 NR Description: heat shock protein 18p - common tobacco
MSLVPSFFGGRRTNVFDPFSLDVWDPFEGFLTPGLTNAPAKDVAAFTNAKVDWRETPEAHVFKADVPGLKKEEVKVEVEDGNILQISGERSSENEEKSDTWHRVERSSGKFMRRFRLPENAKVEEVKASMENGVLSVTVPKVQESKPEVKSVDISG

SEQ ID NO: 74104 - DNA, 2148 bp, Arabidopsis thaliana
  misc_feature (1)..(2148): Ceres Seq. ID no. 4994142
  misc_feature: MA Experiment ID: 20000180 Result: Up-regulated in Transcription
  misc_feature: MA Experiment 20000180 PARAMETER Experiment Name: At_Germinating_Seeds_P Parameter: Age (hr) Value: 24 vs. 0
  misc_feature: MA Experiment 20000180 PARAMETER Experiment Name: At_Germinating_Seeds_P Parameter: Tissue Value: Germinating Seeds
  misc_feature: MA Experiment ID: 20000184 Result: Up-regulated in Transcription
  misc_feature: MA Experiment 20000184 PARAMETER Experiment Name: At_Shoots__P Parameter: Age (day) Value: 7
  misc_feature: MA Experiment 20000184 PARAMETER Experiment Name: At_Shoots__P Parameter: Tissue Value: Shoots vs. Whole Plant
  misc_feature: MA Experiment ID: 20000265 Result: Up-regulated in Transcription
  misc_feature: MA Experiment 20000265 PARAMETER Experiment Name: At_Open_Flower_P Parameter: Age (day) Value: 21
  misc_feature: MA Experiment 20000265 PARAMETER Experiment Name: At_Open_Flower_P Parameter: Plant Line Value: WS
  misc_feature: MA Experiment 20000265 PARAMETER Experiment Name: At_Open_Flower_P Parameter: Tissue Value: Closed Flower vs. Whole Plant
  misc_feature: MA Experiment ID: 20000437 Result: Down-regulated in Transcription
  misc_feature: MA Experiment 20000437 PARAMETER Experiment Name: At_Drought_P Parameter: Age (day) Value: 8
  misc_feature: MA Experiment 20000437 PARAMETER Experiment Name: At_Drought_P Parameter: Organism Value: A. thaliana
  misc_feature: MA Experiment 20000437 PARAMETER Experiment Name: At_Drought_P Parameter: Plant Line Value: WS
  misc_feature: MA Experiment 20000437 PARAMETER Experiment Name: At_Drought_P Parameter: Timepoint (hr) Value: 24
  misc_feature: MA Experiment 20000437 PARAMETER Experiment Name: At_Drought_P Parameter: Tissue Value: Whole Plant
  misc_feature: MA Experiment 20000437 PARAMETER Experiment Name: At_Drought_P Parameter: Treatment Value: Drought vs. No Drought
  misc_feature: MA Experiment ID: 20000438 Result: Up-regulated in Transcription
  misc_feature: MA Experiment 20000438 PARAMETER Experiment Name: At_Shoots__P Parameter: Age (day) Value: 14
  misc_feature: MA Experiment 20000438 PARAMETER Experiment Name: At_Shoots__P Parameter: Tissue Value: Shoots vs. Whole Plant
atgtctctctttctctccttcttcatttcaatcttgctctgtttcttcaatggagctacgacgacacagtttgatttctccacgctagccataagcaacctcaaactcctcggtgatgcacgtttaagcaatggaatcgttggcctcacacgtgacctctctgtacctaattccggcgccggaaaagtcttatactctaacccaatcagattccgacaacctggaactcactttccgacaagcttctcttcttttttctccttctctataaccaatgtcaacccttcttccatcggcggtggtctcgctttcgtcatctctcccgacgcaaactcaatcggcatcgctggtggctctcttggtctaaccggtccaaacggttccggttcaaaatttgtcgccgtcgaattcgatactttaatggatgtagatttcaaggacattaacagtaaccatgttggattcgacgtaaatggcgtagtttcctctgtttccggtgatcttggcaccgtaaacatcgatctcaagagcggcaacaccatcaattcatggatcgaatacgacggattgactcgggtcttcaacgtatcagtctcttactcaaatctgaaaccgaaagttccaattttgtctttccctctcgatttagatcgatacgtgaacgatttcatgttcgttggattctccgggtcaactcagggaagtacagagattcacagtatcgaatggtggagcttcagttcatcattcgggtcgagtctcggatccggatccgggtcacctcctcctcgggctaatttgatgaatccgaaagctaattcggtgaaatctccgccgccgttggcgtcacaaccgtcgtcttcagcgattccgatctcaagcaacactcaattaaaaacttcgtcgtcgtcgtcttgccacagccgtttctgcaaagagaatcccggaacaatcgccggagtagtaaccgccggagctttcttcttagcactattcgccggagctttattctgggtttactccaaaaagttcaaacgtgtcgagagatctgattcattcgcatctgaaatcatcaaagctccgaaagagttcagctataaagaactcaaagccggcacaaagaacttcaacgagagtcgtatcatcggacatggagccttcggagtcgtatacagaggaatattaccggagaccggagacatcgtcgccgtcaaacgatgcagccatagctcacaagacaaaaagaacgagtttttatctgaactatcaataatcggaagcttaagacacagaaacctcgtgagattacaaggatggtgtcacgagaaaggtgagattttgttagtctacgatctaatgcctaatggttcgcttgataaagctttgtttgagtcacgattcacgttaccgtgggatcatcggaaaaagatcttgcttggtgttgcatctgctttagcttatttacatagagagtgtgagaatcaggtgattcatagagatgttaagagtagtaatataatgttagatgagagttttaatgccaagcttggagatttcggattggcgagacagattgagcatgataagtcgccggaagcaactgttgccgccgggacgatgggatatttagcgccggagtatcttctgacgggtcgtgcttcggagaagacggatgtgtttagttacggagcggtggttttggaagtggttagtggaagaagaccgattgagaaggacttaaatgtgcaaagacataatgttggggtgaatccgaatttagtagaatgggtgtggggtttgtataaagaagggaaagtttctgcagctgctgattctaggcttgaaggtaagtttgatgaaggtgagatgtggcgggtcttggttgtgggcttggcttgttcgcatccggatccagcatttaggcccactatgaggtcagtggtgcaaatgctgattggtgaggctgatgtaccggttgtgcctaagtctagacccaccatgagttttagcacttcgcatttgttgctgagtttgcaagatactctctctgattgtaataccgtggctttgaactctagtcgatcgtcttcgtggtcggtgcccgaacataacgttatcattcgaagcgacgatgaccatttggtatag

SEQ ID NO: 74105 - protein, 715 aa, Arabidopsis thaliana
  peptide (1)..(715): Ceres Seq. ID no. 4994143
  misc_feature (376)..(575): Pfam Name: Protein kinase domain Pfam Description: Protein kinase domain
  misc_feature (22)..(711): Homolog of NCBI NO: 15242646 NR Description: receptor like protein kinase; protein id: supported by cDNA: gi_20260625 [Arabidopsis thaliana]
  misc_feature (329)..(684): Homolog of NCBI NO: 15241048 NR Description: serine/threonine-specific kinase like protein;
  misc_feature (16)..(249): Homolog of NCBI NO: 15241048 NR Description: serine/threonine-specific kinase like protein;
  misc_feature (326)..(667): Homolog of NCBI NO: 15238300 NR Description: receptor lectin kinase-like protein; protein id:
  misc_feature (13)..(252): Homolog of NCBI NO: 15238300 NR Description: receptor lectin kinase-like protein; protein id:
  misc_feature (312)..(658): Homolog of NCBI NO: 38112429 NR Description: lectin-like receptor kinase 7;3 [Medicago
  misc_feature (4)..(246): Homolog of NCBI NO: 38112429 NR Description: lectin-like receptor kinase 7;3 [Medicago
  misc_feature (351)..(669): Homolog of NCBI NO: 15289871 NR Description: putative receptor protein kinase-like protein
  misc_feature (21)..(249): Homolog of NCBI NO: 15289871 NR Description: putative receptor protein kinase-like protein
  misc_feature (312)..(661): Homolog of NCBI NO: 15233300 NR Description: probable serine/threonine-specific protein protein id: At3g55550.1 [Arabidopsis thaliana]
MSLFLSFFISILLCFFNGATTTQFDFSTLAISNLKLLGDARLSNGIVGLTRDLSVPNSGAGKVLYSNPIRFRQPGTHFPTSFSSFFSFSITNVNPSSIGGGLAFVISPDANSIGIAGGSLGLTGPNGSGSKFVAVEFDTLMDVDFKDINSNHVGFDVNGVVSSVSGDLGTVNIDLKSGNTINSWIEYDGLTRVFNVSVSYSNLKPKVPILSFPLDLDRYVNDFMFVGFSGSTQGSTEIHSIEWWSFSSSFGSSLGSGSGSPPPRANLMNPKANSVKSPPPLASQPSSSAIPISSNTQLKTSSSSSCHSRFCKENPGTIAGVVTAGAFFLALFAGALFWVYSKKFKRVERSDSFASEIIKAPKEFSYKELKAGTKNFNESRIIGHGAFGVVYRGILPETGDIVAVKRCSHSSQDKKNEFLSELSIIGSLRHRNLVRLQGWCHEKGEILLVYDLMPNGSLDKALFESRFTLPWDHRKKILLGVASALAYLHRECENQVIHRDVKSSNIMLDESFNAKLGDFGLARQIEHDKSPEATVAAGTMGYLAPEYLLTGRASEKTDVFSYGAVVLEVVSGRRPIEKDLNVQRHNVGVNPNLVEWVWGLYKEGKVSAAADSRLEGKFDEGEMWRVLVVGLACSHPDPAFRPTMRSVVQMLIGEADVPVVPKSRPTMSFSTSHLLLSLQDTLSDCNTVALNSSRSSSWSVPEHNVIIRSDDDHLV

SEQ ID NO: 74106 - protein, 575 aa, Arabidopsis thaliana
  peptide (1)..(575): Ceres Seq. ID no. 4994144
  misc_feature (236)..(435): Pfam Name: Protein kinase domain Pfam Description: Protein kinase domain
  misc_feature (1)..(571): Homolog of NCBI NO: 15242646 NR Description: receptor like protein kinase; protein id: supported by cDNA: gi_20260625 [Arabidopsis thaliana]
  misc_feature (189)..(544): Homolog of NCBI NO: 15241048 NR Description: serine/threonine-specific kinase like protein;
  misc_feature (1)..(109): Homolog of NCBI NO: 15241048 NR Description: serine/threonine-specific kinase like protein;
  misc_feature (186)..(527): Homolog of NCBI NO: 15238300 NR Description: receptor lectin kinase-like protein; protein id:
  misc_feature (1)..(112): Homolog of NCBI NO: 15238300 NR Description: receptor lectin kinase-like protein; protein id:
  misc_feature (172)..(518): Homolog of NCBI NO: 38112429 NR Description: lectin-like receptor kinase 7;3 [Medicago
  misc_feature (1)..(106): Homolog of NCBI NO: 38112429 NR Description: lectin-like receptor kinase 7;3 [Medicago
  misc_feature (211)..(529): Homolog of NCBI NO: 15289871 NR Description: putative receptor protein kinase-like protein
  misc_feature (1)..(109): Homolog of NCBI NO: 15289871 NR Description: putative receptor protein kinase-like protein
  misc_feature (172)..(521): Homolog of NCBI NO: 15233300 NR Description: probable serine/threonine-specific protein protein id: At3g55550.1 [Arabidopsis thaliana]
MDVDFKDINSNHVGFDVNGVVSSVSGDLGTVNIDLKSGNTINSWIEYDGLTRVFNVSVSYSNLKPKVPILSFPLDLDRYVNDFMFVGFSGSTQGSTEIHSIEWWSFSSSFGSSLGSGSGSPPPRANLMNPKANSVKSPPPLASQPSSSAIPISSNTQLKTSSSSSCHSRFCKENPGTIAGVVTAGAFFLALFAGALFWVYSKKFKRVERSDSFASEIIKAPKEFSYKELKAGTKNFNESRIIGHGAFGVVYRGILPETGDIVAVKRCSHSSQDKKNEFLSELSIIGSLRHRNLVRLQGWCHEKGEILLVYDLMPNGSLDKALFESRFTLPWDHRKKILLGVASALAYLHRECENQVIHRDVKSSNIMLDESFNAKLGDFGLARQIEHDKSPEATVAAGTMGYLAPEYLLTGRASEKTDVFSYGAVVLEVVSGRRPIEKDLNVQRHNVGVNPNLVEWVWGLYKEGKVSAAADSRLEGKFDEGEMWRVLVVGLACSHPDPAFRPTMRSVVQMLIGEADVPVVPKSRPTMSFSTSHLLLSLQDTLSDCNTVALNSSRSSSWSVPEHNVIIRSDDDHLV

SEQ ID NO: 74107 - protein, 492 aa, Arabidopsis thaliana
  peptide (1)..(492): Ceres Seq. ID no. 4994145
  misc_feature (153)..(352): Pfam Name: Protein kinase domain Pfam Description: Protein kinase domain
  misc_feature (1)..(488): Homolog of NCBI NO: 15242646 NR Description: receptor like protein kinase; protein id: supported by cDNA: gi_20260625 [Arabidopsis thaliana]
  misc_feature (106)..(461): Homolog of NCBI NO: 15241048 NR Description: serine/threonine-specific kinase like protein;
  misc_feature (1)..(26): Homolog of NCBI NO: 15241048 NR Description: serine/threonine-specific kinase like protein;
  misc_feature (103)..(444): Homolog of NCBI NO: 15238300 NR Description: receptor lectin kinase-like protein; protein id:
  misc_feature (1)..(29): Homolog of NCBI NO: 15238300 NR Description: receptor lectin kinase-like protein; protein id:
  misc_feature (89)..(435): Homolog of NCBI NO: 38112429 NR Description: lectin-like receptor kinase 7;3 [Medicago
  misc_feature (1)..(23): Homolog of NCBI NO: 38112429 NR Description: lectin-like receptor kinase 7;3 [Medicago
  misc_feature (128)..(446): Homolog of NCBI NO: 15289871 NR Description: putative receptor protein kinase-like protein
  misc_feature (1)..(26): Homolog of NCBI NO: 15289871 NR Description: putative receptor protein kinase-like protein
  misc_feature (89)..(438): Homolog of NCBI NO: 15233300 NR Description: probable serine/threonine-specific protein protein id: At3g55550.1 [Arabidopsis thaliana]
MFVGFSGSTQGSTEIHSIEWWSFSSSFGSSLGSGSGSPPPRANLMNPKANSVKSPPPLASQPSSSAIPISSNTQLKTSSSSSCHSRFCKENPGTIAGVVTAGAFFLALFAGALFWVYSKKFKRVERSDSFASEIIKAPKEFSYKELKAGTKNFNESRIIGHGAFGVVYRGILPETGDIVAVKRCSHSSQDKKNEFLSELSIIGSLRHRNLVRLQGWCHEKGEILLVYDLMPNGSLDKALFESRFTLPWDHRKKILLGVASALAYLHRECENQVIHRDVKSSNIMLDESFNAKLGDFGLARQIEHDKSPEATVAAGTMGYLAPEYLLTGRASEKTDVFSYGAVVLEVVSGRRPIEKDLNVQRHNVGVNPNLVEWVWGLYKEGKVSAAADSRLEGKFDEGEMWRVLVVGLACSHPDPAFRPTMRSVVQMLIGEADVPVVPKSRPTMSFSTSHLLLSLQDTLSDCNTVALNSSRSSSWSVPEHNVIIRSDDDHLV

SEQ ID NO: 74108 - DNA, 876 bp, Arabidopsis thaliana
  misc_feature (1)..(876): Ceres Seq. ID no. 4994207
  misc_feature: MA Experiment ID: 20000184 Result: Up-regulated in Transcription
  misc_feature: MA Experiment 20000184 PARAMETER Experiment Name: At_Shoots__P Parameter: Age (day) Value: 7
  misc_feature: MA Experiment 20000184 PARAMETER Experiment Name: At_Shoots__P Parameter: Tissue Value: Shoots vs. Whole Plant
  misc_feature: MA Experiment ID: 20001451 Result: Up-regulated in Transcription
  misc_feature: MA Experiment 20001451 PARAMETER Experiment Name: At_Far-red-induction_P Parameter: Age (day) Value: 7
  misc_feature: MA Experiment 20001451 PARAMETER Experiment Name: At_Far-red-induction_P Parameter: Light Value: Far-red vs. White
  misc_feature: MA Experiment 20001451 PARAMETER Experiment Name: At_Far-red-induction_P Parameter: Organism Value: A. thaliana
  misc_feature: MA Experiment 20001451 PARAMETER Experiment Name: At_Far-red-induction_P Parameter: Plant Line Value: Columbia
  misc_feature: MA Experiment 20001451 PARAMETER Experiment Name: At_Far-red-induction_P Parameter: Timepoint (hr) Value: 24
  misc_feature: MA Experiment 20001451 PARAMETER Experiment Name: At_Far-red-induction_P Parameter: Tissue Value: Whole Plant
  misc_feature: Pfam Name: Pkinase Pfam Description: Protein kinase domain
atgacaagtaactttcaaagagctcttggtgaaggaggctttggcattgtctatcatggttatttgaatggttcagaggaagtagccgttaaagttgaacttctactgagagttcaccacacgaacttggtaagccttgtcgggtattgcgatgaacgaggtcacttggctctcatctacgaatatatgtccaacgtagacttaaaacatcacttgtcaggaaagcatgatgtctctattttgaagtggagtactcgattaagaatagccattgatgccgcactaggattggaatacttacatattggttgtcgaccatcaatggtacatagagatgtcaaaagtacaaatatattgttggacgatcaatttactgccaaaattgcggattttgggctttcaagatctttccaactcggagatgaatctcatatttcaacagttgttgctggtactcctggataccttgatcctgaaacgggtcggttggctgagatgagcgatgtctacagcttcgggattgtgttattggagatgatgacaaaccaacgtgtgattgaccaaaaccgtgaaaagcgacacataacagaatgggtagctttagtgcttaacagaggagacattaccaagatcatggatcctaatctttacggcgattacaactcaaattctgtttggaaagctcttgaattggctatgtcatgtgcaaacccatcttccgaaaaacgaccaagcatgtcccaagttatcagcgtactaaaagagtgtcttacttctgaaaacttgatgagaaataagaatcatgacatggaatccgatagttcccttgaactgaccaagagctttgatacagaagttgtccctcgtgctaggtag

SEQ ID NO: 74109 - protein, 291 aa, Arabidopsis thaliana
  peptide (1)..(291): Ceres Seq. ID no. 4994208
  misc_feature: Pfam Name: Pkinase Pfam Description: Protein kinase domain
  misc_feature (1)..(291): Homolog of NCBI NO: 15231426 NR Description: putative protein; protein id: At3g46410.1
  misc_feature (1)..(291): Homolog of NCBI NO: 33299928 NR Description: receptor-like protein kinase [Arabidopsis
  misc_feature (1)..(291): Homolog of NCBI NO: 33299934 NR Description: receptor-like protein kinase [Arabidopsis
  misc_feature (1)..(291): Homolog of NCBI NO: 33299952 NR Description: receptor-like protein kinase [Arabidopsis
  misc_feature (1)..(291): Homolog of NCBI NO: 33299954 NR Description: receptor-like protein kinase [Arabidopsis
  misc_feature (1)..(291): Homolog of NCBI NO: 33299930 NR Description: receptor-like protein kinase [Arabidopsis
  misc_feature (1)..(291): Homolog of NCBI NO: 33299942 NR Description: receptor-like protein kinase [Arabidopsis
  misc_feature (1)..(291): Homolog of NCBI NO: 33299932 NR Description: receptor-like protein kinase [Arabidopsis
  misc_feature (1)..(291): Homolog of NCBI NO: 33299946 NR Description: receptor-like protein kinase [Arabidopsis
  misc_feature (1)..(291): Homolog of NCBI NO: 33299924 NR Description: receptor-like protein kinase [Arabidopsis
MTSNFQRALGEGGFGIVYHGYLNGSEEVAVKVELLLRVHHTNLVSLVGYCDERGHLALIYEYMSNVDLKHHLSGKHDVSILKWSTRLRIAIDAALGLEYLHIGCRPSMVHRDVKSTNILLDDQFTAKIADFGLSRSFQLGDESHISTVVAGTPGYLDPETGRLAEMSDVYSFGIVLLEMMTNQRVIDQNREKRHITEWVALVLNRGDITKIMDPNLYGDYNSNSVWKALELAMSCANPSSEKRPSMSQVISVLKECLTSENLMRNKNHDMESDSSLELTKSFDTEVVPRAR

SEQ ID NO: 74110 - protein, 229 aa, Arabidopsis thaliana
  peptide (1)..(229): Ceres Seq. ID no. 4994209
  misc_feature: Pfam Name: Pkinase Pfam Description: Protein kinase domain
  misc_feature (1)..(229): Homolog of NCBI NO: 15231426 NR Description: putative protein; protein id: At3g46410.1
  misc_feature (1)..(229): Homolog of NCBI NO: 33299928 NR Description: receptor-like protein kinase [Arabidopsis
  misc_feature (1)..(229): Homolog of NCBI NO: 33299934 NR Description: receptor-like protein kinase [Arabidopsis
  misc_feature (1)..(229): Homolog of NCBI NO: 33299952 NR Description: receptor-like protein kinase [Arabidopsis
  misc_feature (1)..(229): Homolog of NCBI NO: 33299954 NR Description: receptor-like protein kinase [Arabidopsis
  misc_feature (1)..(229): Homolog of NCBI NO: 33299930 NR Description: receptor-like protein kinase [Arabidopsis
  misc_feature (1)..(229): Homolog of NCBI NO: 33299942 NR Description: receptor-like protein kinase [Arabidopsis
  misc_feature (1)..(229): Homolog of NCBI NO: 33299932 NR Description: receptor-like protein kinase [Arabidopsis
  misc_feature (1)..(229): Homolog of NCBI NO: 33299946 NR Description: receptor-like protein kinase [Arabidopsis
  misc_feature (1)..(229): Homolog of NCBI NO: 33299924 NR Description: receptor-like protein kinase [Arabidopsis
MSNVDLKHHLSGKHDVSILKWSTRLRIAIDAALGLEYLHIGCRPSMVHRDVKSTNILLDDQFTAKIADFGLSRSFQLGDESHISTVVAGTPGYLDPETGRLAEMSDVYSFGIVLLEMMTNQRVIDQNREKRHITEWVALVLNRGDITKIMDPNLYGDYNSNSVWKALELAMSCANPSSEKRPSMSQVISVLKECLTSENLMRNKNHDMESDSSLELTKSFDTEVVPRAR

SEQ ID NO: 74111 - protein, 184 aa, Arabidopsis thaliana
  peptide (1)..(184): Ceres Seq. ID no. 4994210
  misc_feature: Pfam Name: Pkinase Pfam Description: Protein kinase domain
  misc_feature (1)..(184): Homolog of NCBI NO: 15231426 NR Description: putative protein; protein id: At3g46410.1
  misc_feature (1)..(184): Homolog of NCBI NO: 33299928 NR Description: receptor-like protein kinase [Arabidopsis
  misc_feature (1)..(184): Homolog of NCBI NO: 33299934 NR Description: receptor-like protein kinase [Arabidopsis
  misc_feature (1)..(184): Homolog of NCBI NO: 33299952 NR Description: receptor-like protein kinase [Arabidopsis
  misc_feature (1)..(184): Homolog of NCBI NO: 33299954 NR Description: receptor-like protein kinase [Arabidopsis
  misc_feature (1)..(184): Homolog of NCBI NO: 33299930 NR Description: receptor-like protein kinase [Arabidopsis
  misc_feature (1)..(184): Homolog of NCBI NO: 33299942 NR Description: receptor-like protein kinase [Arabidopsis
  misc_feature (1)..(184): Homolog of NCBI NO: 33299932 NR Description: receptor-like protein kinase [Arabidopsis
  misc_feature (1)..(184): Homolog of NCBI NO: 33299946 NR Description: receptor-like protein kinase [Arabidopsis
  misc_feature (1)..(184): Homolog of NCBI NO: 33299924 NR Description: receptor-like protein kinase [Arabidopsis
MVHRDVKSTNILLDDQFTAKIADFGLSRSFQLGDESHISTVVAGTPGYLDPETGRLAEMSDVYSFGIVLLEMMTNQRVIDQNREKRHITEWVALVLNRGDITKIMDPNLYGDYNSNSVWKALELAMSCANPSSEKRPSMSQVISVLKECLTSENLMRNKNHDMESDSSLELTKSFDTEVVPRAR

SEQ ID NO: 74112 - DNA, 1707 bp, Arabidopsis thaliana
  misc_feature (1)..(1707): Ceres Seq. ID no. 4994249
  misc_feature: MA Experiment ID: 20000327 Result: Down-regulated in Transcription
  misc_feature: MA Experiment 20000327 PARAMETER Experiment Name: At_42deg_Heat_Sub_P Parameter: Age (day) Value: 14
  misc_feature: MA Experiment 20000327 PARAMETER Experiment Name: At_42deg_Heat_Sub_P Parameter: Organism Value: A. thaliana
  misc_feature: MA Experiment 20000327 PARAMETER Experiment Name: At_42deg_Heat_Sub_P Parameter: Plant Line Value: WS
  misc_feature: MA Experiment 20000327 PARAMETER Experiment Name: At_42deg_Heat_Sub_P Parameter: Temperature (deg C) Value: 42 vs. 22
  misc_feature: MA Experiment 20000327 PARAMETER Experiment Name: At_42deg_Heat_Sub_P Parameter: Timepoint (hr) Value: 1
  misc_feature: MA Experiment 20000327 PARAMETER Experiment Name: At_42deg_Heat_Sub_P Parameter: Tissue Value: Aerial
  misc_feature: MA Experiment ID: 20000328 Result: Down-regulated in Transcription
  misc_feature: MA Experiment 20000328 PARAMETER Experiment Name: At_42deg_Heat_Sub_P Parameter: Age (day) Value: 14
  misc_feature: MA Experiment 20000328 PARAMETER Experiment Name: At_42deg_Heat_Sub_P Parameter: Organism Value: A. thaliana
  misc_feature: MA Experiment 20000328 PARAMETER Experiment Name: At_42deg_Heat_Sub_P Parameter: Plant Line Value: WS
  misc_feature: MA Experiment 20000328 PARAMETER Experiment Name: At_42deg_Heat_Sub_P Parameter: Temperature (deg C) Value: 42 vs. 22
  misc_feature: MA Experiment 20000328 PARAMETER Experiment Name: At_42deg_Heat_Sub_P Parameter: Timepoint (hr) Value: 6
  misc_feature: MA Experiment 20000328 PARAMETER Experiment Name: At_42deg_Heat_Sub_P Parameter: Tissue Value: Aerial
  misc_feature: Pfam Name: Abhydrolase_1 Pfam Description: alpha/beta hydrolase fold
atggatcagctcgttaacttcatcattcgacctccaagagctgagtatgacccggaacatgatctcttggaaaagaagtttatgatgaaaggtagatggtatcagagaaaagatttagaggttaaaaacagtaggggagatgttctccagtgtagtcattatatgccagttgaacgccctgaaggaaagcctttaccctgtgtaatatactgccacggaaacagagcggatggtagtgaagccgcaattgtgttgctgccttcgaacatcacagtttttacccttgacttttcgggatcgggtctctcaggcggggaacatgtcaccttaggctggaacgaaaaggatgatctgaaggctgtggttgagtttttgcggcaggatggaaacatatccttgattgggctatgggggcggtcaatgggtgctgttactagcttgatgtatggagtcgaggatccttcgattgcaggaatgattctagacagccccttctccgatttagttgatctgatgatggaacttgttgatacatataagtttcgtctgccaaagtttactgtaaaatttgctatacagtttatgcggagagctattcagaaaaaagcaaagtttgatataatggaattgaacaccattaaggtcggtcctctacctgtggcaaaggctagttttgttccggttttatttggacatgccttagatgatgactttatccgccctcatcattcagatcgtatatatgaagcttacgtaggtgacaaaaatatcatcaaatttccgggagaccacaactccccaaggcctccattctattttgattcgatcaatatctttttccataacgttcttcaacccccagaggtggtggggccgacattttatgacccattggatgattactttgcaaatggcagttggggaactatgaatgacacaaatattccacaatcctctgtacagaaaagtttagccgcaggtagcatctctgaggcaattaatgaagtccgcaagaaacgacccatgagtcgcacagatgttccttcaaatgtcacactcacatctaacggttctccatcagaaactaaggaaaaagagaatcctgatggccgtggcagttcatcgtctcctgatatgataagctttgatttgtcagacggcaatcaataccctcctcaccttaggatggctttagatgatgatcaatatgttgagtatcagatggaggacatggctgatttcccatctaatgcagaggaagaagaaagaatgcttatgaaagcggtgatggaatcgttgaaagacttggaagtgcaaagtcaacagaaaaaagaacctcctgagacgagaattcatggcggctctgcttttttaaatgcagttcaatgcatttcatccagggaagaatcaacttcaactcgagcaaatcaatcagagactgattctgcttccagtccagtaacacgtagccaggatcaactaccgtcatcttctgagtccaatcctcctagtgagacctcgagttctctggcgagaaccgtaacctcttctgttcccggctctttaagccagaaggaaagcgagactggtgacgtgccaggtacaaaggccaccgtgacagtggaacgtagtagtagtgcaccggggaaagtcttagacgggttaatacgcaggtgggatcttaactttttcaaaaacaacaaataa

SEQ ID NO: 74113 - protein, 568 aa, Arabidopsis thaliana
  peptide (1)..(568): Ceres Seq. ID no. 4994250
  misc_feature: Pfam Name: Abhydrolase_1 Pfam Description: alpha/beta hydrolase fold
  misc_feature (1)..(568): Homolog of NCBI NO: 15229467 NR Description: unknown protein; protein id: At3g23540.1
  misc_feature (1)..(346): Homolog of NCBI NO: 9294510 NR Description: gene_id:MDB19.2~unknown protein [Arabidopsis
  misc_feature (347)..(568): Homolog of NCBI NO: 9294510 NR Description: gene_id:MDB19.2~unknown protein [Arabidopsis
  misc_feature (186)..(429): Homolog of NCBI NO: 30682775 NR Description: expressed protein [Arabidopsis thaliana]
  misc_feature (1)..(192): Homolog of NCBI NO: 30682775 NR Description: expressed protein [Arabidopsis thaliana]
  misc_feature (186)..(429): Homolog of NCBI NO: 7485140 NR Description: hypothetical protein - Arabidopsis thaliana hypothetical protein [Arabidopsis thaliana]
  misc_feature (10)..(192): Homolog of NCBI NO: 7485140 NR Description: hypothetical protein - Arabidopsis thaliana hypothetical protein [Arabidopsis thaliana]
  misc_feature (1)..(359): Homolog of NCBI NO: 26452722 NR Description: unknown protein [Arabidopsis thaliana]
  misc_feature (2)..(286): Homolog of NCBI NO: 28828687 NR Description: similar to Dictyostelium discoideum (Slime mold).
  misc_feature (114)..(286): Homolog of NCBI NO: 1688324 NR Description: random slug cDNA-11 [Dictyostelium discoideum]
MDQLVNFIIRPPRAEYDPEHDLLEKKFMMKGRWYQRKDLEVKNSRGDVLQCSHYMPVERPEGKPLPCVIYCHGNRADGSEAAIVLLPSNITVFTLDFSGSGLSGGEHVTLGWNEKDDLKAVVEFLRQDGNISLIGLWGRSMGAVTSLMYGVEDPSIAGMILDSPFSDLVDLMMELVDTYKFRLPKFTVKFAIQFMRRAIQKKAKFDIMELNTIKVGPLPVAKASFVPVLFGHALDDDFIRPHHSDRIYEAYVGDKNIIKFPGDHNSPRPPFYFDSINIFFHNVLQPPEVVGPTFYDPLDDYFANGSWGTMNDTNIPQSSVQKSLAAGSISEAINEVRKKRPMSRTDVPSNVTLTSNGSPSETKEKENPDGRGSSSSPDMISFDLSDGNQYPPHLRMALDDDQYVEYQMEDMADFPSNAEEEERMLMKAVMESLKDLEVQSQQKKEPPETRIHGGSAFLNAVQCISSREESTSTRANQSETDSASSPVTRSQDQLPSSSESNPPSETSSSLARTVTSSVPGSLSQKESETGDVPGTKATVTVERSSSAPGKVLDGLIRRWDLNFFKNNK

SEQ ID NO: 74114 - protein, 541 aa, Arabidopsis thaliana
  peptide (1)..(541): Ceres Seq. ID no. 4994251
  misc_feature: Pfam Name: Abhydrolase_1 Pfam Description: alpha/beta hydrolase fold
  misc_feature (1)..(541): Homolog of NCBI NO: 15229467 NR Description: unknown protein; protein id: At3g23540.1
  misc_feature (1)..(319): Homolog of NCBI NO: 9294510 NR Description: gene_id:MDB19.2~unknown protein [Arabidopsis
  misc_feature (320)..(541): Homolog of NCBI NO: 9294510 NR Description: gene_id:MDB19.2~unknown protein [Arabidopsis
  misc_feature (159)..(402): Homolog of NCBI NO: 30682775 NR Description: expressed protein [Arabidopsis thaliana]
  misc_feature (1)..(165): Homolog of NCBI NO: 30682775 NR Description: expressed protein [Arabidopsis thaliana]
  misc_feature (159)..(402): Homolog of NCBI NO: 7485140 NR Description: hypothetical protein - Arabidopsis thaliana hypothetical protein [Arabidopsis thaliana]
  misc_feature (1)..(165): Homolog of NCBI NO: 7485140 NR Description: hypothetical protein - Arabidopsis thaliana hypothetical protein [Arabidopsis thaliana]
  misc_feature (1)..(332): Homolog of NCBI NO: 26452722 NR Description: unknown protein [Arabidopsis thaliana]
  misc_feature (1)..(259): Homolog of NCBI NO: 28828687 NR Description: similar to Dictyostelium discoideum (Slime mold).
  misc_feature (87)..(259): Homolog of NCBI NO: 1688324 NR Description: random slug cDNA-11 [Dictyostelium discoideum]
MMKGRWYQRKDLEVKNSRGDVLQCSHYMPVERPEGKPLPCVIYCHGNRADGSEAAIVLLPSNITVFTLDFSGSGLSGGEHVTLGWNEKDDLKAVVEFLRQDGNISLIGLWGRSMGAVTSLMYGVEDPSIAGMILDSPFSDLVDLMMELVDTYKFRLPKFTVKFAIQFMRRAIQKKAKFDIMELNTIKVGPLPVAKASFVPVLFGHALDDDFIRPHHSDRIYEAYVGDKNIIKFPGDHNSPRPPFYFDSINIFFHNVLQPPEVVGPTFYDPLDDYFANGSWGTMNDTNIPQSSVQKSLAAGSISEAINEVRKKRPMSRTDVPSNVTLTSNGSPSETKEKENPDGRGSSSSPDMISFDLSDGNQYPPHLRMALDDDQYVEYQMEDMADFPSNAEEEERMLMKAVMESLKDLEVQSQQKKEPPETRIHGGSAFLNAVQCISSREESTSTRANQSETDSASSPVTRSQDQLPSSSESNPPSETSSSLARTVTSSVPGSLSQKESETGDVPGTKATVTVERSSSAPGKVLDGLIRRWDLNFFKNNK

SEQ ID NO: 74115 - protein, 540 aa, Arabidopsis thaliana
  peptide (1)..(540): Ceres Seq. ID no. 4994252
  misc_feature: Pfam Name: Abhydrolase_1 Pfam Description: alpha/beta hydrolase fold
  misc_feature (1)..(540): Homolog of NCBI NO: 15229467 NR Description: unknown protein; protein id: At3g23540.1
  misc_feature (1)..(318): Homolog of NCBI NO: 9294510 NR Description: gene_id:MDB19.2~unknown protein [Arabidopsis
  misc_feature (319)..(540): Homolog of NCBI NO: 9294510 NR Description: gene_id:MDB19.2~unknown protein [Arabidopsis
  misc_feature (158)..(401): Homolog of NCBI NO: 30682775 NR Description: expressed protein [Arabidopsis thaliana]
  misc_feature (1)..(164): Homolog of NCBI NO: 30682775 NR Description: expressed protein [Arabidopsis thaliana]
  misc_feature (158)..(401): Homolog of NCBI NO: 7485140 NR Description: hypothetical protein - Arabidopsis thaliana hypothetical protein [Arabidopsis thaliana]
  misc_feature (1)..(164): Homolog of NCBI NO: 7485140 NR Description: hypothetical protein - Arabidopsis thaliana hypothetical protein [Arabidopsis thaliana]
  misc_feature (1)..(331): Homolog of NCBI NO: 26452722 NR Description: unknown protein [Arabidopsis thaliana]
  misc_feature (1)..(258): Homolog of NCBI NO: 28828687 NR Description: similar to Dictyostelium discoideum (Slime mold).
  misc_feature (86)..(258): Homolog of NCBI NO: 1688324 NR Description: random slug cDNA-11 [Dictyostelium discoideum]
MKGRWYQRKDLEVKNSRGDVLQCSHYMPVERPEGKPLPCVIYCHGNRADGSEAAIVLLPSNITVFTLDFSGSGLSGGEHVTLGWNEKDDLKAVVEFLRQDGNISLIGLWGRSMGAVTSLMYGVEDPSIAGMILDSPFSDLVDLMMELVDTYKFRLPKFTVKFAIQFMRRAIQKKAKFDIMELNTIKVGPLPVAKASFVPVLFGHALDDDFIRPHHSDRIYEAYVGDKNIIKFPGDHNSPRPPFYFDSINIFFHNVLQPPEVVGPTFYDPLDDYFANGSWGTMNDTNIPQSSVQKSLAAGSISEAINEVRKKRPMSRTDVPSNVTLTSNGSPSETKEKENPDGRGSSSSPDMISFDLSDGNQYPPHLRMALDDDQYVEYQMEDMADFPSNAEEEERMLMKAVMESLKDLEVQSQQKKEPPETRIHGGSAFLNAVQCISSREESTSTRANQSETDSASSPVTRSQDQLPSSSESNPPSETSSSLARTVTSSVPGSLSQKESETGDVPGTKATVTVERSSSAPGKVLDGLIRRWDLNFFKNNK

SEQ ID NO: 74116 - DNA, 1452 bp, Arabidopsis thaliana
  misc_feature (1)..(1452): Ceres Seq. ID no. 4994304
  misc_feature: MA Experiment ID: 20000495 Result: Down-regulated in Transcription
  misc_feature: MA Experiment 20000495 PARAMETER Experiment Name: At_Guard_Cells_P Parameter: Harvest Date Value: 8/2/2002
  misc_feature: MA Experiment 20000495 PARAMETER Experiment Name: At_Guard_Cells_P Parameter: Organism Value: A. thaliana
  misc_feature: MA Experiment 20000495 PARAMETER Experiment Name: At_Guard_Cells_P Parameter: Tissue Value: Guard Cells vs. Leaves
  misc_feature: MA Experiment ID: 20000496 Result: Down-regulated in Transcription
  misc_feature: MA Experiment 20000496 PARAMETER Experiment Name: At_Guard_Cells_P Parameter: Harvest Date Value: 7/19/2002
  misc_feature: MA Experiment 20000496 PARAMETER Experiment Name: At_Guard_Cells_P Parameter: Organism Value: Canola
  misc_feature: MA Experiment 20000496 PARAMETER Experiment Name: At_Guard_Cells_P Parameter: Tissue Value: Guard Cells vs. Leaves
  misc_feature: MA Experiment ID: 20001451 Result: Down-regulated in Transcription
  misc_feature: MA Experiment 20001451 PARAMETER Experiment Name: At_Far-red-induction_P Parameter: Age (day) Value: 7
  misc_feature: MA Experiment 20001451 PARAMETER Experiment Name: At_Far-red-induction_P Parameter: Light Value: Far-red vs. White
  misc_feature: MA Experiment 20001451 PARAMETER Experiment Name: At_Far-red-induction_P Parameter: Organism Value: A. thaliana
  misc_feature: MA Experiment 20001451 PARAMETER Experiment Name: At_Far-red-induction_P Parameter: Plant Line Value: Columbia
  misc_feature: MA Experiment 20001451 PARAMETER Experiment Name: At_Far-red-induction_P Parameter: Timepoint (hr) Value: 24
  misc_feature: MA Experiment 20001451 PARAMETER Experiment Name: At_Far-red-induction_P Parameter: Tissue Value: Whole Plant
atggacaaggaatttgattcaaagcttactcttcaagggaattcatcttcaaatggtgaaactatttccagaagcaaaagcttcgcctttaaggctcctcaggagaatttcacttaccatgatttcgagctcggcaagatctatggcgttggctcttattctaaggttgttagggcgaagaagaaggataatggaactgtgtatgccttgaagatcatggacaaaaagtttatcaccaaggagaataaaacagcttatgtcaaattggagaggattgttcttgatcaactcgaacatcccgggattgtgaaactcttctttacgtttcaggatacacaatcactatacatggcgcttgagtcttgtgaaggtggggaacttttcgaccaaatcaccagaaaaggtcgtctatctgaggatgaagctcggttctacagtgcagaagttgttgatgctcttgagtatatacataatatgggactgatacatcgagatattaagccggagaatctgttgttaactttagatgggcacataaagattgctgattttggtagcgtaaagccaatgcaagacagccaaatcacagtgcttcctaatgcggcttctgatgataaggcgtgcacttttgtcgggacggctgcatatgttcctcctgaagttctaaactcctctccagcaacgttcggaaatgatctctgggcactcggctgcactctgtaccaaatgctttcaggaacttccccattcaaggatgcaagtgaatggctgattttccaaagaattatagctagagatataaagtttccaaatcatttctcagaagcagcaagagacctcatcgaccgattgctagatacagatcctagtagaagaccaggagctggatcagaaggttatgattctctcaagagacatcctttcttcaagggagttgactggaagaacctaaggtcacaaactcctccaaaactagctccagatcctgcgtctcaatcagcatctcctgagagggacggttctccatggaatccaacacatgttggagatacctcagtcttgcagaacgatggacacaatggactctctgaatcctcaggttccataactcggcttgcctccatagactctttcgattcaagatggcaacagtttctagaaccgggagaatcggttctaatgatatcagcagtgaagaagctacagaaaatcacaagtaagaaggtgcagctaatactcaccaacaaaccaagactgatatacgttgacccatcaaagcttgtagtaaaagggaatattatctggtctgataactccaacgacctcaacgttcaagtctcaagtccttcccatttcaagatttgcacaccgaagaaagttttatcgtttgaagatgcgaagcaaagagctttgcagtggaaaaaggcaatcgaaactcttcaaaaccgttga

SEQ ID NO: 74117 - protein, 483 aa, Arabidopsis thaliana; identical to SEQ ID NO: 49134
  peptide (1)..(483): Ceres Seq. ID no. 4994305
  misc_feature (42)..(309): Pfam Name: Protein kinase domain Pfam Description: Protein kinase domain
  misc_feature (1)..(483): Homolog of NCBI NO: 8567784 NR Description: 3-phosphoinositide-dependent protein kinase-1,
  misc_feature (1)..(483): Homolog of NCBI NO: 30681369 NR Description: 3-phosphoinositide-dependent protein kinase,
  misc_feature (1)..(483): Homolog of NCBI NO: 11357147 NR Description: 3-phosphoinositide-dependent protein kinase-1
  misc_feature (1)..(483): Homolog of NCBI NO: 18414583 NR Description: 3-phosphoinositide-dependent protein kinase-1 protein id: At5g04510.1, supported by cDNA: gi_13430827,
  misc_feature (1)..(481): Homolog of NCBI NO: 34908708 NR Description: putative 3-phosphoinositide-dependent protein
  misc_feature (142)..(481): Homolog of NCBI NO: 5001830 NR Description: 3-phosphoinositide-dependent protein kinase-1
  misc_feature (11)..(478): Homolog of NCBI NO: 38524443 NR Description: phosphoinositide dependent kinase-1 [Asterina
  misc_feature (41)..(365): Homolog of NCBI NO: 4505695 NR Description: 3-phosphoinositide dependent protein kinase-1;
  misc_feature (330)..(478): Homolog of NCBI NO: 4505695 NR Description: 3-phosphoinositide dependent protein kinase-1;
  misc_feature (41)..(325): Homolog of NCBI NO: 13592023 NR Description: 3-phosphoinositide dependent protein kinase-1

SEQ ID NO: 74118 - protein, 411 aa, Arabidopsis thaliana; identical to SEQ ID NO: 49135
  peptide (1)..(411): Ceres Seq. ID no. 4994306
  misc_feature (1)..(237): Pfam Name: Protein kinase domain Pfam Description: Protein kinase domain
  misc_feature (1)..(411): Homolog of NCBI NO: 8567784 NR Description: 3-phosphoinositide-dependent protein kinase-1,
  misc_feature (1)..(411): Homolog of NCBI NO: 30681369 NR Description: 3-phosphoinositide-dependent protein kinase,
  misc_feature (1)..(411): Homolog of NCBI NO: 11357147 NR Description: 3-phosphoinositide-dependent protein kinase-1
  misc_feature (1)..(411): Homolog of NCBI NO: 18414583 NR Description: 3-phosphoinositide-dependent protein kinase-1 protein id: At5g04510.1, supported by cDNA: gi_13430827,
  misc_feature (1)..(409): Homolog of NCBI NO: 34908708 NR Description: putative 3-phosphoinositide-dependent protein
  misc_feature (70)..(409): Homolog of NCBI NO: 5001830 NR Description: 3-phosphoinositide-dependent protein kinase-1
  misc_feature (1)..(406): Homolog of NCBI NO: 38524443 NR Description: phosphoinositide dependent kinase-1 [Asterina
  misc_feature (1)..(293): Homolog of NCBI NO: 4505695 NR Description: 3-phosphoinositide dependent protein kinase-1;
  misc_feature (258)..(406): Homolog of NCBI NO: 4505695 NR Description: 3-phosphoinositide dependent protein kinase-1;
  misc_feature (1)..(253): Homolog of NCBI NO: 13592023 NR Description: 3-phosphoinositide dependent protein kinase-1

SEQ ID NO: 74119 - protein, 367 aa, Arabidopsis thaliana
  peptide (1)..(367): Ceres Seq. ID no. 4994307
  misc_feature (1)..(193): Pfam Name: Protein kinase domain Pfam Description: Protein kinase domain
  misc_feature (1)..(367): Homolog of NCBI NO: 8567784 NR Description: 3-phosphoinositide-dependent protein kinase-1,
  misc_feature (1)..(367): Homolog of NCBI NO: 30681369 NR Description: 3-phosphoinositide-dependent protein kinase,
  misc_feature (1)..(367): Homolog of NCBI NO: 11357147 NR Description: 3-phosphoinositide-dependent protein kinase-1
  misc_feature (1)..(367): Homolog of NCBI NO: 18414583 NR Description: 3-phosphoinositide-dependent protein kinase-1 protein id: At5g04510.1, supported by cDNA: gi_13430827,
  misc_feature (1)..(365): Homolog of NCBI NO: 34908708 NR Description: putative 3-phosphoinositide-dependent protein
  misc_feature (26)..(365): Homolog of NCBI NO: 5001830 NR Description: 3-phosphoinositide-dependent protein kinase-1
  misc_feature (1)..(362): Homolog of NCBI NO: 38524443 NR Description: phosphoinositide dependent kinase-1 [Asterina
  misc_feature (1)..(249): Homolog of NCBI NO: 4505695 NR Description: 3-phosphoinositide dependent protein kinase-1;
  misc_feature (214)..(362): Homolog of NCBI NO: 4505695 NR Description: 3-phosphoinositide dependent protein kinase-1;
  misc_feature (1)..(209): Homolog of NCBI NO: 13592023 NR Description: 3-phosphoinositide dependent protein kinase-1
MALESCEGGELFDQITRKGRLSEDEARFYSAEVVDALEYIHNMGLIHRDIKPENLLLTLDGHIKIADFGSVKPMQDSQITVLPNAASDDKACTFVGTAAYVPPEVLNSSPATFGNDLWALGCTLYQMLSGTSPFKDASEWLIFQRIIARDIKFPNHFSEAARDLIDRLLDTDPSRRPGAGSEGYDSLKRHPFFKGVDWKNLRSQTPPKLAPDPASQSASPERDGSPWNPTHVGDTSVLQNDGHNGLSESSGSITRLASIDSFDSRWQQFLEPGESVLMISAVKKLQKITSKKVQLILTNKPRLIYVDPSKLVVKGNIIWSDNSNDLNVQVSSPSHFKICTPKKVLSFEDAKQRALQWKKAIETLQNR

SEQ ID NO: 74120 - DNA, 1566 bp, Arabidopsis thaliana
  misc_feature (1)..(1566): Ceres Seq. ID no. 4994409
  misc_feature: MA Experiment ID: 20000166 Result: Down-regulated in Transcription
  misc_feature: MA Experiment 20000166 PARAMETER Experiment Name: At_100uM_ABA_P Parameter: Age (day) Value: 14
  misc_feature: MA Experiment 20000166 PARAMETER Experiment Name: At_100uM_ABA_P Parameter: Organism Value: A. thaliana
  misc_feature: MA Experiment 20000166 PARAMETER Experiment Name: At_100uM_ABA_P Parameter: Plant Line Value: WS
  misc_feature: MA Experiment 20000166 PARAMETER Experiment Name: At_100uM_ABA_P Parameter: Timepoint (hr) Value: 1
  misc_feature: MA Experiment 20000166 PARAMETER Experiment Name: At_100uM_ABA_P Parameter: Tissue Value: Aerial
  misc_feature: MA Experiment 20000166 PARAMETER Experiment Name: At_100uM_ABA_P Parameter: Treatment Value: 100uM ABA vs. No Treatment
  misc_feature: MA Experiment ID: 20000171 Result: Down-regulated in Transcription
  misc_feature: MA Experiment 20000171 PARAMETER Experiment Name: At_42deg_Heat_P Parameter: Age (day) Value: 14
  misc_feature: MA Experiment 20000171 PARAMETER Experiment Name: At_42deg_Heat_P Parameter: Organism Value: A. thaliana
  misc_feature: MA Experiment 20000171 PARAMETER Experiment Name: At_42deg_Heat_P Parameter: Plant Line Value: WS
  misc_feature: MA Experiment 20000171 PARAMETER Experiment Name: At_42deg_Heat_P Parameter: Temperature (deg C) Value: 42 vs. 22
  misc_feature: MA Experiment 20000171 PARAMETER Experiment Name: At_42deg_Heat_P Parameter: Timepoint (hr) Value: 1
  misc_feature: MA Experiment 20000171 PARAMETER Experiment Name: At_42deg_Heat_P Parameter: Tissue Value: Aerial
  misc_feature: MA Experiment ID: 20000173 Result: Down-regulated in Transcription
  misc_feature: MA Experiment 20000173 PARAMETER Experiment Name: At_42deg_Heat_P Parameter: Age (day) Value: 14
  misc_feature: MA Experiment 20000173 PARAMETER Experiment Name: At_42deg_Heat_P Parameter: Organism Value: A. thaliana
  misc_feature: MA Experiment 20000173 PARAMETER Experiment Name: At_42deg_Heat_P Parameter: Plant Line Value: WS
  misc_feature: MA Experiment 20000173 PARAMETER Experiment Name: At_42deg_Heat_P Parameter: Temperature (deg C) Value: 42 vs. 22
  misc_feature: MA Experiment 20000173 PARAMETER Experiment Name: At_42deg_Heat_P Parameter: Timepoint (hr) Value: 6
  misc_feature: MA Experiment 20000173 PARAMETER Experiment Name: At_42deg_Heat_P Parameter: Tissue Value: Aerial
  misc_feature: MA Experiment ID: 20000182 Result: Down-regulated in Transcription
  misc_feature: MA Experiment 20000182 PARAMETER Experiment Name: At_2mM_SA_P Parameter: Age (day) Value: 14
  misc_feature: MA Experiment 20000182 PARAMETER Experiment Name: At_2mM_SA_P Parameter: Organism Value: A. thaliana
  misc_feature: MA Experiment 20000182 PARAMETER Experiment Name: At_2mM_SA_P Parameter: Plant Line Value: WS
  misc_feature: MA Experiment 20000182 PARAMETER Experiment Name: At_2mM_SA_P Parameter: Timepoint (hr) Value: 6
  misc_feature: MA Experiment 20000182 PARAMETER Experiment Name: At_2mM_SA_P Parameter: Tissue Value: Aerial
  misc_feature: MA Experiment 20000182 PARAMETER Experiment Name: At_2mM_SA_P Parameter: Treatment Value: 2mM SA vs. No Treatment
  misc_feature: MA Experiment ID: 20000184 Result: Down-regulated in Transcription
  misc_feature: MA Experiment 20000184 PARAMETER Experiment Name: At_Shoots__P Parameter: Age (day) Value: 7
  misc_feature: MA Experiment 20000184 PARAMETER Experiment Name: At_Shoots__P Parameter: Tissue Value: Shoots vs. Whole Plant
  misc_feature: MA Experiment ID: 20000234 Result: Down-regulated in Transcription
  misc_feature: MA Experiment 20000234 PARAMETER Experiment Name: At_Siliques_P Parameter: Age (day) Value: 21
  misc_feature: MA Experiment 20000234 PARAMETER Experiment Name: At_Siliques_P Parameter: Organism Value: A. thaliana
  misc_feature: MA Experiment 20000234 PARAMETER Experiment Name: At_Siliques_P Parameter: Plant Line Value: WS
  misc_feature: MA Experiment 20000234 PARAMETER Experiment Name: At_Siliques_P Parameter: Tissue Value: Less Than 5mm Siliques vs. Whole Plant
  misc_feature: MA Experiment ID: 20000264 Result: Down-regulated in Transcription
  misc_feature: MA Experiment 20000264 PARAMETER Experiment Name: At_Open_Flower_P Parameter: Age (day) Value: 21
  misc_feature: MA Experiment 20000264 PARAMETER Experiment Name: At_Open_Flower_P Parameter: Plant Line Value: WS
  misc_feature: MA Experiment 20000264 PARAMETER Experiment Name: At_Open_Flower_P Parameter: Tissue Value: Open Flower vs. Whole Plant
  misc_feature: MA Experiment ID: 20000441 Result: Up-regulated in Transcription
  misc_feature: MA Experiment 20000441 PARAMETER Experiment Name: At_1uM_BR-BRZ__P Parameter: Tissue Value: Shoot Apices
  misc_feature: MA Experiment 20000441 PARAMETER Experiment Name: At_1uM_BR-BRZ__P Parameter: Treatment Value: 1uM BR vs. No Treatment
  misc_feature: MA Experiment ID: 20000794 Result: Down-regulated in Transcription
  misc_feature: MA Experiment 20000794 PARAMETER Experiment Name: At_Petals_P Parameter: Age (day) Value: 23-25 days
  misc_feature: MA Experiment 20000794 PARAMETER Experiment Name: At_Petals_P Parameter: Plant Line Value: WS
  misc_feature: MA Experiment 20000794 PARAMETER Experiment Name: At_Petals_P Parameter: Tissue Value: Petals vs. Whole plant
  misc_feature: MA Experiment ID: 20001247 Result: Up-regulated in Transcription
  misc_feature: MA Experiment 20001247 PARAMETER Experiment Name: At_Far-red-induction_P Parameter: Age (day) Value: 7
  misc_feature: MA Experiment 20001247 PARAMETER Experiment Name: At_Far-red-induction_P Parameter: Light Value: Far-red vs. White
  misc_feature: MA Experiment 20001247 PARAMETER Experiment Name: At_Far-red-induction_P Parameter: Organism Value: A. thaliana
  misc_feature: MA Experiment 20001247 PARAMETER Experiment Name: At_Far-red-induction_P Parameter: Plant Line Value: Columbia
  misc_feature: MA Experiment 20001247 PARAMETER Experiment Name: At_Far-red-induction_P Parameter: Timepoint (hr) Value: 1
  misc_feature: MA Experiment 20001247 PARAMETER Experiment Name: At_Far-red-induction_P Parameter: Tissue Value: Whole Plant
  misc_feature: MA Experiment ID: 20001248 Result: Up-regulated in Transcription
  misc_feature: MA Experiment 20001248 PARAMETER Experiment Name: At_Far-red-induction_P Parameter: Age (day) Value: 7
  misc_feature: MA Experiment 20001248 PARAMETER Experiment Name: At_Far-red-induction_P Parameter: Light Value: Far-red vs. White
  misc_feature: MA Experiment 20001248 PARAMETER Experiment Name: At_Far-red-induction_P Parameter: Organism Value: A. thaliana
  misc_feature: MA Experiment 20001248 PARAMETER Experiment Name: At_Far-red-induction_P Parameter: Plant Line Value: Columbia
  misc_feature: MA Experiment 20001248 PARAMETER Experiment Name: At_Far-red-induction_P Parameter: Timepoint (hr) Value: 4
  misc_feature: MA Experiment 20001248 PARAMETER Experiment Name: At_Far-red-induction_P Parameter: Tissue Value: Whole Plant
  misc_feature: MA Experiment ID: 20001450 Result: Up-regulated in Transcription
  misc_feature: MA Experiment 20001450 PARAMETER Experiment Name: At_Far-red-induction_P Parameter: Age (day) Value: 7
  misc_feature: MA Experiment 20001450 PARAMETER Experiment Name: At_Far-red-induction_P Parameter: Light Value: Far-red vs. White
  misc_feature: MA Experiment 20001450 PARAMETER Experiment Name: At_Far-red-induction_P Parameter: Organism Value: A. thaliana
  misc_feature: MA Experiment 20001450 PARAMETER Experiment Name: At_Far-red-induction_P Parameter: Plant Line Value: Columbia
  misc_feature: MA Experiment 20001450 PARAMETER Experiment Name: At_Far-red-induction_P Parameter: Timepoint (hr) Value: 8
  misc_feature: MA Experiment 20001450 PARAMETER Experiment Name: At_Far-red-induction_P Parameter: Tissue Value: Whole Plant
  misc_feature: MA Experiment ID: 20001555 Result: Down-regulated in Transcription
  misc_feature: MA Experiment 20001555 PARAMETER Experiment Name: At_Drought_Soil_Dry_P Parameter: Age (day) Value: 24
  misc_feature: MA Experiment 20001555 PARAMETER Experiment Name: At_Drought_Soil_Dry_P Parameter: Organism Value: A. thaliana
  misc_feature: MA Experiment 20001555 PARAMETER Experiment Name: At_Drought_Soil_Dry_P Parameter: Plant Line Value: WS
  misc_feature: MA Experiment 20001555 PARAMETER Experiment Name: At_Drought_Soil_Dry_P Parameter: Post Timepoint (hr) Value: None
  misc_feature: MA Experiment 20001555 PARAMETER Experiment Name: At_Drought_Soil_Dry_P Parameter: Post-Treatment Value: None
  misc_feature: MA Experiment 20001555 PARAMETER Experiment Name: At_Drought_Soil_Dry_P Parameter: Timepoint (day) Value: 10
  misc_feature: MA Experiment 20001555 PARAMETER Experiment Name: At_Drought_Soil_Dry_P Parameter: Treatment Value: Drought vs. No Drought
  misc_feature: MA Experiment ID: 20001556 Result: Down-regulated in Transcription
  misc_feature: MA Experiment 20001556 PARAMETER Experiment Name: At_Drought_Soil_Dry_P Parameter: Age (day) Value: 26
  misc_feature: MA Experiment 20001556 PARAMETER Experiment Name: At_Drought_Soil_Dry_P Parameter: Organism Value: A. thaliana
  misc_feature: MA Experiment 20001556 PARAMETER Experiment Name: At_Drought_Soil_Dry_P Parameter: Plant Line Value: WS
  misc_feature: MA Experiment 20001556 PARAMETER Experiment Name: At_Drought_Soil_Dry_P Parameter: Post Timepoint (hr) Value: None
  misc_feature: MA Experiment 20001556 PARAMETER Experiment Name: At_Drought_Soil_Dry_P Parameter: Post-Treatment Value: None
  misc_feature: MA Experiment 20001556 PARAMETER Experiment Name: At_Drought_Soil_Dry_P Parameter: Timepoint (day) Value: 12
  misc_feature: MA Experiment 20001556 PARAMETER Experiment Name: At_Drought_Soil_Dry_P Parameter: Treatment Value: Drought vs. No Drought
  misc_feature: MA Experiment ID: 20001557 Result: Down-regulated in Transcription
  misc_feature: MA Experiment 20001557 PARAMETER Experiment Name: At_Drought_Soil_Dry_P Parameter: Age (day) Value: 27
  misc_feature: MA Experiment 20001557 PARAMETER Experiment Name: At_Drought_Soil_Dry_P Parameter: Organism Value: A. thaliana
  misc_feature: MA Experiment 20001557 PARAMETER Experiment Name: At_Drought_Soil_Dry_P Parameter: Plant Line Value: WS
  misc_feature: MA Experiment 20001557 PARAMETER Experiment Name: At_Drought_Soil_Dry_P Parameter: Post Timepoint (hr) Value: 3
  misc_feature: MA Experiment 20001557 PARAMETER Experiment Name: At_Drought_Soil_Dry_P Parameter: Post-Treatment Value: Re-Water vs. No Drought
  misc_feature: MA Experiment 20001557 PARAMETER Experiment Name: At_Drought_Soil_Dry_P Parameter: Timepoint (day) Value: 13
  misc_feature: MA Experiment 20001557 PARAMETER Experiment Name: At_Drought_Soil_Dry_P Parameter: Treatment Value: Drought vs. No Drought
  misc_feature: MA Experiment ID: 20001757 Result: Up-regulated in Transcription
  misc_feature: MA Experiment 20001757 PARAMETER Experiment Name: At_50mM_NH4NO3_L-to-H_P Parameter: Timepoint (hr) Value: 6
  misc_feature: MA Experiment 20001757 PARAMETER Experiment Name: At_50mM_NH4NO3_L-to-H_P Parameter: Tissue Value: Leaf
  misc_feature: MA Experiment 20001757 PARAMETER Experiment Name: At_50mM_NH4NO3_L-to-H_P Parameter: Treatment Value: 50mM NH4NO3 vs 100mM Mannitol
  misc_feature: MA Experiment ID: 20001904 Result: Down-regulated in Transcription
  misc_feature: MA Experiment 20001904 PARAMETER Experiment Name: At_Drought_Reproduction_P Parameter: Age (day) Value: 37
  misc_feature: MA Experiment 20001904 PARAMETER Experiment Name: At_Drought_Reproduction_P Parameter: Organism Value: A. thaliana
  misc_feature: MA Experiment 20001904 PARAMETER Experiment Name: At_Drought_Reproduction_P Parameter: Plant Line Value: WS
  misc_feature: MA Experiment 20001904 PARAMETER Experiment Name: At_Drought_Reproduction_P Parameter: Timepoint (day) Value: 7
  misc_feature: MA Experiment 20001904 PARAMETER Experiment Name: At_Drought_Reproduction_P Parameter: Tissue Value: Rosettes
  misc_feature: MA Experiment 20001904 PARAMETER Experiment Name: At_Drought_Reproduction_P Parameter: Treatment Value: Drought vs. No Drought
  misc_feature: MA Experiment ID: 20001905 Result: Down-regulated in Transcription
  misc_feature: MA Experiment 20001905 PARAMETER Experiment Name: At_Drought_Reproduction_P Parameter: Age (day) Value: 40
  misc_feature: MA Experiment 20001905 PARAMETER Experiment Name: At_Drought_Reproduction_P Parameter: Organism Value: A. thaliana
  misc_feature: MA Experiment 20001905 PARAMETER Experiment Name: At_Drought_Reproduction_P Parameter: Plant Line Value: WS
  misc_feature: MA Experiment 20001905 PARAMETER Experiment Name: At_Drought_Reproduction_P Parameter: Timepoint (day) Value: 10
  misc_feature: MA Experiment 20001905 PARAMETER Experiment Name: At_Drought_Reproduction_P Parameter: Tissue Value: Rosettes
  misc_feature: MA Experiment 20001905 PARAMETER Experiment Name: At_Drought_Reproduction_P Parameter: Treatment Value: Drought vs. No Drought
atgataaaacagagcaataagaagaaaaagaatcacaagaacagtagaatcatcatcgaggttgaagattttccaggtgggtcagatgggttcgacttggttttaagattctgttatggtggaggaatctcgatagatgtctcaaatgtgtccattttgcattgctcttctgtcttccttgagatgacagagaaactctgttcctcgaatctcttgcttcgaacagagaagtttctagaaggaatgttctactggtcctggaacgacatcgtattgtgtctcaagagctgcgagcaagtgttcttacacgctgattcttacggtcttgttgataagcttgttttcggggttttagccaaaatccctcagaattcagacgtgagtcatgtcttttcatcatcctctccgtcttcctctgcctctgcctcagcctcctctcagtcgccggagacggcaatgattaggtcgtattcagacaaaaggtctacttcgaggtctttttcttgcaggacaagtaacgagtggtggttcgacgatatgtcaattctcgggccaaaaatcattgaaaagctgataaatacacttggtgcgcatgataagaacaatgacagcttggtcctcacaaaatttcttctccattacctcaagacaaaggtcccaaacaagtcaaccaacaagctcgagtattcaggtttagctgatacagcggttcaaggagtggttttcgcagcgaaaaccgcgttttcatgcagaaaaatgttctgggttctgcgagttttatcgggatttagcataagtaaagaatcaagaattggtttagagagggttataggagaaatgctggatcaagcaacacttgatgatcttctgataccagctggaggaaaaggagaaaaaggggtttacgatgtggatttggtgataagattactcaaagtgtttgtaagaattggaaacacagaagaaggagatcagaatttgagaatgagaagaattgggaagttgattgataagtatctcagagagatatctccagaccagaatcttaaagtgtcaaagtttcttgaagttgcagagagtttgccagattcagctagagattggtttgatggattatacagagccattaacatctatcttgagtctcatccgaaactatcatccgaggatagaacaaaactatgtcgatgtctaaactacaagaaattgacattggacacatgcaaacaacttgcaaaaaatcccaagatccctccaaatattgcagttcaagcactcaagtcacaacaattatcaaacgagactcgaccacactcaagagaggacaagaacaaagtaaacaagatctggaattcacgtaagtacttagaagagaaaccaatactggtgtgtttgaaaggttttgatatgtcggagaagtttgaagatgatctaatgatgaatttggagaggaagcaatggaataattctgaaaaagttagtaaggagaagaagagtgaagtaatgtcaagatctgtgagacatggacatacacattcaagttctagttttccaaggctttgttaa

SEQ ID NO: 74121 - protein, 521 aa, Arabidopsis thaliana
  peptide (1)..(521): Ceres Seq. ID no. 4994410
  misc_feature (173)..(408): Pfam Name: NPH3 family Pfam Description: NPH3 family
  misc_feature (1)..(521): Homolog of NCBI NO: 11994196 NR Description: gb|AAD50054.1~gene_id:MPN9.9~strong similarity to
  misc_feature (1)..(521): Homolog of NCBI NO: 15230974 NR Description: hypothetical protein; protein id: At3g19850.1
  misc_feature (1)..(478): Homolog of NCBI NO: 22330150 NR Description: hypothetical protein; protein id: At1g50280.1, by cDNA: gi_19310600 [Arabidopsis thaliana] unknown protein [Arabidopsis thaliana]
  misc_feature (1)..(381): Homolog of NCBI NO: 25405364 NR Description: hypothetical protein F14I3.11 [imported] - thaliana >gi|5734789|gb|AAD50054.1|AC007980_19 Hypothetical
  misc_feature (1)..(514): Homolog of NCBI NO: 38344919 NR Description: OSJNBa0018M05.10 [Oryza sativa (japonica
  misc_feature (15)..(429): Homolog of NCBI NO: 34898504 NR Description: OJ1612_A04.8 [Oryza sativa (japonica
  misc_feature (70)..(429): Homolog of NCBI NO: 33146528 NR Description: putative phototropic response protein family
  misc_feature (13)..(431): Homolog of NCBI NO: 10177537 NR Description: photoreceptor-interacting protein-like
  misc_feature (19)..(431): Homolog of NCBI NO: 15146318 NR Description: AT5g66560/K1F13_23 [Arabidopsis thaliana]
  misc_feature (19)..(431): Homolog of NCBI NO: 15240012 NR Description: photoreceptor-interacting protein-like; protein At5g66560.1, supported by cDNA: gi_15146317 [Arabidopsis
MIKQSNKKKKNHKNSRIIIEVEDFPGGSDGFDLVLRFCYGGGISIDVSNVSILHCSSVFLEMTEKLCSSNLLLRTEKFLEGMFYWSWNDIVLCLKSCEQVFLHADSYGLVDKLVFGVLAKIPQNSDVSHVFSSSSPSSSASASASSQSPETAMIRSYSDKRSTSRSFSCRTSNEWWFDDMSILGPKIIEKLINTLGAHDKNNDSLVLTKFLLHYLKTKVPNKSTNKLEYSGLADTAVQGVVFAAKTAFSCRKMFWVLRVLSGFSISKESRIGLERVIGEMLDQATLDDLLIPAGGKGEKGVYDVDLVIRLLKVFVRIGNTEEGDQNLRMRRIGKLIDKYLREISPDQNLKVSKFLEVAESLPDSARDWFDGLYRAINIYLESHPKLSSEDRTKLCRCLNYKKLTLDTCKQLAKNPKIPPNIAVQALKSQQLSNETRPHSREDKNKVNKIWNSRKYLEEKPILVCLKGFDMSEKFEDDLMMNLERKQWNNSEKVSKEKKSEVMSRSVRHGHTHSSSSFPRLC

SEQ ID NO: 74122 - protein, 460 aa, Arabidopsis thaliana
  peptide (1)..(460): Ceres Seq. ID no. 4994411
  misc_feature (112)..(347): Pfam Name: NPH3 family Pfam Description: NPH3 family
  misc_feature (1)..(460): Homolog of NCBI NO: 11994196 NR Description: gb|AAD50054.1~gene_id:MPN9.9~strong similarity to
  misc_feature (1)..(460): Homolog of NCBI NO: 15230974 NR Description: hypothetical protein; protein id: At3g19850.1
  misc_feature (1)..(417): Homolog of NCBI NO: 22330150 NR Description: hypothetical protein; protein id: At1g50280.1, by cDNA: gi_19310600 [Arabidopsis thaliana] unknown protein [Arabidopsis thaliana]
  misc_feature (1)..(320): Homolog of NCBI NO: 25405364 NR Description: hypothetical protein F14I3.11 [imported] - thaliana >gi|5734789|gb|AAD50054.1|AC007980_19 Hypothetical
  misc_feature (1)..(453): Homolog of NCBI NO: 38344919 NR Description: OSJNBa0018M05.10 [Oryza sativa (japonica
  misc_feature (1)..(368): Homolog of NCBI NO: 34898504 NR Description: OJ1612_A04.8 [Oryza sativa (japonica
  misc_feature (9)..(368): Homolog of NCBI NO: 33146528 NR Description: putative phototropic response protein family
  misc_feature (1)..(370): Homolog of NCBI NO: 10177537 NR Description: photoreceptor-interacting protein-like
  misc_feature (1)..(370): Homolog of NCBI NO: 15146318 NR Description: AT5g66560/K1F13_23 [Arabidopsis thaliana]
  misc_feature (1)..(370): Homolog of NCBI NO: 15240012 NR Description: photoreceptor-interacting protein-like; protein At5g66560.1, supported by cDNA: gi_15146317 [Arabidopsis
MTEKLCSSNLLLRTEKFLEGMFYWSWNDIVLCLKSCEQVFLHADSYGLVDKLVFGVLAKIPQNSDVSHVFSSSSPSSSASASASSQSPETAMIRSYSDKRSTSRSFSCRTSNEWWFDDMSILGPKIIEKLINTLGAHDKNNDSLVLTKFLLHYLKTKVPNKSTNKLEYSGLADTAVQGVVFAAKTAFSCRKMFWVLRVLSGFSISKESRIGLERVIGEMLDQATLDDLLIPAGGKGEKGVYDVDLVIRLLKVFVRIGNTEEGDQNLRMRRIGKLIDKYLREISPDQNLKVSKFLEVAESLPDSARDWFDGLYRAINIYLESHPKLSSEDRTKLCRCLNYKKLTLDTCKQLAKNPKIPPNIAVQALKSQQLSNETRPHSREDKNKVNKIWNSRKYLEEKPILVCLKGFDMSEKFEDDLMMNLERKQWNNSEKVSKEKKSEVMSRSVRHGHTHSSSSFPRLC

SEQ ID NO: 74123 - protein, 440 aa, Arabidopsis thaliana
  peptide (1)..(440): Ceres Seq. ID no. 4994412
  misc_feature (92)..(327): Pfam Name: NPH3 family Pfam Description: NPH3 family
  misc_feature (1)..(440): Homolog of NCBI NO: 11994196 NR Description: gb|AAD50054.1~gene_id:MPN9.9~strong similarity to
  misc_feature (1)..(440): Homolog of NCBI NO: 15230974 NR Description: hypothetical protein; protein id: At3g19850.1
  misc_feature (1)..(397): Homolog of NCBI NO: 22330150 NR Description: hypothetical protein; protein id: At1g50280.1, by cDNA: gi_19310600 [Arabidopsis thaliana] unknown protein [Arabidopsis thaliana]
  misc_feature (1)..(300): Homolog of NCBI NO: 25405364 NR Description: hypothetical protein F14I3.11 [imported] - thaliana >gi|5734789|gb|AAD50054.1|AC007980_19 Hypothetical
  misc_feature (1)..(433): Homolog of NCBI NO: 38344919 NR Description: OSJNBa0018M05.10 [Oryza sativa (japonica
  misc_feature (1)..(348): Homolog of NCBI NO: 34898504 NR Description: OJ1612_A04.8 [Oryza sativa (japonica
  misc_feature (1)..(348): Homolog of NCBI NO: 33146528 NR Description: putative phototropic response protein family
  misc_feature (1)..(350): Homolog of NCBI NO: 10177537 NR Description: photoreceptor-interacting protein-like
  misc_feature (1)..(350): Homolog of NCBI NO: 15146318 NR Description: AT5g66560/K1F13_23 [Arabidopsis thaliana]
  misc_feature (1)..(350): Homolog of NCBI NO: 15240012 NR Description: photoreceptor-interacting protein-like; protein At5g66560.1, supported by cDNA: gi_15146317 [Arabidopsis
MFYWSWNDIVLCLKSCEQVFLHADSYGLVDKLVFGVLAKIPQNSDVSHVFSSSSPSSSASASASSQSPETAMIRSYSDKRSTSRSFSCRTSNEWWFDDMSILGPKIIEKLINTLGAHDKNNDSLVLTKFLLHYLKTKVPNKSTNKLEYSGLADTAVQGVVFAAKTAFSCRKMFWVLRVLSGFSISKESRIGLERVIGEMLDQATLDDLLIPAGGKGEKGVYDVDLVIRLLKVFVRIGNTEEGDQNLRMRRIGKLIDKYLREISPDQNLKVSKFLEVAESLPDSARDWFDGLYRAINIYLESHPKLSSEDRTKLCRCLNYKKLTLDTCKQLAKNPKIPPNIAVQALKSQQLSNETRPHSREDKNKVNKIWNSRKYLEEKPILVCLKGFDMSEKFEDDLMMNLERKQWNNSEKVSKEKKSEVMSRSVRHGHTHSSSSFPRLC

SEQ ID NO: 74124 - DNA, 3483 bp, Arabidopsis thaliana
  misc_feature (1)..(3483): Ceres Seq. ID no. 4994477
  misc_feature: MA Experiment ID: 20000184 Result: Down-regulated in Transcription
  misc_feature: MA Experiment 20000184 PARAMETER Experiment Name: At_Shoots__P Parameter: Age (day) Value: 7
  misc_feature: MA Experiment 20000184 PARAMETER Experiment Name: At_Shoots__P Parameter: Tissue Value: Shoots vs. Whole Plant
  misc_feature: MA Experiment ID: 20000185 Result: Down-regulated in Transcription
  misc_feature: MA Experiment 20000185 PARAMETER Experiment Name: At_Roots__P Parameter: Age (day) Value: 7 vs. 21
  misc_feature: MA Experiment 20000185 PARAMETER Experiment Name: At_Roots__P Parameter: Organism Value: A. thaliana
  misc_feature: MA Experiment 20000185 PARAMETER Experiment Name: At_Roots__P Parameter: Tissue Value: Roots vs. Whole Plant
  misc_feature: MA Experiment ID: 20000437 Result: Down-regulated in Transcription
  misc_feature: MA Experiment 20000437 PARAMETER Experiment Name: At_Drought_P Parameter: Age (day) Value: 8
  misc_feature: MA Experiment 20000437 PARAMETER Experiment Name: At_Drought_P Parameter: Organism Value: A. thaliana
  misc_feature: MA Experiment 20000437 PARAMETER Experiment Name: At_Drought_P Parameter: Plant Line Value: WS
  misc_feature: MA Experiment 20000437 PARAMETER Experiment Name: At_Drought_P Parameter: Timepoint (hr) Value: 24
  misc_feature: MA Experiment 20000437 PARAMETER Experiment Name: At_Drought_P Parameter: Tissue Value: Whole Plant
  misc_feature: MA Experiment 20000437 PARAMETER Experiment Name: At_Drought_P Parameter: Treatment Value: Drought vs. No Drought
  misc_feature: MA Experiment ID: 20001451 Result: Down-regulated in Transcription
  misc_feature: MA Experiment 20001451 PARAMETER Experiment Name: At_Far-red-induction_P Parameter: Age (day) Value: 7
  misc_feature: MA Experiment 20001451 PARAMETER Experiment Name: At_Far-red-induction_P Parameter: Light Value: Far-red vs. White
  misc_feature: MA Experiment 20001451 PARAMETER Experiment Name: At_Far-red-induction_P Parameter: Organism Value: A. thaliana
  misc_feature: MA Experiment 20001451 PARAMETER Experiment Name: At_Far-red-induction_P Parameter: Plant Line Value: Columbia
  misc_feature: MA Experiment 20001451 PARAMETER Experiment Name: At_Far-red-induction_P Parameter: Timepoint (hr) Value: 24
  misc_feature: MA Experiment 20001451 PARAMETER Experiment Name: At_Far-red-induction_P Parameter: Tissue Value: Whole Plant
  misc_feature: MA Experiment ID: 20001558 Result: Up-regulated in Transcription
  misc_feature: MA Experiment 20001558 PARAMETER Experiment Name: At_Drought_Soil_Dry_P Parameter: Age (day) Value: 27
  misc_feature: MA Experiment 20001558 PARAMETER Experiment Name: At_Drought_Soil_Dry_P Parameter: Organism Value: A. thaliana
  misc_feature: MA Experiment 20001558 PARAMETER Experiment Name: At_Drought_Soil_Dry_P Parameter: Plant Line Value: WS
  misc_feature: MA Experiment 20001558 PARAMETER Experiment Name: At_Drought_Soil_Dry_P Parameter: Post Timepoint (hr) Value: 6
  misc_feature: MA Experiment 20001558 PARAMETER Experiment Name: At_Drought_Soil_Dry_P Parameter: Post-Treatment Value: Re-Water vs. No Drought
  misc_feature: MA Experiment 20001558 PARAMETER Experiment Name: At_Drought_Soil_Dry_P Parameter: Timepoint (day) Value: 13
  misc_feature: MA Experiment 20001558 PARAMETER Experiment Name: At_Drought_Soil_Dry_P Parameter: Treatment Value: Drought vs. No Drought
atgggggtttctcttcgtcacttgtctccttcctctttctgggtttcgcgtcgtcctcgtgtttcttcttcaattctttcttttcttgtccctcgccgtcgaatcctttgcaccaggaaagtagcaatcataaagggaaatgcgggatattcgactgctactgattgtggtggttctcatgggtttcatcattcaggtcatcaaaggtcatcctctgttgagtttagtggagagtggaaacttaatttgggatctaagacggcgagaatggttccgccaactgtgaaacaagctggagctgtaagtgcttggagggaggaagtcaataataagttaagaggaagaaatagagaatatgctaacaaccaggatgatgcttttggtaatggcagttatattttaaaaggctttgtccccaaaatagatgatgtccattcttatggaaacggccagaactttgattacaatctgaagcctggaactgatattaccacacttggtagagaattgaatggctttatgcaaacgaatagtataagaggatcggtcgtagcattaccaagcaaggatattgaggttggggaaacaacagacgtgactctgaaacctcttaacagtgatacgactcttgacaatgccagctataagaaaacagcaaccatttccaaagtggaaaaatgcaccaacctatcgcaagtccgtgcaaacctcaagaaaatatacaatagagttcgtgttgttgataatgtgtctagtgcaaaggaaaccgtggctctgctcatgaatcaatataggaatcttgtccatgcttgcgatacagaggtattgggtcatgtgtttgctaatacattgttgttcacatggcctagaaatgcttatgttcttgacgtatccaggattgatgtgaagactgaaacacctgtagaccatggggagatgatttgtttcagtatctattgtggatcagaagcagattttggagatggtaaatcatgtatctgggtagatgtgcttggcgaaaatggaagggatatcctggctgagtttaagccatttttcgaagactcatccataaaaaaagtatggcataactacagctttgataaccacatcatcagaaattatggaatcaagctttctggttttcatggtgatacaatgcacatggcacgattgtgggattcatctagacggatatcgggtggttattcgcttgaagcacttacaagtgacccaaaagttcttgggggaactgagacaaaggaggaagcagaattatttggtaaaatatcaatgaagaagattttcggcaagggaaaattgaaaaaagatggatcagaaggaaaattggtgatcattcctcctgttaaagagctacaaatggaggatcgagaagcttggatttcgtactcagcgttggattcaataagcactctaaagctttatgagagcatgaagaagcaactgcaagcgaagaaatggtttcttgatggaaaactaatttcaaaaaagaacatgtttgatttctaccaagaatattggcaaccttttggtgaacttcttgccaaaatggaatcggaaggaatgcttgtagatagggattatttggcgcagattgagattgtagccaaagcagaacaagaaattgctgtttcgaggttccgtaattgggcttcaaagcattgtccagatgcaaagcatatgaatgttggcagtgacacgcaattgcgacaactcttttttggtggcatttctaacagttgtaatgatgaggatcttccatatgaaaaacttttcaaagttcccaatgtggataaggtgattgaagaaggaaaaaagagagccacaaaattccggaatatcaaactgcataggataagcgacagacctttgcccactgaaaagttcactgcctcaggctggccctctgttagtggagacaccttgaaagccttagctgggaaagtctctgcagaatatgactatatggagggcgttttagatacttgtctagaagaaaacattggagatgatgattgtatttcgctaccagatgaagttgtagaaacacaacacgtcaatacctctgttgaatcagacacatctgcttatggaacagcatttgatgcatttggagggggtgaaagtggaaaggaagcttgccatgctattgctgcattatgtgaagtttgctccattgattccttaatatcaaattttatccttcctttacagggaagtaacgtgtcaggaaaagatggtcgtgtccactgctccctgaatatcaacactgaaactggacgcttatcggctagaaggccaaatttgcagaaccaacctgcattggagaaagatcggtacaaaatccgtcaggccttcatagcatcacctggaaattcacttattgttgctgattatggacagctggaacttaggattctggcacatcttgctagttgcgaaagcatgaaggaagctttcatagctggtggagacttccactcaagaacagccatgaatatgtatcctcatattcgtgaagctgttgaaaatggtgaaagaagaaaagcaaagatgcttaacttctcgattgcgtatgggaagactgctattgggctgtctagagattggaaggtatcaagagaagaagctcaagatacagttaatctctggtataatgacagacaagaagtccggaaatggcaagaactacgcaagaaagaagctatacaaaaagggtatgtactcactttgttgggaagggctcgtaaattccctgaataccgttcacgtgcccaaaagaaccatatcgagcgagcagcaatcaacactcctgttcagggaagtgcggctgatgttgctatgtgcgctatgctggagatatcaaataatcaacggctaaaagagcttggttggaaattgcttctacaagttcatgatgaagtaatcttggaaggaccaagtgagtcagcggagaacgctaaagacatagttgtgaactgcatgtctgaacccttcaacggcaagaatattctctcagtcgacttatctgttgatgctaagtgtgctcagaactggcagtatcatggcttccatttcaccatgcatagctcttctgcgagtttattctcctctaccaccaaactcaacaacacttcttctaccccacttagcctctcctctcggtttcttggaactagggttgtgaatctcgggatcagacttatccgactcggaccctccaataggtcagagccactgcctcgtttaagttcggaaagaacggcgtcgatgctgagaatgctggaatctatggcagccagtcacgtgatgattttgacagagacgacgtcgaacagtattttaactacatggggatacttgcggtggaagtctcggagggagacaagcctaaaattgaagagcttctcaaacgctgactacacggttaaggatgctgacggcagaaccactcttgactga

SEQ ID NO: 74125 - protein, 1160 aa, Arabidopsis thaliana
  peptide (1)..(1160): Ceres Seq. ID no. 4994478
  misc_feature (644)..(853): Pfam Name: DNA polymerase family A Pfam Description: DNA polymerase family A
  misc_feature (296)..(850): Homolog of NCBI NO: 40253294 NR Description: putative PolI-like DNA polymerase [Oryza sativa
  misc_feature (8)..(275): Homolog of NCBI NO: 40253294 NR Description: putative PolI-like DNA polymerase [Oryza sativa
  misc_feature (843)..(1026): Homolog of NCBI NO: 40253294 NR Description: putative PolI-like DNA polymerase [Oryza sativa
  misc_feature (296)..(699): Homolog of NCBI NO: 39545749 NR Description: OSJNBb0034I13.15 [Oryza sativa (japonica
  misc_feature (843)..(1026): Homolog of NCBI NO: 39545749 NR Description: OSJNBb0034I13.15 [Oryza sativa (japonica
  misc_feature (776)..(850): Homolog of NCBI NO: 39545749 NR Description: OSJNBb0034I13.15 [Oryza sativa (japonica
  misc_feature (234)..(275): Homolog of NCBI NO: 39545749 NR Description: OSJNBb0034I13.15 [Oryza sativa (japonica
  misc_feature (296)..(699): Homolog of NCBI NO: 40253292 NR Description: putative PolI-like DNA polymerase [Oryza sativa
  misc_feature (843)..(1026): Homolog of NCBI NO: 40253292 NR Description: putative PolI-like DNA polymerase [Oryza sativa
  misc_feature (223)..(275): Homolog of NCBI NO: 40253292 NR Description: putative PolI-like DNA polymerase [Oryza sativa
MGVSLRHLSPSSFWVSRRPRVSSSILSFLVPRRRILCTRKVAIIKGNAGYSTATDCGGSHGFHHSGHQRSSSVEFSGEWKLNLGSKTARMVPPTVKQAGAVSAWREEVNNKLRGRNREYANNQDDAFGNGSYILKGFVPKIDDVHSYGNGQNFDYNLKPGTDITTLGRELNGFMQTNSIRGSVVALPSKDIEVGETTDVTLKPLNSDTTLDNASYKKTATISKVEKCTNLSQVRANLKKIYNRVRVVDNVSSAKETVALLMNQYRNLVHACDTEVLGHVFANTLLFTWPRNAYVLDVSRIDVKTETPVDHGEMICFSIYCGSEADFGDGKSCIWVDVLGENGRDILAEFKPFFEDSSIKKVWHNYSFDNHIIRNYGIKLSGFHGDTMHMARLWDSSRRISGGYSLEALTSDPKVLGGTETKEEAELFGKISMKKIFGKGKLKKDGSEGKLVIIPPVKELQMEDREAWISYSALDSISTLKLYESMKKQLQAKKWFLDGKLISKKNMFDFYQEYWQPFGELLAKMESEGMLVDRDYLAQIEIVAKAEQEIAVSRFRNWASKHCPDAKHMNVGSDTQLRQLFFGGISNSCNDEDLPYEKLFKVPNVDKVIEEGKKRATKFRNIKLHRISDRPLPTEKFTASGWPSVSGDTLKALAGKVSAEYDYMEGVLDTCLEENIGDDDCISLPDEVVETQHVNTSVESDTSAYGTAFDAFGGGESGKEACHAIAALCEVCSIDSLISNFILPLQGSNVSGKDGRVHCSLNINTETGRLSARRPNLQNQPALEKDRYKIRQAFIASPGNSLIVADYGQLELRILAHLASCESMKEAFIAGGDFHSRTAMNMYPHIREAVENGERRKAKMLNFSIAYGKTAIGLSRDWKVSREEAQDTVNLWYNDRQEVRKWQELRKKEAIQKGYVLTLLGRARKFPEYRSRAQKNHIERAAINTPVQGSAADVAMCAMLEISNNQRLKELGWKLLLQVHDEVILEGPSESAENAKDIVVNCMSEPFNGKNILSVDLSVDAKCAQNWQYHGFHFTMHSSSASLFSSTTKLNNTSSTPLSLSSRFLGTRVVNLGIRLIRLGPSNRSEPLPRLSSERTASMLRMLESMAASHVMILTETTSNSILTTWGYLRWKSRRETSLKLKSFSNADYTVKDADGRTTLD

SEQ ID NO: 74126 - protein, 1071 aa, Arabidopsis thaliana
  peptide (1)..(1071): Ceres Seq. ID no. 4994479
  misc_feature (555)..(764): Pfam Name: DNA polymerase family A Pfam Description: DNA polymerase family A
  misc_feature (207)..(761): Homolog of NCBI NO: 40253294 NR Description: putative PolI-like DNA polymerase [Oryza sativa
  misc_feature (1)..(186): Homolog of NCBI NO: 40253294 NR Description: putative PolI-like DNA polymerase [Oryza sativa
  misc_feature (754)..(937): Homolog of NCBI NO: 40253294 NR Description: putative PolI-like DNA polymerase [Oryza sativa
  misc_feature (207)..(610): Homolog of NCBI NO: 39545749 NR Description: OSJNBb0034I13.15 [Oryza sativa (japonica
  misc_feature (754)..(937): Homolog of NCBI NO: 39545749 NR Description: OSJNBb0034I13.15 [Oryza sativa (japonica
  misc_feature (687)..(761): Homolog of NCBI NO: 39545749 NR Description: OSJNBb0034I13.15 [Oryza sativa (japonica
  misc_feature (145)..(186): Homolog of NCBI NO: 39545749 NR Description: OSJNBb0034I13.15 [Oryza sativa (japonica
  misc_feature (207)..(610): Homolog of NCBI NO: 40253292 NR Description: putative PolI-like DNA polymerase [Oryza sativa
  misc_feature (754)..(937): Homolog of NCBI NO: 40253292 NR Description: putative PolI-like DNA polymerase [Oryza sativa
  misc_feature (134)..(186): Homolog of NCBI NO: 40253292 NR Description: putative PolI-like DNA polymerase [Oryza sativa
MVPPTVKQAGAVSAWREEVNNKLRGRNREYANNQDDAFGNGSYILKGFVPKIDDVHSYGNGQNFDYNLKPGTDITTLGRELNGFMQTNSIRGSVVALPSKDIEVGETTDVTLKPLNSDTTLDNASYKKTATISKVEKCTNLSQVRANLKKIYNRVRVVDNVSSAKETVALLMNQYRNLVHACDTEVLGHVFANTLLFTWPRNAYVLDVSRIDVKTETPVDHGEMICFSIYCGSEADFGDGKSCIWVDVLGENGRDILAEFKPFFEDSSIKKVWHNYSFDNHIIRNYGIKLSGFHGDTMHMARLWDSSRRISGGYSLEALTSDPKVLGGTETKEEAELFGKISMKKIFGKGKLKKDGSEGKLVIIPPVKELQMEDREAWISYSALDSISTLKLYESMKKQLQAKKWFLDGKLISKKNMFDFYQEYWQPFGELLAKMESEGMLVDRDYLAQIEIVAKAEQEIAVSRFRNWASKHCPDAKHMNVGSDTQLRQLFFGGISNSCNDEDLPYEKLFKVPNVDKVIEEGKKRATKFRNIKLHRISDRPLPTEKFTASGWPSVSGDTLKALAGKVSAEYDYMEGVLDTCLEENIGDDDCISLPDEVVETQHVNTSVESDTSAYGTAFDAFGGGESGKEACHAIAALCEVCSIDSLISNFILPLQGSNVSGKDGRVHCSLNINTETGRLSARRPNLQNQPALEKDRYKIRQAFIASPGNSLIVADYGQLELRILAHLASCESMKEAFIAGGDFHSRTAMNMYPHIREAVENGERRKAKMLNFSIAYGKTAIGLSRDWKVSREEAQDTVNLWYNDRQEVRKWQELRKKEAIQKGYVLTLLGRARKFPEYRSRAQKNHIERAAINTPVQGSAADVAMCAMLEISNNQRLKELGWKLLLQVHDEVILEGPSESAENAKDIVVNCMSEPFNGKNILSVDLSVDAKCAQNWQYHGFHFTMHSSSASLFSSTTKLNNTSSTPLSLSSRFLGTRVVNLGIRLIRLGPSNRSEPLPRLSSERTASMLRMLESMAASHVMILTETTSNSILTTWGYLRWKSRRETSLKLKSFSNADYTVKDADGRTTLD

SEQ ID NO: 74127 - protein, 987 aa, Arabidopsis thaliana
  peptide (1)..(987): Ceres Seq. ID no. 4994480
  misc_feature (471)..(680): Pfam Name: DNA polymerase family A Pfam Description: DNA polymerase family A
  misc_feature (123)..(677): Homolog of NCBI NO: 40253294 NR Description: putative PolI-like DNA polymerase [Oryza sativa
  misc_feature (1)..(102): Homolog of NCBI NO: 40253294 NR Description: putative PolI-like DNA polymerase [Oryza sativa
  misc_feature (670)..(853): Homolog of NCBI NO: 40253294 NR Description: putative PolI-like DNA polymerase [Oryza sativa
  misc_feature (123)..(526): Homolog of NCBI NO: 39545749 NR Description: OSJNBb0034I13.15 [Oryza sativa (japonica
  misc_feature (670)..(853): Homolog of NCBI NO: 39545749 NR Description: OSJNBb0034I13.15 [Oryza sativa (japonica
  misc_feature (603)..(677): Homolog of NCBI NO: 39545749 NR Description: OSJNBb0034I13.15 [Oryza sativa (japonica
  misc_feature (61)..(102): Homolog of NCBI NO: 39545749 NR Description: OSJNBb0034I13.15 [Oryza sativa (japonica
  misc_feature (123)..(526): Homolog of NCBI NO: 40253292 NR Description: putative PolI-like DNA polymerase [Oryza sativa
  misc_feature (670)..(853): Homolog of NCBI NO: 40253292 NR Description: putative PolI-like DNA polymerase [Oryza sativa
  misc_feature (50)..(102): Homolog of NCBI NO: 40253292 NR Description: putative PolI-like DNA polymerase [Oryza sativa
MQTNSIRGSVVALPSKDIEVGETTDVTLKPLNSDTTLDNASYKKTATISKVEKCTNLSQVRANLKKIYNRVRVVDNVSSAKETVALLMNQYRNLVHACDTEVLGHVFANTLLFTWPRNAYVLDVSRIDVKTETPVDHGEMICFSIYCGSEADFGDGKSCIWVDVLGENGRDILAEFKPFFEDSSIKKVWHNYSFDNHIIRNYGIKLSGFHGDTMHMARLWDSSRRISGGYSLEALTSDPKVLGGTETKEEAELFGKISMKKIFGKGKLKKDGSEGKLVIIPPVKELQMEDREAWISYSALDSISTLKLYESMKKQLQAKKWFLDGKLISKKNMFDFYQEYWQPFGELLAKMESEGMLVDRDYLAQIEIVAKAEQEIAVSRFRNWASKHCPDAKHMNVGSDTQLRQLFFGGISNSCNDEDLPYEKLFKVPNVDKVIEEGKKRATKFRNIKLHRISDRPLPTEKFTASGWPSVSGDTLKALAGKVSAEYDYMEGVLDTCLEENIGDDDCISLPDEVVETQHVNTSVESDTSAYGTAFDAFGGGESGKEACHAIAALCEVCSIDSLISNFILPLQGSNVSGKDGRVHCSLNINTETGRLSARRPNLQNQPALEKDRYKIRQAFIASPGNSLIVADYGQLELRILAHLASCESMKEAFIAGGDFHSRTAMNMYPHIREAVENGERRKAKMLNFSIAYGKTAIGLSRDWKVSREEAQDTVNLWYNDRQEVRKWQELRKKEAIQKGYVLTLLGRARKFPEYRSRAQKNHIERAAINTPVQGSAADVAMCAMLEISNNQRLKELGWKLLLQVHDEVILEGPSESAENAKDIVVNCMSEPFNGKNILSVDLSVDAKCAQNWQYHGFHFTMHSSSASLFSSTTKLNNTSSTPLSLSSRFLGTRVVNLGIRLIRLGPSNRSEPLPRLSSERTASMLRMLESMAASHVMILTETTSNSILTTWGYLRWKSRRETSLKLKSFSNADYTVKDADGRTTLD

SEQ ID NO: 74128 - DNA, 1320 bp, Arabidopsis thaliana
  misc_feature (1)..(1320): Ceres Seq. ID no. 4994839
  misc_feature: MA Experiment ID: 20000180 Result: Down-regulated in Transcription
  misc_feature: MA Experiment 20000180 PARAMETER Experiment Name: At_Germinating_Seeds_P Parameter: Age (hr) Value: 24 vs. 0
  misc_feature: MA Experiment 20000180 PARAMETER Experiment Name: At_Germinating_Seeds_P Parameter: Tissue Value: Germinating Seeds
atggcttattcttaccctctaccttcaattgttgaattcaataaagtattgactgctattgctaagatgcagatgtatgatgttgtgattaatctctggaaacgtattgagaatgctgaaggtattgaaatttcacctgatctctatacttgtaacattttggtgaattgtttctgccgctgctttcaaccctcttcggctttatcttatcttgggaagatgatgaagcttggtattgagcctgacattgtgactgctagctcgctggtcaatggattctgtctcagtaatagtattaaggatgctgtttatgtggctggccaaatggagaaaatgggaatcaaacgtgatgttgtagtcgataccatactcattgatactctttgcaaaaatagacttgtggttcccgcgctggaggttctcaaacgtatgaaagacagaggaatttcaccgaatgttgttacctacagctctctcataactggcctttgtaaatccggtagattggctgacgccgagagacgactgcacgaaatggactccaagaaaatcaaccctaatgttatcactttcagtgcattaatcgatgcatatgcaaaacgtgggaaactgtcgaaggttgatagtgtgtacaagatgatgatccaaatgtctatagatcctaatgttttcacttacagttcacttatctacgggctttgcatgcacaatcgtgtagacgaggccattaaaatgcttgacttgatgataagcaaggggtgcaccccaaatgtagtcacttacagtactcttgcaaatggatttttcaagtcgtcgagggtagatgatgggattaaacttttagacgacatgcctcaaagaggcgtggctgcaaacacagtctcttgcaacactcttatcaagggctattttcaagcaggcaagatagatctcgctctaggagtttttggatatatgacttctaatggtctgattcccaatattaggagctacaacattgtgttagctggtctatttgctaatggggaggtagagaaagcattgagcagattcgagcatatgcaaaagactagaaatgatcttgatattattacatatactatcatgattcatgggatgtgcaaggcttgtatggtgaaagaagcatatgatttgttctataaactcaagttcaaaagagtggagcccgattttaaagcatacacgataatgatcgcagaattgaatagggctggcatgcggactgaagcagatgccttgaatagattttaccaaaagcacgttcgccaaaacgaaagcgcaccagctgaagtatcctag

SEQ ID NO: 74129 - protein, 439 aa, Arabidopsis thaliana; identical to SEQ ID NO: 71316
  peptide (1)..(439): Ceres Seq. ID no. 4994840
  misc_feature (49)..(83): Pfam Name: PPR repeat Pfam Description: PPR repeat
  misc_feature (1)..(439): Homolog of NCBI NO: 15236878 NR Description: putative protein; protein id: At4g26800.1
  misc_feature (1)..(432): Homolog of NCBI NO: 6630464 NR Description: F23N19.4 [Arabidopsis thaliana]
  misc_feature (1)..(432): Homolog of NCBI NO: 15221550 NR Description: PPR-repeat protein; protein id: At1g62680.1
  misc_feature (1)..(426): Homolog of NCBI NO: 6630449 NR Description: F23N19.8 [Arabidopsis thaliana]
  misc_feature (1)..(426): Homolog of NCBI NO: 15221558 NR Description: PPR-repeat protein; protein id: At1g62720.1
  misc_feature (1)..(422): Homolog of NCBI NO: 15237384 NR Description: putative protein; protein id: At5g16640.1 thaliana] >gi|10176973|dbj|BAB10191.1|
  misc_feature (1)..(433): Homolog of NCBI NO: 11994626 NR Description: contains similarity to salt-inducible
  misc_feature (1)..(433): Homolog of NCBI NO: 15228287 NR Description: hypothetical protein; protein id: At3g16710.1
  misc_feature (1)..(422): Homolog of NCBI NO: 15217683 NR Description: hypothetical protein; protein id: At1g64580.1
  misc_feature (1)..(422): Homolog of NCBI NO: 25404938 NR Description: protein F1N19.15 [imported] - Arabidopsis >gi|6633829|gb|AAF19688.1|AC009519_22 F1N19.15 [Arabidopsis

SEQ ID NO: 74130 - protein, 417 aa, Arabidopsis thaliana; identical to SEQ ID NO: 71317
  peptide (1)..(417): Ceres Seq. ID no. 4994841
  misc_feature (27)..(61): Pfam Name: PPR repeat Pfam Description: PPR repeat
  misc_feature (1)..(417): Homolog of NCBI NO: 15236878 NR Description: putative protein; protein id: At4g26800.1
  misc_feature (1)..(410): Homolog of NCBI NO: 6630464 NR Description: F23N19.4 [Arabidopsis thaliana]
  misc_feature (1)..(410): Homolog of NCBI NO: 15221550 NR Description: PPR-repeat protein; protein id: At1g62680.1
  misc_feature (1)..(404): Homolog of NCBI NO: 6630449 NR Description: F23N19.8 [Arabidopsis thaliana]
  misc_feature (1)..(404): Homolog of NCBI NO: 15221558 NR Description: PPR-repeat protein; protein id: At1g62720.1
  misc_feature (1)..(400): Homolog of NCBI NO: 15237384 NR Description: putative protein; protein id: At5g16640.1 thaliana] >gi|10176973|dbj|BAB10191.1|
  misc_feature (1)..(411): Homolog of NCBI NO: 11994626 NR Description: contains similarity to salt-inducible
  misc_feature (1)..(411): Homolog of NCBI NO: 15228287 NR Description: hypothetical protein; protein id: At3g16710.1
  misc_feature (1)..(400): Homolog of NCBI NO: 15217683 NR Description: hypothetical protein; protein id: At1g64580.1
  misc_feature (1)..(400): Homolog of NCBI NO: 25404938 NR Description: protein F1N19.15 [imported] - Arabidopsis >gi|6633829|gb|AAF19688.1|AC009519_22 F1N19.15 [Arabidopsis

SEQ ID NO: 74131 - protein, 415 aa, Arabidopsis thaliana
  peptide (1)..(415): Ceres Seq. ID no. 4994842
  misc_feature (25)..(59): Pfam Name: PPR repeat Pfam Description: PPR repeat
  misc_feature (1)..(415): Homolog of NCBI NO: 15236878 NR Description: putative protein; protein id: At4g26800.1
  misc_feature (1)..(408): Homolog of NCBI NO: 6630464 NR Description: F23N19.4 [Arabidopsis thaliana]
  misc_feature (1)..(408): Homolog of NCBI NO: 15221550 NR Description: PPR-repeat protein; protein id: At1g62680.1
  misc_feature (1)..(402): Homolog of NCBI NO: 6630449 NR Description: F23N19.8 [Arabidopsis thaliana]
  misc_feature (1)..(402): Homolog of NCBI NO: 15221558 NR Description: PPR-repeat protein; protein id: At1g62720.1
  misc_feature (1)..(398): Homolog of NCBI NO: 15237384 NR Description: putative protein; protein id: At5g16640.1 thaliana] >gi|10176973|dbj|BAB10191.1|
  misc_feature (1)..(409): Homolog of NCBI NO: 11994626 NR Description: contains similarity to salt-inducible
  misc_feature (1)..(409): Homolog of NCBI NO: 15228287 NR Description: hypothetical protein; protein id: At3g16710.1
  misc_feature (1)..(398): Homolog of NCBI NO: 15217683 NR Description: hypothetical protein; protein id: At1g64580.1
  misc_feature (1)..(398): Homolog of NCBI NO: 25404938 NR Description: protein F1N19.15 [imported] - Arabidopsis >gi|6633829|gb|AAF19688.1|AC009519_22 F1N19.15 [Arabidopsis
MYDVVINLWKRIENAEGIEISPDLYTCNILVNCFCRCFQPSSALSYLGKMMKLGIEPDIVTASSLVNGFCLSNSIKDAVYVAGQMEKMGIKRDVVVDTILIDTLCKNRLVVPALEVLKRMKDRGISPNVVTYSSLITGLCKSGRLADAERRLHEMDSKKINPNVITFSALIDAYAKRGKLSKVDSVYKMMIQMSIDPNVFTYSSLIYGLCMHNRVDEAIKMLDLMISKGCTPNVVTYSTLANGFFKSSRVDDGIKLLDDMPQRGVAANTVSCNTLIKGYFQAGKIDLALGVFGYMTSNGLIPNIRSYNIVLAGLFANGEVEKALSRFEHMQKTRNDLDIITYTIMIHGMCKACMVKEAYDLFYKLKFKRVEPDFKAYTIMIAELNRAGMRTEADALNRFYQKHVRQNESAPAEVS

SEQ ID NO: 74132 - DNA, 2001 bp, Arabidopsis thaliana
  misc_feature (1)..(2001): Ceres Seq. ID no. 4994850
  misc_feature: MA Experiment ID: 20000307 Result: Down-regulated in Transcription
  misc_feature: MA Experiment 20000307 PARAMETER Experiment Name: At_Germinating_Seeds_Sub_P Parameter: Age (hr) Value: 24 vs. 0
  misc_feature: MA Experiment 20000307 PARAMETER Experiment Name: At_Germinating_Seeds_Sub_P Parameter: Organism Value: A. thaliana
  misc_feature: MA Experiment 20000307 PARAMETER Experiment Name: At_Germinating_Seeds_Sub_P Parameter: Plant Line Value: WS
  misc_feature: MA Experiment 20000307 PARAMETER Experiment Name: At_Germinating_Seeds_Sub_P Parameter: Tissue Value: Germinating Seeds
  misc_feature: MA Experiment ID: 20000328 Result: Up-regulated in Transcription
  misc_feature: MA Experiment 20000328 PARAMETER Experiment Name: At_42deg_Heat_Sub_P Parameter: Age (day) Value: 14
  misc_feature: MA Experiment 20000328 PARAMETER Experiment Name: At_42deg_Heat_Sub_P Parameter: Organism Value: A. thaliana
  misc_feature: MA Experiment 20000328 PARAMETER Experiment Name: At_42deg_Heat_Sub_P Parameter: Plant Line Value: WS
  misc_feature: MA Experiment 20000328 PARAMETER Experiment Name: At_42deg_Heat_Sub_P Parameter: Temperature (deg C) Value: 42 vs. 22
  misc_feature: MA Experiment 20000328 PARAMETER Experiment Name: At_42deg_Heat_Sub_P Parameter: Timepoint (hr) Value: 6
  misc_feature: MA Experiment 20000328 PARAMETER Experiment Name: At_42deg_Heat_Sub_P Parameter: Tissue Value: Aerial
  misc_feature: MA Experiment ID: 20001807 Result: Up-regulated in Transcription
  misc_feature: MA Experiment 20001807 PARAMETER Experiment Name: At_50mM_NH4NO3_L-to-H_Sub_P Parameter: Timepoint (hr) Value: 6
  misc_feature: MA Experiment 20001807 PARAMETER Experiment Name: At_50mM_NH4NO3_L-to-H_Sub_P Parameter: Tissue Value: Leaf
  misc_feature: MA Experiment 20001807 PARAMETER Experiment Name: At_50mM_NH4NO3_L-to-H_Sub_P Parameter: Treatment Value: 50mM NH4NO3 vs 100mM Mannitol
atggcttccgtatctgcgtttaaatccgtttccgcaaatggaaagaattctatgtttgggaaattaggttacttggcgagacctttctgctcgaggcctgtggggaatgatgttattggtattgatttgggtactaccaattcttgtgtatctgtgatggagggaaagaccgctagggttattgagaatgcggaaggaagtcgaaccacaccatcggttgttgctatgaaccaaaaaggggaactccttgttggaacaccggctaaacgtcaggccgtgaccaatccaacaaacacgattttcggttctaaacgtttgattgggagacgttttgatgatccacagactcagaaggagatgaaaatggttccttacaagattgttaaggcacctaacggtgatgcttgggtcgaagccaatggacaaaagttttctcccagtcagattggagctaatgtcctcactaaaatgaaggaaacagctgaagcttacctcgggaaatctatcaacaaagctgttgttaccgttccagcttatttcaatgatgcacagagacaagccactaaggatgctgggaaaatcgctggtcttgatgtccagaggatcatcaacgaacctacagctgctgcactatcatatggtatgaacaacaaggaaggtgtcattgcagtgtttgatcttggaggtggaacctttgatgtttctatcttggaaatctcaagtggtgtttttgaggttaaagcaacaaatggagatacctttttgggaggagaagactttgacaacaccttgttggagtacttggttaatgagttcaaaagatcagataatattgatctgactaaagacaaccttgccctccagaggctgagagaagctgcagagaaggccaagattgagctctcatcgacaactcagaccgaaatcaacctgcctttcattacagcggatgcttcaggagctaagcacttgaacatcaccttaactaggtcaaagtttgaaggtttggtgggcaagttgattgagagaacaagatccccgtgccaaaactgcctgaaggatgctggagtcacaattaaggaagttgatgaggttcttcttgttggtggaatgacccgtgttcccaaagtgcaagagatagtttctgagatctttgggaagagtccttgtaaaggtgttaacccggatgaagcggttgccatgggagcagccattcaaggtggtatcctccgtggtgatgtgaaggatttgcttcttttggacgtggttcctctctcattgggtattgaaacattgggtgcagtcttcaccaagttgattccacgaaacaccactattcccacaaagaagtctcaggttttctccacagctgctgacaaccagatgcaagtgggaatcaaagttcttcagggagaacgtgaaatggcggctgacaacaaagtgcttggagaattcgaccttgttggcatcccaccggcacctagaggaatgccacagatcgaagttacattcgacattgatgcaaatggtattactactgtctcagcgaaagacaaagcaacaggtaaagagcagaatatcacaatcagatcttcaggtggtctctcagacgatgagattaacagaatggtgaaagaagctgagcttaacgcacagaaggatcaagagaagaagcaacttatcgaccttaggaacagtgctgatacaacaatttacagtgtagagaagagcttgagtgaatacagagagaagattccagctgagattgcctctgagatcgaaactgcagtgtctgatctcaggactgctatggctggtgaggatgtcgaggacatcaaggctaaggtcgaagctgcaaacaaggcagtgtcgaagatcggagaacacatgtctaagggatctggatcatctggttccgatggaagctctggtgagggtacaagtgggactgagcagacgcctgaagctgaattcgaggaggccagtggttcaaggaagtga

SEQ ID NO: 74133 - protein, 666 aa, Arabidopsis thaliana; identical to SEQ ID NO: 45794
  peptide (1)..(666): Ceres Seq. ID no. 4994851
  misc_feature (38)..(632): Pfam Name: Hsp70 protein Pfam Description: Hsp70 protein
  misc_feature (2)..(660): Homolog of NCBI NO: 7441844 NR Description: dnaK-type molecular chaperone PHSP1 precursor,
  misc_feature (2)..(660): Homolog of NCBI NO: 585272 NR Description: HEAT SHOCK 70 KD PROTEIN, MITOCHONDRIAL PRECURSOR
  misc_feature (2)..(660): Homolog of NCBI NO: 399940 NR Description: HEAT SHOCK 70 KD PROTEIN, MITOCHONDRIAL PRECURSOR
  misc_feature (3)..(661): Homolog of NCBI NO: 7441879 NR Description: dnaK-type molecular chaperone HSC70-11, - spinach >gi|2654212|gb|AAB91473.1| heat shock 70 protein oleracea] >gi|2773052|gb|AAB96660.1| heat shock 70 protein
  misc_feature (3)..(661): Homolog of NCBI NO: 7441881 NR Description: dnaK-type molecular chaperone HSC70-10, - spinach >gi|2654210|gb|AAB91472.1| heat shock 70 protein
  misc_feature (5)..(660): Homolog of NCBI NO: 15242459 NR Description: heat shock protein 70 (Hsc70-5); protein id: supported by cDNA: gi_6746589 [Arabidopsis thaliana]
  misc_feature (26)..(660): Homolog of NCBI NO: 27476086 NR Description: Putative heat shock 70 KD protein, mitochondrial
  misc_feature (2)..(660): Homolog of NCBI NO: 585273 NR Description: Heat shock 70 kDa protein, mitochondrial precursor
  misc_feature (37)..(666): Homolog of NCBI NO: 29654590 NR Description: chaperone protein dnak [Coxiella burnetii RSA >gi|13431457|sp|O87712|DNAK_COXBU Chaperone protein dnaK (Heat protein 70) (Heat shock 70 kDa protein) (HSP70)
  misc_feature (38)..(661): Homolog of NCBI NO: 23475140 NR Description: hypothetical protein [Desulfovibrio desulfuricans

SEQ ID NO: 74134 - protein, 649 aa, Arabidopsis thaliana; identical to SEQ ID NO: 45795
  peptide (1)..(649): Ceres Seq. ID no. 4994852
  misc_feature (21)..(615): Pfam Name: Hsp70 protein Pfam Description: Hsp70 protein
  misc_feature (1)..(643): Homolog of NCBI NO: 7441844 NR Description: dnaK-type molecular chaperone PHSP1 precursor,
  misc_feature (1)..(643): Homolog of NCBI NO: 585272 NR Description: HEAT SHOCK 70 KD PROTEIN, MITOCHONDRIAL PRECURSOR
  misc_feature (1)..(643): Homolog of NCBI NO: 399940 NR Description: HEAT SHOCK 70 KD PROTEIN, MITOCHONDRIAL PRECURSOR
  misc_feature (1)..(644): Homolog of NCBI NO: 7441879 NR Description: dnaK-type molecular chaperone HSC70-11, - spinach >gi|2654212|gb|AAB91473.1| heat shock 70 protein oleracea] >gi|2773052|gb|AAB96660.1| heat shock 70 protein
  misc_feature (1)..(644): Homolog of NCBI NO: 7441881 NR Description: dnaK-type molecular chaperone HSC70-10, - spinach >gi|2654210|gb|AAB91472.1| heat shock 70 protein
  misc_feature (1)..(643): Homolog of NCBI NO: 15242459 NR Description: heat shock protein 70 (Hsc70-5); protein id: supported by cDNA: gi_6746589 [Arabidopsis thaliana]
  misc_feature (9)..(643): Homolog of NCBI NO: 27476086 NR Description: Putative heat shock 70 KD protein, mitochondrial
  misc_feature (1)..(643): Homolog of NCBI NO: 585273 NR Description: Heat shock 70 kDa protein, mitochondrial precursor
  misc_feature (20)..(649): Homolog of NCBI NO: 29654590 NR Description: chaperone protein dnak [Coxiella burnetii RSA >gi|13431457|sp|O87712|DNAK_COXBU Chaperone protein dnaK (Heat protein 70) (Heat shock 70 kDa protein) (HSP70)
  misc_feature (21)..(644): Homolog of NCBI NO: 23475140 NR Description: hypothetical protein [Desulfovibrio desulfuricans

SEQ ID NO: 74135 - protein, 614 aa, Arabidopsis thaliana
  peptide (1)..(614): Ceres Seq. ID no. 4994853
  misc_feature (1)..(580): Pfam Name: Hsp70 protein Pfam Description: Hsp70 protein
  misc_feature (1)..(608): Homolog of NCBI NO: 7441844 NR Description: dnaK-type molecular chaperone PHSP1 precursor,
  misc_feature (1)..(608): Homolog of NCBI NO: 585272 NR Description: HEAT SHOCK 70 KD PROTEIN, MITOCHONDRIAL PRECURSOR
  misc_feature (1)..(608): Homolog of NCBI NO: 399940 NR Description: HEAT SHOCK 70 KD PROTEIN, MITOCHONDRIAL PRECURSOR
  misc_feature (1)..(609): Homolog of NCBI NO: 7441879 NR Description: dnaK-type molecular chaperone HSC70-11, - spinach >gi|2654212|gb|AAB91473.1| heat shock 70 protein oleracea] >gi|2773052|gb|AAB96660.1| heat shock 70 protein
  misc_feature (1)..(609): Homolog of NCBI NO: 7441881 NR Description: dnaK-type molecular chaperone HSC70-10, - spinach >gi|2654210|gb|AAB91472.1| heat shock 70 protein
  misc_feature (1)..(608): Homolog of NCBI NO: 15242459 NR Description: heat shock protein 70 (Hsc70-5); protein id: supported by cDNA: gi_6746589 [Arabidopsis thaliana]
  misc_feature (1)..(608): Homolog of NCBI NO: 27476086 NR Description: Putative heat shock 70 KD protein, mitochondrial
  misc_feature (1)..(608): Homolog of NCBI NO: 585273 NR Description: Heat shock 70 kDa protein, mitochondrial precursor
  misc_feature (1)..(614): Homolog of NCBI NO: 29654590 NR Description: chaperone protein dnak [Coxiella burnetii RSA >gi|13431457|sp|O87712|DNAK_COXBU Chaperone protein dnaK (Heat protein 70) (Heat shock 70 kDa protein) (HSP70)
  misc_feature (1)..(609): Homolog of NCBI NO: 23475140 NR Description: hypothetical protein [Desulfovibrio desulfuricans
MEGKTARVIENAEGSRTTPSVVAMNQKGELLVGTPAKRQAVTNPTNTIFGSKRLIGRRFDDPQTQKEMKMVPYKIVKAPNGDAWVEANGQKFSPSQIGANVLTKMKETAEAYLGKSINKAVVTVPAYFNDAQRQATKDAGKIAGLDVQRIINEPTAAALSYGMNNKEGVIAVFDLGGGTFDVSILEISSGVFEVKATNGDTFLGGEDFDNTLLEYLVNEFKRSDNIDLTKDNLALQRLREAAEKAKIELSSTTQTEINLPFITADASGAKHLNITLTRSKFEGLVGKLIERTRSPCQNCLKDAGVTIKEVDEVLLVGGMTRVPKVQEIVSEIFGKSPCKGVNPDEAVAMGAAIQGGILRGDVKDLLLLDVVPLSLGIETLGAVFTKLIPRNTTIPTKKSQVFSTAADNQMQVGIKVLQGEREMAADNKVLGEFDLVGIPPAPRGMPQIEVTFDIDANGITTVSAKDKATGKEQNITIRSSGGLSDDEINRMVKEAELNAQKDQEKKQLIDLRNSADTTIYSVEKSLSEYREKIPAEIASEIETAVSDLRTAMAGEDVEDIKAKVEAANKAVSKIGEHMSKGSGSSGSDGSSGEGTSGTEQTPEAEFEEASGSRK

SEQ ID NO: 74136 - DNA, 1017 bp, Arabidopsis thaliana
  misc_feature (1)..(1017): Ceres Seq. ID no. 4994907
  misc_feature: MA Experiment ID: 20000171 Result: Down-regulated in Transcription
  misc_feature: MA Experiment 20000171 PARAMETER Experiment Name: At_42deg_Heat_P Parameter: Age (day) Value: 14
  misc_feature: MA Experiment 20000171 PARAMETER Experiment Name: At_42deg_Heat_P Parameter: Organism Value: A. thaliana
  misc_feature: MA Experiment 20000171 PARAMETER Experiment Name: At_42deg_Heat_P Parameter: Plant Line Value: WS
  misc_feature: MA Experiment 20000171 PARAMETER Experiment Name: At_42deg_Heat_P Parameter: Temperature (deg C) Value: 42 vs. 22
  misc_feature: MA Experiment 20000171 PARAMETER Experiment Name: At_42deg_Heat_P Parameter: Timepoint (hr) Value: 1
  misc_feature: MA Experiment 20000171 PARAMETER Experiment Name: At_42deg_Heat_P Parameter: Tissue Value: Aerial
  misc_feature: MA Experiment ID: 20000173 Result: Down-regulated in Transcription
  misc_feature: MA Experiment 20000173 PARAMETER Experiment Name: At_42deg_Heat_P Parameter: Age (day) Value: 14
  misc_feature: MA Experiment 20000173 PARAMETER Experiment Name: At_42deg_Heat_P Parameter: Organism Value: A. thaliana
  misc_feature: MA Experiment 20000173 PARAMETER Experiment Name: At_42deg_Heat_P Parameter: Plant Line Value: WS
  misc_feature: MA Experiment 20000173 PARAMETER Experiment Name: At_42deg_Heat_P Parameter: Temperature (deg C) Value: 42 vs. 22
  misc_feature: MA Experiment 20000173 PARAMETER Experiment Name: At_42deg_Heat_P Parameter: Timepoint (hr) Value: 6
  misc_feature: MA Experiment 20000173 PARAMETER Experiment Name: At_42deg_Heat_P Parameter: Tissue Value: Aerial
  misc_feature: MA Experiment ID: 20000179 Result: Up-regulated in Transcription
  misc_feature: MA Experiment 20000179 PARAMETER Experiment Name: At_Germinating_Seeds_P Parameter: Age (hr) Value: 6 vs. 0
  misc_feature: MA Experiment 20000179 PARAMETER Experiment Name: At_Germinating_Seeds_P Parameter: Tissue Value: Germinating Seeds
  misc_feature: MA Experiment ID: 20000180 Result: Up-regulated in Transcription
  misc_feature: MA Experiment 20000180 PARAMETER Experiment Name: At_Germinating_Seeds_P Parameter: Age (hr) Value: 24 vs. 0
  misc_feature: MA Experiment 20000180 PARAMETER Experiment Name: At_Germinating_Seeds_P Parameter: Tissue Value: Germinating Seeds
  misc_feature: MA Experiment ID: 20000185 Result: Up-regulated in Transcription
  misc_feature: MA Experiment 20000185 PARAMETER Experiment Name: At_Roots__P Parameter: Age (day) Value: 7 vs. 21
  misc_feature: MA Experiment 20000185 PARAMETER Experiment Name: At_Roots__P Parameter: Organism Value: A. thaliana
  misc_feature: MA Experiment 20000185 PARAMETER Experiment Name: At_Roots__P Parameter: Tissue Value: Roots vs. Whole Plant
  misc_feature: MA Experiment ID: 20000234 Result: Up-regulated in Transcription
  misc_feature: MA Experiment 20000234 PARAMETER Experiment Name: At_Siliques_P Parameter: Age (day) Value: 21
  misc_feature: MA Experiment 20000234 PARAMETER Experiment Name: At_Siliques_P Parameter: Organism Value: A. thaliana
  misc_feature: MA Experiment 20000234 PARAMETER Experiment Name: At_Siliques_P Parameter: Plant Line Value: WS
  misc_feature: MA Experiment 20000234 PARAMETER Experiment Name: At_Siliques_P Parameter: Tissue Value: Less Than 5mm Siliques vs. Whole Plant
  misc_feature: MA Experiment ID: 20000235 Result: Up-regulated in Transcription
  misc_feature: MA Experiment 20000235 PARAMETER Experiment Name: At_Siliques_P Parameter: Age (day) Value: 21
  misc_feature: MA Experiment 20000235 PARAMETER Experiment Name: At_Siliques_P Parameter: Organism Value: A. thaliana
  misc_feature: MA Experiment 20000235 PARAMETER Experiment Name: At_Siliques_P Parameter: Plant Line Value: WS
  misc_feature: MA Experiment 20000235 PARAMETER Experiment Name: At_Siliques_P Parameter: Tissue Value: 5-10mm Siliques vs. Whole Plant
  misc_feature: MA Experiment ID: 20000265 Result: Up-regulated in Transcription
  misc_feature: MA Experiment 20000265 PARAMETER Experiment Name: At_Open_Flower_P Parameter: Age (day) Value: 21
  misc_feature: MA Experiment 20000265 PARAMETER Experiment Name: At_Open_Flower_P Parameter: Plant Line Value: WS
  misc_feature: MA Experiment 20000265 PARAMETER Experiment Name: At_Open_Flower_P Parameter: Tissue Value: Closed Flower vs. Whole Plant
  misc_feature: MA Experiment ID: 20000286 Result: Up-regulated in Transcription
  misc_feature: MA Experiment 20000286 PARAMETER Experiment Name: At_Open_Flower_P Parameter: Age (day) Value: 21
  misc_feature: MA Experiment 20000286 PARAMETER Experiment Name: At_Open_Flower_P Parameter: Plant Line Value: WS
  misc_feature: MA Experiment 20000286 PARAMETER Experiment Name: At_Open_Flower_P Parameter: Tissue Value: Half Open vs. Whole Plant
  misc_feature: MA Experiment ID: 20000437 Result: Down-regulated in Transcription
  misc_feature: MA Experiment 20000437 PARAMETER Experiment Name: At_Drought_P Parameter: Age (day) Value: 8
  misc_feature: MA Experiment 20000437 PARAMETER Experiment Name: At_Drought_P Parameter: Organism Value: A. thaliana
  misc_feature: MA Experiment 20000437 PARAMETER Experiment Name: At_Drought_P Parameter: Plant Line Value: WS
  misc_feature: MA Experiment 20000437 PARAMETER Experiment Name: At_Drought_P Parameter: Timepoint (hr) Value: 24
  misc_feature: MA Experiment 20000437 PARAMETER Experiment Name: At_Drought_P Parameter: Tissue Value: Whole Plant
  misc_feature: MA Experiment 20000437 PARAMETER Experiment Name: At_Drought_P Parameter: Treatment Value: Drought vs. No Drought
  misc_feature: MA Experiment ID: 20000439 Result: Up-regulated in Transcription
  misc_feature: MA Experiment 20000439 PARAMETER Experiment Name: At_Roots__P Parameter: Age (day) Value: 14 vs. 21
  misc_feature: MA Experiment 20000439 PARAMETER Experiment Name: At_Roots__P Parameter: Organism Value: A. thaliana
  misc_feature: MA Experiment 20000439 PARAMETER Experiment Name: At_Roots__P Parameter: Tissue Value: Roots vs. Whole Plant
  misc_feature: MA Experiment ID: 20001451 Result: Down-regulated in Transcription
  misc_feature: MA Experiment 20001451 PARAMETER Experiment Name: At_Far-red-induction_P Parameter: Age (day) Value: 7
  misc_feature: MA Experiment 20001451 PARAMETER Experiment Name: At_Far-red-induction_P Parameter: Light Value: Far-red vs. White
  misc_feature: MA Experiment 20001451 PARAMETER Experiment Name: At_Far-red-induction_P Parameter: Organism Value: A. thaliana
  misc_feature: MA Experiment 20001451 PARAMETER Experiment Name: At_Far-red-induction_P Parameter: Plant Line Value: Columbia
  misc_feature: MA Experiment 20001451 PARAMETER Experiment Name: At_Far-red-induction_P Parameter: Timepoint (hr) Value: 24
  misc_feature: MA Experiment 20001451 PARAMETER Experiment Name: At_Far-red-induction_P Parameter: Tissue Value: Whole Plant
  misc_feature: MA Experiment ID: 20001911 Result: Down-regulated in Transcription
  misc_feature: MA Experiment 20001911 PARAMETER Experiment Name: At_Drought_Reproduction_P Parameter: Age (day) Value: 40
  misc_feature: MA Experiment 20001911 PARAMETER Experiment Name: At_Drought_Reproduction_P Parameter: Organism Value: A. thaliana
  misc_feature: MA Experiment 20001911 PARAMETER Experiment Name: At_Drought_Reproduction_P Parameter: Plant Line Value: WS
  misc_feature: MA Experiment 20001911 PARAMETER Experiment Name: At_Drought_Reproduction_P Parameter: Timepoint (day) Value: 10
  misc_feature: MA Experiment 20001911 PARAMETER Experiment Name: At_Drought_Reproduction_P Parameter: Tissue Value: Flowers
  misc_feature: MA Experiment 20001911 PARAMETER Experiment Name: At_Drought_Reproduction_P Parameter: Treatment Value: Drought vs. No Drought
atgaagaacggctctataagtagaataagatctcctatcactgcttcacaatacactgtttcctctctgcaagttgcaacaaacagctttagtcaagaaaacatcattggtgaaggttctctaggccgtgtctatagagcagagttccccaatggaaagataatggcgattaagaagattgataatgcagcactttcattacaagaagaagataatttcttagaagccgtttcaaatatgtcgcggttgaggcatccaaacattgttcccttggctggatactgcaccgagcatggtcaacgtcttctagtgtatgaatatgtaggaaatgggaatctagatgatacgcttcacacgaatgatgatagaagcatgaatctgacttggaatgcgcgtgttaaagtggctcttggaactgccaaggctttagagtacttgcacgaagtttgcttgccttcaattgtccatagaaacttcaaatcagcgaatatattgctagacgaagaacttaatcctcacctatcagacagtggtttagctgctttgacacctaacactgagagacaggtttcaactcaagtggtaggttcatttggatacagcgctccagagtttgcactgtcgggaatttacacagtgaaaagtgatgtatacacttttggagtagtcatgcttgagctcttaactggtcggaagcctcttgacagctcgaggacgagagcagagcaatcactagtgagatgggcaacaccgcagcttcacgatatagatgctttgtctaaaatggttgatccttctcttaatggcatgtatccagctaagtcactgtctcgttttgcggacatcattgctctctgtattcagccggaaccagagttcaggcctccaatgtcagaggtggtgcaacagctagtaagattagttcaaagggcaagtgttgtcaaacgaagatcaagtgatgacactggattttcatacaggacacctgaacacgagcacgtcgatatctcattctga

SEQ ID NO: 74137 - protein, 338 aa, Arabidopsis thaliana
  peptide (1)..(338): Ceres Seq. ID no. 4994908
  misc_feature (1)..(338): Homolog of NCBI NO: 15234728 NR Description: serine/threonine protein kinase like protein; id: At4g22130.1 [Arabidopsis thaliana] >gi|11259536|pir||T49120
  misc_feature (11)..(322): Homolog of NCBI NO: 7489783 NR Description: leucine-rich repeat transmembrane protein kinase
  misc_feature (13)..(332): Homolog of NCBI NO: 29367551 NR Description: putative leucine-rich repeat transmembrane
  misc_feature (11)..(332): Homolog of NCBI NO: 15217283 NR Description: Putative leucine-rich repeat transmembrane
  misc_feature (11)..(332): Homolog of NCBI NO: 7489784 NR Description: leucine-rich repeat transmembrane protein kinase
  misc_feature (45)..(332): Homolog of NCBI NO: 37533916 NR Description: putative leucine-rich repeat transmembrane
  misc_feature (13)..(57): Homolog of NCBI NO: 37533916 NR Description: putative leucine-rich repeat transmembrane
  misc_feature (12)..(325): Homolog of NCBI NO: 30683104 NR Description: leucine-rich repeat transmembrane protein kinase, [Arabidopsis thaliana] >gi|9279582|dbj|BAB01040.1|
  misc_feature (7)..(316): Homolog of NCBI NO: 15220928 NR Description: leucine-rich repeat transmembrane protein kinase
  misc_feature (5)..(327): Homolog of NCBI NO: 34906746 NR Description: similar to leucine-rich repeat transmembrane
MKNGSISRIRSPITASQYTVSSLQVATNSFSQENIIGEGSLGRVYRAEFPNGKIMAIKKIDNAALSLQEEDNFLEAVSNMSRLRHPNIVPLAGYCTEHGQRLLVYEYVGNGNLDDTLHTNDDRSMNLTWNARVKVALGTAKALEYLHEVCLPSIVHRNFKSANILLDEELNPHLSDSGLAALTPNTERQVSTQVVGSFGYSAPEFALSGIYTVKSDVYTFGVVMLELLTGRKPLDSSRTRAEQSLVRWATPQLHDIDALSKMVDPSLNGMYPAKSLSRFADIIALCIQPEPEFRPPMSEVVQQLVRLVQRASVVKRRSSDDTGFSYRTPEHEHVDISF

SEQ ID NO: 74138 - protein, 284 aa, Arabidopsis thaliana
  peptide (1)..(284): Ceres Seq. ID no. 4994909
  misc_feature (1)..(284): Homolog of NCBI NO: 15234728 NR Description: serine/threonine protein kinase like protein; id: At4g22130.1 [Arabidopsis thaliana] >gi|11259536|pir||T49120
  misc_feature (1)..(268): Homolog of NCBI NO: 7489783 NR Description: leucine-rich repeat transmembrane protein kinase
  misc_feature (1)..(278): Homolog of NCBI NO: 29367551 NR Description: putative leucine-rich repeat transmembrane
  misc_feature (1)..(278): Homolog of NCBI NO: 15217283 NR Description: Putative leucine-rich repeat transmembrane
  misc_feature (1)..(278): Homolog of NCBI NO: 7489784 NR Description: leucine-rich repeat transmembrane protein kinase
  misc_feature (1)..(278): Homolog of NCBI NO: 37533916 NR Description: putative leucine-rich repeat transmembrane
  misc_feature (1)..(271): Homolog of NCBI NO: 30683104 NR Description: leucine-rich repeat transmembrane protein kinase, [Arabidopsis thaliana] >gi|9279582|dbj|BAB01040.1|
  misc_feature (1)..(262): Homolog of NCBI NO: 15220928 NR Description: leucine-rich repeat transmembrane protein kinase
  misc_feature (1)..(273): Homolog of NCBI NO: 34906746 NR Description: similar to leucine-rich repeat transmembrane
  misc_feature (1)..(259): Homolog of NCBI NO: 30017524 NR Description: putative leucine-rich repeat transmembrane
MAIKKIDNAALSLQEEDNFLEAVSNMSRLRHPNIVPLAGYCTEHGQRLLVYEYVGNGNLDDTLHTNDDRSMNLTWNARVKVALGTAKALEYLHEVCLPSIVHRNFKSANILLDEELNPHLSDSGLAALTPNTERQVSTQVVGSFGYSAPEFALSGIYTVKSDVYTFGVVMLELLTGRKPLDSSRTRAEQSLVRWATPQLHDIDALSKMVDPSLNGMYPAKSLSRFADIIALCIQPEPEFRPPMSEVVQQLVRLVQRASVVKRRSSDDTGFSYRTPEHEHVDISF

SEQ ID NO: 74139 - protein, 259 aa, Arabidopsis thaliana
  peptide (1)..(259): Ceres Seq. ID no. 4994910
  misc_feature (1)..(259): Homolog of NCBI NO: 15234728 NR Description: serine/threonine protein kinase like protein; id: At4g22130.1 [Arabidopsis thaliana] >gi|11259536|pir||T49120
  misc_feature (1)..(243): Homolog of NCBI NO: 7489783 NR Description: leucine-rich repeat transmembrane protein kinase
  misc_feature (1)..(253): Homolog of NCBI NO: 29367551 NR Description: putative leucine-rich repeat transmembrane
  misc_feature (1)..(253): Homolog of NCBI NO: 15217283 NR Description: Putative leucine-rich repeat transmembrane
  misc_feature (1)..(253): Homolog of NCBI NO: 7489784 NR Description: leucine-rich repeat transmembrane protein kinase
  misc_feature (1)..(253): Homolog of NCBI NO: 37533916 NR Description: putative leucine-rich repeat transmembrane
  misc_feature (1)..(246): Homolog of NCBI NO: 30683104 NR Description: leucine-rich repeat transmembrane protein kinase, [Arabidopsis thaliana] >gi|9279582|dbj|BAB01040.1|
  misc_feature (1)..(237): Homolog of NCBI NO: 15220928 NR Description: leucine-rich repeat transmembrane protein kinase
  misc_feature (1)..(248): Homolog of NCBI NO: 34906746 NR Description: similar to leucine-rich repeat transmembrane
  misc_feature (1)..(234): Homolog of NCBI NO: 30017524 NR Description: putative leucine-rich repeat transmembrane
MSRLRHPNIVPLAGYCTEHGQRLLVYEYVGNGNLDDTLHTNDDRSMNLTWNARVKVALGTAKALEYLHEVCLPSIVHRNFKSANILLDEELNPHLSDSGLAALTPNTERQVSTQVVGSFGYSAPEFALSGIYTVKSDVYTFGVVMLELLTGRKPLDSSRTRAEQSLVRWATPQLHDIDALSKMVDPSLNGMYPAKSLSRFADIIALCIQPEPEFRPPMSEVVQQLVRLVQRASVVKRRSSDDTGFSYRTPEHEHVDISF

SEQ ID NO: 74140 - DNA, 480 bp, Arabidopsis thaliana
  misc_feature (1)..(480): Ceres Seq. ID no. 4994989
  misc_feature: MA Experiment ID: 20000306 Result: Down-regulated in Transcription
  misc_feature: MA Experiment 20000306 PARAMETER Experiment Name: At_Germinating_Seeds_Sub_P Parameter: Age (hr) Value: 6 vs. 0
  misc_feature: MA Experiment 20000306 PARAMETER Experiment Name: At_Germinating_Seeds_Sub_P Parameter: Organism Value: A. thaliana
  misc_feature: MA Experiment 20000306 PARAMETER Experiment Name: At_Germinating_Seeds_Sub_P Parameter: Plant Line Value: WS
  misc_feature: MA Experiment 20000306 PARAMETER Experiment Name: At_Germinating_Seeds_Sub_P Parameter: Tissue Value: Germinating Seeds
  misc_feature: MA Experiment ID: 20000307 Result: Down-regulated in Transcription
  misc_feature: MA Experiment 20000307 PARAMETER Experiment Name: At_Germinating_Seeds_Sub_P Parameter: Age (hr) Value: 24 vs. 0
  misc_feature: MA Experiment 20000307 PARAMETER Experiment Name: At_Germinating_Seeds_Sub_P Parameter: Organism Value: A. thaliana
  misc_feature: MA Experiment 20000307 PARAMETER Experiment Name: At_Germinating_Seeds_Sub_P Parameter: Plant Line Value: WS
  misc_feature: MA Experiment 20000307 PARAMETER Experiment Name: At_Germinating_Seeds_Sub_P Parameter: Tissue Value: Germinating Seeds
atggggttgaacctactgagactgcttgttcagaacagaatagctgaattccacacagaactgggattactttcatctgcaaccttggagaatccttgcatcaagcatgcggtggagctcgagcaatccttcatggaaggtgcttataaccgtgtgttgagtgctagacaaaccgcacctgatgagacttacgtctatttcatggatctcttggcaaaaaccattagagatgaaatagctggatgcagtgagaaagcatacgatcatctctcaatcagtgaaggttgtaagatgttactcttctcgtctgatcaacaactgttaacatatgtgaacgaggagcacccggagtgggaagttaaagacgggttagttgtcttccaaaaaaccagagaaaccgcaccgtgcaaggagataccgtcacttcaactcatcaaccagactctcagttacaccagagagctcgagcgtatcttgtaa

SEQ ID NO: 74141 - protein, 159 aa, Arabidopsis thaliana
  peptide (1)..(159): Ceres Seq. ID no. 4994990
  misc_feature (1)..(159): Pfam Name: 26S proteasome non-ATPase regulatory subunit Nin1/mts3 Pfam Description: 26S proteasome non-ATPase regulatory subunit
  misc_feature (1)..(159): Homolog of NCBI NO: 15238267 NR Description: putative protein; protein id: At5g42040.1 thaliana] >gi|9757949|dbj|BAB08437.1| contains similarity to 26S regulatory complex subunit~gene_id:MJC20.14 [Arabidopsis
  misc_feature (1)..(159): Homolog of NCBI NO: 15217661 NR Description: 26S proteasome regulatory subunit (RPN12), protein id: At1g64520.1, supported by cDNA: gi_14532465,
  misc_feature (1)..(159): Homolog of NCBI NO: 17297985 NR Description: 26S proteasome regulatory particle non-ATPase
  misc_feature (1)..(159): Homolog of NCBI NO: 38372874 NR Description: Probable 26S proteasome non-ATPase regulatory
  misc_feature (1)..(159): Homolog of NCBI NO: 13278567 NR Description: RIKEN cDNA 6720456J22 gene [Mus musculus]
  misc_feature (1)..(159): Homolog of NCBI NO: 26371077 NR Description: unnamed protein product [Mus musculus] unnamed protein product [Mus musculus]
  misc_feature (1)..(159): Homolog of NCBI NO: 34855658 NR Description: similar to proteasome 26S non-ATPase subunit 8
  misc_feature (1)..(159): Homolog of NCBI NO: 4506233 NR Description: proteasome 26S non-ATPase subunit 8; 26S regulatory subunit p31; 26S proteasome regulatory subunit S14;
  misc_feature (1)..(159): Homolog of NCBI NO: 40787635 NR Description: Unknown (protein for IMAGE:6055235) [Homo sapiens]
  misc_feature (1)..(159): Homolog of NCBI NO: 20978554 NR Description: 26S proteasome non-ATPase regulatory subunit 8
MGLNLLRLLVQNRIAEFHTELGLLSSATLENPCIKHAVELEQSFMEGAYNRVLSARQTAPDETYVYFMDLLAKTIRDEIAGCSEKAYDHLSISEGCKMLLFSSDQQLLTYVNEEHPEWEVKDGLVVFQKTRETAPCKEIPSLQLINQTLSYTRELERIL

SEQ ID NO: 74142 - protein, 115 aa, Arabidopsis thaliana
  peptide (1)..(115): Ceres Seq. ID no. 4994991
  misc_feature (1)..(115): Pfam Name: 26S proteasome non-ATPase regulatory subunit Nin1/mts3 Pfam Description: 26S proteasome non-ATPase regulatory subunit
  misc_feature (1)..(115): Homolog of NCBI NO: 15238267 NR Description: putative protein; protein id: At5g42040.1 thaliana] >gi|9757949|dbj|BAB08437.1| contains similarity to 26S regulatory complex subunit~gene_id:MJC20.14 [Arabidopsis
  misc_feature (1)..(115): Homolog of NCBI NO: 15217661 NR Description: 26S proteasome regulatory subunit (RPN12), protein id: At1g64520.1, supported by cDNA: gi_14532465,
  misc_feature (1)..(115): Homolog of NCBI NO: 17297985 NR Description: 26S proteasome regulatory particle non-ATPase
  misc_feature (1)..(115): Homolog of NCBI NO: 38372874 NR Description: Probable 26S proteasome non-ATPase regulatory
  misc_feature (1)..(115): Homolog of NCBI NO: 13278567 NR Description: RIKEN cDNA 6720456J22 gene [Mus musculus]
  misc_feature (1)..(115): Homolog of NCBI NO: 26371077 NR Description: unnamed protein product [Mus musculus] unnamed protein product [Mus musculus]
  misc_feature (1)..(115): Homolog of NCBI NO: 34855658 NR Description: similar to proteasome 26S non-ATPase subunit 8
  misc_feature (1)..(115): Homolog of NCBI NO: 4506233 NR Description: proteasome 26S non-ATPase subunit 8; 26S regulatory subunit p31; 26S proteasome regulatory subunit S14;
  misc_feature (1)..(115): Homolog of NCBI NO: 40787635 NR Description: Unknown (protein for IMAGE:6055235) [Homo sapiens]
  misc_feature (1)..(115): Homolog of NCBI NO: 20978554 NR Description: 26S proteasome non-ATPase regulatory subunit 8
MEGAYNRVLSARQTAPDETYVYFMDLLAKTIRDEIAGCSEKAYDHLSISEGCKMLLFSSDQQLLTYVNEEHPEWEVKDGLVVFQKTRETAPCKEIPSLQLINQTLSYTRELERIL

SEQ ID NO: 74143 - protein, 92 aa, Arabidopsis thaliana
  peptide (1)..(92): Ceres Seq. ID no. 4994992
  misc_feature (1)..(92): Pfam Name: 26S proteasome non-ATPase regulatory subunit Nin1/mts3 Pfam Description: 26S proteasome non-ATPase regulatory subunit
  misc_feature (1)..(92): Homolog of NCBI NO: 15238267 NR Description: putative protein; protein id: At5g42040.1 thaliana] >gi|9757949|dbj|BAB08437.1| contains similarity to 26S regulatory complex subunit~gene_id:MJC20.14 [Arabidopsis
  misc_feature (1)..(92): Homolog of NCBI NO: 15217661 NR Description: 26S proteasome regulatory subunit (RPN12), protein id: At1g64520.1, supported by cDNA: gi_14532465,
  misc_feature (1)..(92): Homolog of NCBI NO: 17297985 NR Description: 26S proteasome regulatory particle non-ATPase
  misc_feature (1)..(92): Homolog of NCBI NO: 38372874 NR Description: Probable 26S proteasome non-ATPase regulatory
  misc_feature (1)..(92): Homolog of NCBI NO: 13278567 NR Description: RIKEN cDNA 6720456J22 gene [Mus musculus]
  misc_feature (1)..(92): Homolog of NCBI NO: 26371077 NR Description: unnamed protein product [Mus musculus] unnamed protein product [Mus musculus]
  misc_feature (1)..(92): Homolog of NCBI NO: 34855658 NR Description: similar to proteasome 26S non-ATPase subunit 8
  misc_feature (1)..(92): Homolog of NCBI NO: 4506233 NR Description: proteasome 26S non-ATPase subunit 8; 26S regulatory subunit p31; 26S proteasome regulatory subunit S14;
  misc_feature (1)..(92): Homolog of NCBI NO: 40787635 NR Description: Unknown (protein for IMAGE:6055235) [Homo sapiens]
  misc_feature (1)..(92): Homolog of NCBI NO: 20978554 NR Description: 26S proteasome non-ATPase regulatory subunit 8
MDLLAKTIRDEIAGCSEKAYDHLSISEGCKMLLFSSDQQLLTYVNEEHPEWEVKDGLVVFQKTRETAPCKEIPSLQLINQTLSYTRELERIL

SEQ ID NO: 74144 - DNA, 1191 bp, Arabidopsis thaliana
  misc_feature (1)..(1191): Ceres Seq. ID no. 4995050
  misc_feature: MA Experiment ID: 20000171 Result: Down-regulated in Transcription
  misc_feature: MA Experiment 20000171 PARAMETER Experiment Name: At_42deg_Heat_P Parameter: Age (day) Value: 14
  misc_feature: MA Experiment 20000171 PARAMETER Experiment Name: At_42deg_Heat_P Parameter: Organism Value: A. thaliana
  misc_feature: MA Experiment 20000171 PARAMETER Experiment Name: At_42deg_Heat_P Parameter: Plant Line Value: WS
  misc_feature: MA Experiment 20000171 PARAMETER Experiment Name: At_42deg_Heat_P Parameter: Temperature (deg C) Value: 42 vs. 22
  misc_feature: MA Experiment 20000171 PARAMETER Experiment Name: At_42deg_Heat_P Parameter: Timepoint (hr) Value: 1
  misc_feature: MA Experiment 20000171 PARAMETER Experiment Name: At_42deg_Heat_P Parameter: Tissue Value: Aerial
  misc_feature: MA Experiment ID: 20000173 Result: Down-regulated in Transcription
  misc_feature: MA Experiment 20000173 PARAMETER Experiment Name: At_42deg_Heat_P Parameter: Age (day) Value: 14
  misc_feature: MA Experiment 20000173 PARAMETER Experiment Name: At_42deg_Heat_P Parameter: Organism Value: A. thaliana
  misc_feature: MA Experiment 20000173 PARAMETER Experiment Name: At_42deg_Heat_P Parameter: Plant Line Value: WS
  misc_feature: MA Experiment 20000173 PARAMETER Experiment Name: At_42deg_Heat_P Parameter: Temperature (deg C) Value: 42 vs. 22
  misc_feature: MA Experiment 20000173 PARAMETER Experiment Name: At_42deg_Heat_P Parameter: Timepoint (hr) Value: 6
  misc_feature: MA Experiment 20000173 PARAMETER Experiment Name: At_42deg_Heat_P Parameter: Tissue Value: Aerial
  misc_feature: MA Experiment ID: 20000184 Result: Down-regulated in Transcription
  misc_feature: MA Experiment 20000184 PARAMETER Experiment Name: At_Shoots__P Parameter: Age (day) Value: 7
  misc_feature: MA Experiment 20000184 PARAMETER Experiment Name: At_Shoots__P Parameter: Tissue Value: Shoots vs. Whole Plant
atgtttggtggaaaaagtcatatactcagagggagtgtatcactggccttgatcgtccttattcttttggtcattatactcctggtttctgaggaaaacccgcttcgtgattctctctttgaagtaaaactttgtaactttgcaaagggaaaatgggttgaagaccggaagagaccattgtattctggttttgaatgtaaacaatggttatcatccatgtggtcatgtagaataatgggcagacccgatttctcatttgagggttaccgttggcagccagaaggttgcaacatgccacagtttgacagattcactttcttgacaagaatgcagaacaagacgatagcatttataggagactcattggggcggcaacagtttcaatccctaatgtgtatggccagtggtggtgaagatagcccagaggttcaaaacgtgggatgggagtacggtttggtgaaagccaaaggagctctccgtcctgatggttgggcttatcggttcccaaccacaaacacgacgatcttgtattattggtcagctagcttatcagatttggtacccatgaacaatacagatccacctagtcttactgcaatgcatctagatcgtccaccagcattcatgagaaactaccttcaccgtttcgatgtattggttctaaacactggtcaccattggaacagaggtaagattgaaggaaaccattgggtgatgcatgtaaatggaacacaggtcgaaggcgaatatctcaaagatatcagaaacgccaaggattttacaatacacagcgttgcgaagtggctcgatgcacagcttccattgcatccgcggttgaaagctttctttaggacaatttctccgaggcattttaaaaacggagattggaatacaggtggaaactgtaacaacacggttcctttgtctagaggcagcgaaatcacaggggatgatggatcgatcgatgcaacagttgagagtgctgtgaacgggacaaggatcaagattcttgacataactgcactttctgagctaagagacgaagctcatatctcagggtctaaactcaaaccccgaaaaccgaagaaggcaagtaacgtgacctcaactccaacgatcaacgattgcttgcattggtgcttaccagggatcccagatacttggaatgaacttttcattgctcagatttga

SEQ ID NO: 74145 - protein, 396 aa, Arabidopsis thaliana
  peptide (1)..(396): Ceres Seq. ID no. 4995051
  misc_feature (227)..(396): Pfam Name: Arabidopsis proteins of unknown function Pfam Description: Arabidopsis proteins of unknown function
  misc_feature (1)..(396): Homolog of NCBI NO: 8777315 NR Description: gene_id:MBM17.12~pir||T02538~strong similarity to
  misc_feature (1)..(396): Homolog of NCBI NO: 30697938 NR Description: expressed protein [Arabidopsis thaliana]
  misc_feature (1)..(396): Homolog of NCBI NO: 15224349 NR Description: unknown protein; protein id: At2g37720.1
  misc_feature (26)..(396): Homolog of NCBI NO: 15810385 NR Description: unknown protein [Arabidopsis thaliana]
  misc_feature (26)..(396): Homolog of NCBI NO: 18420285 NR Description: putative protein; protein id: At5g20680.1,
  misc_feature (45)..(394): Homolog of NCBI NO: 6862912 NR Description: unknown protein [Arabidopsis thaliana]
  misc_feature (1)..(396): Homolog of NCBI NO: 9759321 NR Description: gb|AAF00670.1~gene_id:MBL20.11~strong similarity
  misc_feature (5)..(396): Homolog of NCBI NO: 15229797 NR Description: hypothetical protein; protein id: At3g11570.1
  misc_feature (45)..(396): Homolog of NCBI NO: 34906936 NR Description: leaf senescence related protein-like [Oryza
  misc_feature (43)..(396): Homolog of NCBI NO: 18415139 NR Description: putative protein; protein id: At5g06230.1, by cDNA: gi_13605530 [Arabidopsis thaliana] AT5g06230/MBL20_11 [Arabidopsis thaliana]
MFGGKSHILRGSVSLALIVLILLVIILLVSEENPLRDSLFEVKLCNFAKGKWVEDRKRPLYSGFECKQWLSSMWSCRIMGRPDFSFEGYRWQPEGCNMPQFDRFTFLTRMQNKTIAFIGDSLGRQQFQSLMCMASGGEDSPEVQNVGWEYGLVKAKGALRPDGWAYRFPTTNTTILYYWSASLSDLVPMNNTDPPSLTAMHLDRPPAFMRNYLHRFDVLVLNTGHHWNRGKIEGNHWVMHVNGTQVEGEYLKDIRNAKDFTIHSVAKWLDAQLPLHPRLKAFFRTISPRHFKNGDWNTGGNCNNTVPLSRGSEITGDDGSIDATVESAVNGTRIKILDITALSELRDEAHISGSKLKPRKPKKASNVTSTPTINDCLHWCLPGIPDTWNELFIAQI

SEQ ID NO: 74146 - protein, 324 aa, Arabidopsis thaliana
  peptide (1)..(324): Ceres Seq. ID no. 4995052
  misc_feature (155)..(324): Pfam Name: Arabidopsis proteins of unknown function Pfam Description: Arabidopsis proteins of unknown function
  misc_feature (1)..(324): Homolog of NCBI NO: 8777315 NR Description: gene_id:MBM17.12~pir||T02538~strong similarity to
  misc_feature (1)..(324): Homolog of NCBI NO: 30697938 NR Description: expressed protein [Arabidopsis thaliana]
  misc_feature (1)..(324): Homolog of NCBI NO: 15224349 NR Description: unknown protein; protein id: At2g37720.1
  misc_feature (1)..(324): Homolog of NCBI NO: 15810385 NR Description: unknown protein [Arabidopsis thaliana]
  misc_feature (1)..(324): Homolog of NCBI NO: 18420285 NR Description: putative protein; protein id: At5g20680.1,
  misc_feature (1)..(322): Homolog of NCBI NO: 6862912 NR Description: unknown protein [Arabidopsis thaliana]
  misc_feature (1)..(324): Homolog of NCBI NO: 9759321 NR Description: gb|AAF00670.1~gene_id:MBL20.11~strong similarity
  misc_feature (1)..(324): Homolog of NCBI NO: 15229797 NR Description: hypothetical protein; protein id: At3g11570.1
  misc_feature (1)..(324): Homolog of NCBI NO: 34906936 NR Description: leaf senescence related protein-like [Oryza
  misc_feature (1)..(324): Homolog of NCBI NO: 18415139 NR Description: putative protein; protein id: At5g06230.1, by cDNA: gi_13605530 [Arabidopsis thaliana] AT5g06230/MBL20_11 [Arabidopsis thaliana]
MWSCRIMGRPDFSFEGYRWQPEGCNMPQFDRFTFLTRMQNKTIAFIGDSLGRQQFQSLMCMASGGEDSPEVQNVGWEYGLVKAKGALRPDGWAYRFPTTNTTILYYWSASLSDLVPMNNTDPPSLTAMHLDRPPAFMRNYLHRFDVLVLNTGHHWNRGKIEGNHWVMHVNGTQVEGEYLKDIRNAKDFTIHSVAKWLDAQLPLHPRLKAFFRTISPRHFKNGDWNTGGNCNNTVPLSRGSEITGDDGSIDATVESAVNGTRIKILDITALSELRDEAHISGSKLKPRKPKKASNVTSTPTINDCLHWCLPGIPDTWNELFIAQI

SEQ ID NO: 74147 - protein, 318 aa, Arabidopsis thaliana
  peptide (1)..(318): Ceres Seq. ID no. 4995053
  misc_feature (149)..(318): Pfam Name: Arabidopsis proteins of unknown function Pfam Description: Arabidopsis proteins of unknown function
  misc_feature (1)..(318): Homolog of NCBI NO: 8777315 NR Description: gene_id:MBM17.12~pir||T02538~strong similarity to
  misc_feature (1)..(318): Homolog of NCBI NO: 30697938 NR Description: expressed protein [Arabidopsis thaliana]
  misc_feature (1)..(318): Homolog of NCBI NO: 15224349 NR Description: unknown protein; protein id: At2g37720.1
  misc_feature (1)..(318): Homolog of NCBI NO: 15810385 NR Description: unknown protein [Arabidopsis thaliana]
  misc_feature (1)..(318): Homolog of NCBI NO: 18420285 NR Description: putative protein; protein id: At5g20680.1,
  misc_feature (1)..(316): Homolog of NCBI NO: 6862912 NR Description: unknown protein [Arabidopsis thaliana]
  misc_feature (1)..(318): Homolog of NCBI NO: 9759321 NR Description: gb|AAF00670.1~gene_id:MBL20.11~strong similarity
  misc_feature (1)..(318): Homolog of NCBI NO: 15229797 NR Description: hypothetical protein; protein id: At3g11570.1
  misc_feature (1)..(318): Homolog of NCBI NO: 34906936 NR Description: leaf senescence related protein-like [Oryza
  misc_feature (1)..(318): Homolog of NCBI NO: 18415139 NR Description: putative protein; protein id: At5g06230.1, by cDNA: gi_13605530 [Arabidopsis thaliana] AT5g06230/MBL20_11 [Arabidopsis thaliana]
MGRPDFSFEGYRWQPEGCNMPQFDRFTFLTRMQNKTIAFIGDSLGRQQFQSLMCMASGGEDSPEVQNVGWEYGLVKAKGALRPDGWAYRFPTTNTTILYYWSASLSDLVPMNNTDPPSLTAMHLDRPPAFMRNYLHRFDVLVLNTGHHWNRGKIEGNHWVMHVNGTQVEGEYLKDIRNAKDFTIHSVAKWLDAQLPLHPRLKAFFRTISPRHFKNGDWNTGGNCNNTVPLSRGSEITGDDGSIDATVESAVNGTRIKILDITALSELRDEAHISGSKLKPRKPKKASNVTSTPTINDCLHWCLPGIPDTWNELFIAQI

SEQ ID NO: 74148 - DNA, 1668 bp, Arabidopsis thaliana
  misc_feature (1)..(1668): Ceres Seq. ID no. 4995115
  misc_feature: MA Experiment ID: 20000184 Result: Up-regulated in Transcription
  misc_feature: MA Experiment 20000184 PARAMETER Experiment Name: At_Shoots__P Parameter: Age (day) Value: 7
  misc_feature: MA Experiment 20000184 PARAMETER Experiment Name: At_Shoots__P Parameter: Tissue Value: Shoots vs. Whole Plant
  misc_feature: MA Experiment ID: 20000264 Result: Up-regulated in Transcription
  misc_feature: MA Experiment 20000264 PARAMETER Experiment Name: At_Open_Flower_P Parameter: Age (day) Value: 21
  misc_feature: MA Experiment 20000264 PARAMETER Experiment Name: At_Open_Flower_P Parameter: Plant Line Value: WS
  misc_feature: MA Experiment 20000264 PARAMETER Experiment Name: At_Open_Flower_P Parameter: Tissue Value: Open Flower vs. Whole Plant
  misc_feature: MA Experiment ID: 20000286 Result: Up-regulated in Transcription
  misc_feature: MA Experiment 20000286 PARAMETER Experiment Name: At_Open_Flower_P Parameter: Age (day) Value: 21
  misc_feature: MA Experiment 20000286 PARAMETER Experiment Name: At_Open_Flower_P Parameter: Plant Line Value: WS
  misc_feature: MA Experiment 20000286 PARAMETER Experiment Name: At_Open_Flower_P Parameter: Tissue Value: Half Open vs. Whole Plant
  misc_feature: MA Experiment ID: 20000437 Result: Up-regulated in Transcription
  misc_feature: MA Experiment 20000437 PARAMETER Experiment Name: At_Drought_P Parameter: Age (day) Value: 8
  misc_feature: MA Experiment 20000437 PARAMETER Experiment Name: At_Drought_P Parameter: Organism Value: A. thaliana
  misc_feature: MA Experiment 20000437 PARAMETER Experiment Name: At_Drought_P Parameter: Plant Line Value: WS
  misc_feature: MA Experiment 20000437 PARAMETER Experiment Name: At_Drought_P Parameter: Timepoint (hr) Value: 24
  misc_feature: MA Experiment 20000437 PARAMETER Experiment Name: At_Drought_P Parameter: Tissue Value: Whole Plant
  misc_feature: MA Experiment 20000437 PARAMETER Experiment Name: At_Drought_P Parameter: Treatment Value: Drought vs. No Drought
  misc_feature: MA Experiment ID: 20000495 Result: Up-regulated in Transcription
  misc_feature: MA Experiment 20000495 PARAMETER Experiment Name: At_Guard_Cells_P Parameter: Harvest Date Value: 8/2/2002
  misc_feature: MA Experiment 20000495 PARAMETER Experiment Name: At_Guard_Cells_P Parameter: Organism Value: A. thaliana
  misc_feature: MA Experiment 20000495 PARAMETER Experiment Name: At_Guard_Cells_P Parameter: Tissue Value: Guard Cells vs. Leaves
atgaagaacaataacaacaaatcttcttcttcttctagctatgattcttctttgtctccttcttcttcatcctcctcccaccagaactggctctctttctctctctccaacaataacaacaacttcaattcttcctcaaaccctaatctcacttcctccacatcagatcatcatcatcctcacccttctcacctctctctctttcaagctttctccacttctccagtcgaacggcaagatgggtcaccgggagtttcacccagcgatgccacggcggttctttccgtataccccggcggtcctaaacttgagaacttcctcggcggaggagcctcaacgacgacaacaagaccaatgcaacaagtgcaatctcttggcggcgttgtcttctcttccgacctacagccaccgcttcatcctccgtccgccgccgagatctacgactctgagctcaagtcaatagccgctagcttcctaggaaactactccggtggacactcgtcggaggtctctagcgtacataaacaacaaccgaatcctctagctgtctcagaggcttcgcctactccgaagaagaacgtagagagttttggacaacgtacctcgatttatagaggagtcacaagacatagatggactggaagatacgaagctcatctatgggataatagttgccgaagagaaggccaaagcagaaaaggaagacaaggtggttatgataaggaagataaagcagctagagcttacgaccttgcagctcttaagtattggggtcctacaactacgactaatttcccgatatcaaattacgaatctgaacttgaagaaatgaaacacatgactcgacaagagttcgttgcttctttaagacggaaaagcagtggattctctaggggtgcctccatgtacagaggcgtcactagacatcatcagcatggtcgatggcaggcacgaattggaagagttgcaggcaacaaagacctttatcttggcacatttagcactcaagaggaagctgcagaagcttatgatatagcagcgatcaaattccgcggtctaaatgcagtcaccaatttcgacatcagtcgatatgatgtcaaatcaattgctagctgtaatctccctgtgggtggactaatgcctaaaccttctccagcaaccgcagcggctgacaaaaccgttgatctttctccatccgactctccatctctaaccacaccgtccctcacgttcaatgtggcaacaccggtcaatgaccatggaggaactttttaccacactggtataccaatcaaaccagacccggctgatcattattggtccaacatctttggattccaggcaaacccgaaagcagaaatgcgaccattagcaaactttgggtcggatcttcataacccttctcctggttatgctataatgccggtaatgcaggaaggtgaaaacaactttggtggtagttttgttgggtctgatgggtataacaatcattccgctgcatcgaacccggtctcagcaattccgctgtcctcgacaactacaatgagtaacggtaacgaagggtatggtggaaacataaactggattaataacaacatttcaagttcttaccaaactgcaaaatcaaatctctctgttttgcacacaccggtttttgggttggaatga

SEQ ID NO: 74149 - protein, 555 aa, Arabidopsis thaliana
  peptide (1)..(555): Ceres Seq. ID no. 4995116
  misc_feature (201)..(271): Pfam Name: AP2 domain Pfam Description: AP2 domain
  misc_feature (1)..(555): Homolog of NCBI NO: 15242120 NR Description: ovule development protein, putative; protein id: [Arabidopsis thaliana] >gi|9757933|dbj|BAB08476.1| contains to unknown protein~gb|AAD30633.1~gene_id:MSF19.5 [Arabidopsis
  misc_feature (55)..(461): Homolog of NCBI NO: 21304225 NR Description: aintegumenta-like protein [Oryza sativa]
  misc_feature (29)..(390): Homolog of NCBI NO: 21304227 NR Description: ovule development aintegumenta-like protein BNM3
  misc_feature (115)..(378): Homolog of NCBI NO: 9294411 NR Description: contains similarity to unknown
  misc_feature (115)..(378): Homolog of NCBI NO: 15232375 NR Description: ovule development protein, putative; protein id:
  misc_feature (161)..(390): Homolog of NCBI NO: 34907686 NR Description: putative ovule development protein
  misc_feature (153)..(390): Homolog of NCBI NO: 32490266 NR Description: OSJNBb0116K07.8 [Oryza sativa (japonica
  misc_feature (141)..(378): Homolog of NCBI NO: 15223777 NR Description: ovule development protein, putative; protein id:
  misc_feature (141)..(378): Homolog of NCBI NO: 25405447 NR Description: hypothetical protein F11M15.6 [imported] - thaliana >gi|4836931|gb|AAD30633.1|AC006085_6 Hypothetical
  misc_feature (100)..(377): Homolog of NCBI NO: 15237965 NR Description: ovule development protein, putative; protein id: [Arabidopsis thaliana] >gi|11358596|pir||T51580 ovule development
MKNNNNKSSSSSSYDSSLSPSSSSSSHQNWLSFSLSNNNNNFNSSSNPNLTSSTSDHHHPHPSHLSLFQAFSTSPVERQDGSPGVSPSDATAVLSVYPGGPKLENFLGGGASTTTTRPMQQVQSLGGVVFSSDLQPPLHPPSAAEIYDSELKSIAASFLGNYSGGHSSEVSSVHKQQPNPLAVSEASPTPKKNVESFGQRTSIYRGVTRHRWTGRYEAHLWDNSCRREGQSRKGRQGGYDKEDKAARAYDLAALKYWGPTTTTNFPISNYESELEEMKHMTRQEFVASLRRKSSGFSRGASMYRGVTRHHQHGRWQARIGRVAGNKDLYLGTFSTQEEAAEAYDIAAIKFRGLNAVTNFDISRYDVKSIASCNLPVGGLMPKPSPATAAADKTVDLSPSDSPSLTTPSLTFNVATPVNDHGGTFYHTGIPIKPDPADHYWSNIFGFQANPKAEMRPLANFGSDLHNPSPGYAIMPVMQEGENNFGGSFVGSDGYNNHSAASNPVSAIPLSSTTTMSNGNEGYGGNINWINNNISSSYQTAKSNLSVLHTPVFGLE

SEQ ID NO: 74150 - protein, 437 aa, Arabidopsis thaliana
  peptide (1)..(437): Ceres Seq. ID no. 4995117
  misc_feature (83)..(153): Pfam Name: AP2 domain Pfam Description: AP2 domain
  misc_feature (1)..(437): Homolog of NCBI NO: 15242120 NR Description: ovule development protein, putative; protein id: [Arabidopsis thaliana] >gi|9757933|dbj|BAB08476.1| contains to unknown protein~gb|AAD30633.1~gene_id:MSF19.5 [Arabidopsis
  misc_feature (1)..(343): Homolog of NCBI NO: 21304225 NR Description: aintegumenta-like protein [Oryza sativa]
  misc_feature (1)..(272): Homolog of NCBI NO: 21304227 NR Description: ovule development aintegumenta-like protein BNM3
  misc_feature (1)..(260): Homolog of NCBI NO: 9294411 NR Description: contains similarity to unknown
  misc_feature (1)..(260): Homolog of NCBI NO: 15232375 NR Description: ovule development protein, putative; protein id:
  misc_feature (43)..(272): Homolog of NCBI NO: 34907686 NR Description: putative ovule development protein
  misc_feature (35)..(272): Homolog of NCBI NO: 32490266 NR Description: OSJNBb0116K07.8 [Oryza sativa (japonica
  misc_feature (23)..(260): Homolog of NCBI NO: 15223777 NR Description: ovule development protein, putative; protein id:
  misc_feature (23)..(260): Homolog of NCBI NO: 25405447 NR Description: hypothetical protein F11M15.6 [imported] - thaliana >gi|4836931|gb|AAD30633.1|AC006085_6 Hypothetical
  misc_feature (1)..(259): Homolog of NCBI NO: 15237965 NR Description: ovule development protein, putative; protein id: [Arabidopsis thaliana] >gi|11358596|pir||T51580 ovule development
MQQVQSLGGVVFSSDLQPPLHPPSAAEIYDSELKSIAASFLGNYSGGHSSEVSSVHKQQPNPLAVSEASPTPKKNVESFGQRTSIYRGVTRHRWTGRYEAHLWDNSCRREGQSRKGRQGGYDKEDKAARAYDLAALKYWGPTTTTNFPISNYESELEEMKHMTRQEFVASLRRKSSGFSRGASMYRGVTRHHQHGRWQARIGRVAGNKDLYLGTFSTQEEAAEAYDIAAIKFRGLNAVTNFDISRYDVKSIASCNLPVGGLMPKPSPATAAADKTVDLSPSDSPSLTTPSLTFNVATPVNDHGGTFYHTGIPIKPDPADHYWSNIFGFQANPKAEMRPLANFGSDLHNPSPGYAIMPVMQEGENNFGGSFVGSDGYNNHSAASNPVSAIPLSSTTTMSNGNEGYGGNINWINNNISSSYQTAKSNLSVLHTPVFGLE

SEQ ID NO: 74151 - protein, 279 aa, Arabidopsis thaliana
  peptide (1)..(279): Ceres Seq. ID no. 4995118
  misc_feature (25)..(89): Pfam Name: AP2 domain Pfam Description: AP2 domain
  misc_feature (1)..(279): Homolog of NCBI NO: 15242120 NR Description: ovule development protein, putative; protein id: [Arabidopsis thaliana] >gi|9757933|dbj|BAB08476.1| contains to unknown protein~gb|AAD30633.1~gene_id:MSF19.5 [Arabidopsis
  misc_feature (1)..(185): Homolog of NCBI NO: 21304225 NR Description: aintegumenta-like protein [Oryza sativa]
  misc_feature (1)..(114): Homolog of NCBI NO: 21304227 NR Description: ovule development aintegumenta-like protein BNM3
  misc_feature (1)..(102): Homolog of NCBI NO: 9294411 NR Description: contains similarity to unknown
  misc_feature (1)..(102): Homolog of NCBI NO: 15232375 NR Description: ovule development protein, putative; protein id:
  misc_feature (1)..(114): Homolog of NCBI NO: 34907686 NR Description: putative ovule development protein
  misc_feature (1)..(114): Homolog of NCBI NO: 32490266 NR Description: OSJNBb0116K07.8 [Oryza sativa (japonica
  misc_feature (1)..(102): Homolog of NCBI NO: 15223777 NR Description: ovule development protein, putative; protein id:
  misc_feature (1)..(102): Homolog of NCBI NO: 25405447 NR Description: hypothetical protein F11M15.6 [imported] - thaliana >gi|4836931|gb|AAD30633.1|AC006085_6 Hypothetical
  misc_feature (1)..(101): Homolog of NCBI NO: 15237965 NR Description: ovule development protein, putative; protein id: [Arabidopsis thaliana] >gi|11358596|pir||T51580 ovule development
MKHMTRQEFVASLRRKSSGFSRGASMYRGVTRHHQHGRWQARIGRVAGNKDLYLGTFSTQEEAAEAYDIAAIKFRGLNAVTNFDISRYDVKSIASCNLPVGGLMPKPSPATAAADKTVDLSPSDSPSLTTPSLTFNVATPVNDHGGTFYHTGIPIKPDPADHYWSNIFGFQANPKAEMRPLANFGSDLHNPSPGYAIMPVMQEGENNFGGSFVGSDGYNNHSAASNPVSAIPLSSTTTMSNGNEGYGGNINWINNNISSSYQTAKSNLSVLHTPVFGLE

SEQ ID NO: 74152 - DNA, 3378 bp, Arabidopsis thaliana
  misc_feature (1)..(3378): Ceres Seq. ID no. 4995134
  misc_feature: MA Experiment ID: 20000088 Result: Up-regulated in Transcription
  misc_feature: MA Experiment 20000088 PARAMETER Experiment Name: At_100uM_ABA_Mutants_cDNA_P Parameter: Plant Line Value: Landsberg
  misc_feature: MA Experiment 20000088 PARAMETER Experiment Name: At_100uM_ABA_Mutants_cDNA_P Parameter: Timepoint (hr) Value: 6
  misc_feature: MA Experiment 20000088 PARAMETER Experiment Name: At_100uM_ABA_Mutants_cDNA_P Parameter: Tissue Value: Aerial
  misc_feature: MA Experiment 20000088 PARAMETER Experiment Name: At_100uM_ABA_Mutants_cDNA_P Parameter: Treatment Value: 100uM ABA vs. No Treatment
  misc_feature: MA Experiment ID: 20000090 Result: Up-regulated in Transcription
atgtctcgcaatcggcaaatcatcatccccgacgacgtgatggaaacagaagcggtggttaataccgtcgccggcgtcgactgtttcgtctcactccctcgtcaattactacacgcgcttcaatccaccagctcctctcctctccctccgcttctccctgtcgagctacgctccggtgaccgccgttggtcagttgcttggtccggctctagctcctcctcttctgcgatcgagatcgctcgagtgtttgcggaaagcatttcgttgccggatggtacagttgttaaagttcgtgttcttcctaatgtgcccaaggctactttagtaacagtcgaaccagagactgaagatgactgggaagttcttgagctcaatgctgaacttgccgaggcagctatacttagtcaggtgaggatactacatgagaccatgaaattccctttgtggttgcatgaccgaactgtgataagattttctgtggtttcaacatttccatcaaaaggggtggtacaacttgtgccaggaactgaagtggctgtggctccaaagagacgtgacagaaatctcaaagcaaaaaagagtcaggaaaaagaatgtaacaatgtgaaggctctactacgtgtacaagagactgatagatcagcctttcatgaagctgatgtcaaaggatttgagctaagggtagccctcacgtctattgcctatattcatccagaaactgccaagaaacactctctagaatctcttcagttgatttctgtatcccctagaatacctttgaaaggtagtgcaaagaaggatgaagccttaaatatgaaaaacagtgaagcttcaaaggtggccgagaatggtacttcaagcgccaagaaagagcctcgtcaagcaattcttcgtcttgtcttttcagatttagctgctaaaggacatctaatgatggtcgagtctcttcgtctctatctaggagcaggcctacactcatgggtttacttaaggggatgcaatgtgaatgaagacaaagaaattcctgctctttcactttctccttgtgtcttcaagatttctgaaaatgaaaaggtgctggataagggtacggataggcttggtaataacaattctgttagaaaaagcagtcatccaccgtctggcttgagcacctatgtggatgttgtcgactggtctgtgcacgataaggttgttacagctctttcatctgagggtttgcatgacgaaggaaatcatgataagaataagaaaggattggaataccttactcgcctgtggtcattggcacagcttgatgctatggcgtcagtcacaggagttgatgttagttcgttaattgtgggaagagaaacgtttttccatttcgaagtaagagggctcgaatcttataaatccatagacgggcagccttctgttaatgatcgttgggaaagtgggaagaaggataaacacactcctttagaaattttgtacgtcatgacggtctctgatgagtctttgcttggtgataaattcgctgggtatgatcttagcctggatagaagtgagaagagcgacaatgtggtgcatattgagccagtgcttgagaagatgaatcttggcgagcctatatatttaaagtcggctaaagagacacactgcaataaaggtgtttccccagatatatcctccttgacgtggatgggcccaatcgtgtcggatgttatcaagagaatgaccgtgttgttgtctcctgcagctggaatgtggtttagcaagttcaagattccatcacctggacatattctcatatatgggcctcctggttcaggaaagacaatattggcaagagctgctgcaaagtatttcgaagaacagaaagacttgttggcacatgtgattttagtatcctgttctacacttgccttggagaaggttcaacacatccatcatgtcctttctagtgtaatagctgaggggttggaacatgcaccatctgtcatcattttggatgatcttgatagcattatctcatcgtcttctgatactgaaggaacacaagcttcggttggggttacaatgcttacaaaattcctaacagatgttatagatgattatggggaatacaggaattcctcttgtggaattggcccacttgcattcgttgcttctgtccagtctctagagcaaattccacagacattgagctcatcaggaaggtttgacttccatgtgcaactggctgctcctgctacctcggaacgtggggccatactgaagcatgagatacagaaacgccttttagactgttcagaagacattttacttaacttagctgctaaatgtgaaggatatgatgcatatgacctggaaatattggttgatagagctgttcatgctgccattggccggcatctacctttagaatcaaatatatccaaatataatttggtcaaagaagactttactcgagctatgcatgattttgtgcctgttgccatgcgtgacatcacaaaatctgcctctgaaggtggtcgtttggggtgggaagatgtgggaggtgtgactgatattaaaaatgctatcaaagagatgattgagctgccatcaaaatttccaaaaatctttgcaaaatctcctctgcgtttgagatcgaatgttctcttgtatggcccacccggttgtgggaagactcacattgttggtgcagctgctgcagcgtgttccctacggtttatatcggtgaaggggcctgagctgttaaacaaatacattggtgcatctgaacaagcggtccgtgatatattttcgaaagcagcagctgcagctccatgcatactctttttcgatgaattcgattcaattgctcccaaaagaggacatgataatactggtgtaactgatcgagttgttaatcaatttttgacagaactggatggagttgaagttctaacaggggtctttgtatttgctgcaaccagtagaccagatttacttgatcctgccctcctaaggcctggccggcttgatcgtcttcttttgtgcgactttccttccccaccagaacgattagagattcttacagttctttctagaaagcttctgatggctgatgatattgacctagagcctatagctttgatgactgaaggcttcagtggagctgatcttcaagctcttctctcagatgcgcaacttgcagctgtacacgagtatctgaacagagaagataaacccgagaccggaactacaccaataataactgatcctcttctgaagtcgattgcttctaaaactaaaccatcggtttccgaaaccgagaaacaaaagctctatgacatatatagccagtttctggattcaagaaaatcggtatctctctcatctccactctaa

SEQ ID NO: 74153 - protein, 1125 aa, Arabidopsis thaliana
  peptide (1)..(1125): Ceres Seq. ID no. 4995135
  misc_feature (595)..(797): Pfam Name: ATPase family associated with various cellular Pfam Description: ATPase family associated with various cellular
  misc_feature (626)..(1087): Homolog of NCBI NO: 6636328 NR Description: peroxisome assembly protein Pex1p [Yarrowia
  misc_feature (72)..(297): Homolog of NCBI NO: 6636328 NR Description: peroxisome assembly protein Pex1p [Yarrowia
  misc_feature (1068)..(1116): Homolog of NCBI NO: 6636328 NR Description: peroxisome assembly protein Pex1p [Yarrowia
  misc_feature (494)..(1067): Homolog of NCBI NO: 4505725 NR Description: peroxisome biogenesis factor 1 [Homo sapiens]
  misc_feature (27)..(185): Homolog of NCBI NO: 4505725 NR Description: peroxisome biogenesis factor 1 [Homo sapiens]
  misc_feature (494)..(1067): Homolog of NCBI NO: 14289173 NR Description: Pex1pL664P [Homo sapiens]
  misc_feature (494)..(1067): Homolog of NCBI NO: 14289175 NR Description: Pex1pG843D [Homo sapiens]
  misc_feature (27)..(185): Homolog of NCBI NO: 14289173 NR Description: Pex1pL664P [Homo sapiens]
  misc_feature (27)..(185): Homolog of NCBI NO: 14289175 NR Description: Pex1pG843D [Homo sapiens]
  misc_feature (630)..(1078): Homolog of NCBI NO: 5817536 NR Description: peroxin-1 [Pichia angusta]
MSRNRQIIIPDDVMETEAVVNTVAGVDCFVSLPRQLLHALQSTSSSPLPPLLPVELRSGDRRWSVAWSGSSSSSSAIEIARVFAESISLPDGTVVKVRVLPNVPKATLVTVEPETEDDWEVLELNAELAEAAILSQVRILHETMKFPLWLHDRTVIRFSVVSTFPSKGVVQLVPGTEVAVAPKRRDRNLKAKKSQEKECNNVKALLRVQETDRSAFHEADVKGFELRVALTSIAYIHPETAKKHSLESLQLISVSPRIPLKGSAKKDEALNMKNSEASKVAENGTSSAKKEPRQAILRLVFSDLAAKGHLMMVESLRLYLGAGLHSWVYLRGCNVNEDKEIPALSLSPCVFKISENEKVLDKGTDRLGNNNSVRKSSHPPSGLSTYVDVVDWSVHDKVVTALSSEGLHDEGNHDKNKKGLEYLTRLWSLAQLDAMASVTGVDVSSLIVGRETFFHFEVRGLESYKSIDGQPSVNDRWESGKKDKHTPLEILYVMTVSDESLLGDKFAGYDLSLDRSEKSDNVVHIEPVLEKMNLGEPIYLKSAKETHCNKGVSPDISSLTWMGPIVSDVIKRMTVLLSPAAGMWFSKFKIPSPGHILIYGPPGSGKTILARAAAKYFEEQKDLLAHVILVSCSTLALEKVQHIHHVLSSVIAEGLEHAPSVIILDDLDSIISSSSDTEGTQASVGVTMLTKFLTDVIDDYGEYRNSSCGIGPLAFVASVQSLEQIPQTLSSSGRFDFHVQLAAPATSERGAILKHEIQKRLLDCSEDILLNLAAKCEGYDAYDLEILVDRAVHAAIGRHLPLESNISKYNLVKEDFTRAMHDFVPVAMRDITKSASEGGRLGWEDVGGVTDIKNAIKEMIELPSKFPKIFAKSPLRLRSNVLLYGPPGCGKTHIVGAAAAACSLRFISVKGPELLNKYIGASEQAVRDIFSKAAAAAPCILFFDEFDSIAPKRGHDNTGVTDRVVNQFLTELDGVEVLTGVFVFAATSRPDLLDPALLRPGRLDRLLLCDFPSPPERLEILTVLSRKLLMADDIDLEPIALMTEGFSGADLQALLSDAQLAAVHEYLNREDKPETGTTPIITDPLLKSIASKTKPSVSETEKQKLYDIYSQFLDSRKSVSLSSPL

SEQ ID NO: 74154 - protein, 1112 aa, Arabidopsis thaliana
  peptide (1)..(1112): Ceres Seq. ID no. 4995136
  misc_feature (582)..(784): Pfam Name: ATPase family associated with various cellular Pfam Description: ATPase family associated with various cellular
  misc_feature (613)..(1074): Homolog of NCBI NO: 6636328 NR Description: peroxisome assembly protein Pex1p [Yarrowia
  misc_feature (59)..(284): Homolog of NCBI NO: 6636328 NR Description: peroxisome assembly protein Pex1p [Yarrowia
  misc_feature (1055)..(1103): Homolog of NCBI NO: 6636328 NR Description: peroxisome assembly protein Pex1p [Yarrowia
  misc_feature (481)..(1054): Homolog of NCBI NO: 4505725 NR Description: peroxisome biogenesis factor 1 [Homo sapiens]
  misc_feature (14)..(172): Homolog of NCBI NO: 4505725 NR Description: peroxisome biogenesis factor 1 [Homo sapiens]
  misc_feature (481)..(1054): Homolog of NCBI NO: 14289173 NR Description: Pex1pL664P [Homo sapiens]
  misc_feature (481)..(1054): Homolog of NCBI NO: 14289175 NR Description: Pex1pG843D [Homo sapiens]
  misc_feature (14)..(172): Homolog of NCBI NO: 14289173 NR Description: Pex1pL664P [Homo sapiens]
  misc_feature (14)..(172): Homolog of NCBI NO: 14289175 NR Description: Pex1pG843D [Homo sapiens]
  misc_feature (617)..(1065): Homolog of NCBI NO: 5817536 NR Description: peroxin-1 [Pichia angusta]
METEAVVNTVAGVDCFVSLPRQLLHALQSTSSSPLPPLLPVELRSGDRRWSVAWSGSSSSSSAIEIARVFAESISLPDGTVVKVRVLPNVPKATLVTVEPETEDDWEVLELNAELAEAAILSQVRILHETMKFPLWLHDRTVIRFSVVSTFPSKGVVQLVPGTEVAVAPKRRDRNLKAKKSQEKECNNVKALLRVQETDRSAFHEADVKGFELRVALTSIAYIHPETAKKHSLESLQLISVSPRIPLKGSAKKDEALNMKNSEASKVAENGTSSAKKEPRQAILRLVFSDLAAKGHLMMVESLRLYLGAGLHSWVYLRGCNVNEDKEIPALSLSPCVFKISENEKVLDKGTDRLGNNNSVRKSSHPPSGLSTYVDVVDWSVHDKVVTALSSEGLHDEGNHDKNKKGLEYLTRLWSLAQLDAMASVTGVDVSSLIVGRETFFHFEVRGLESYKSIDGQPSVNDRWESGKKDKHTPLEILYVMTVSDESLLGDKFAGYDLSLDRSEKSDNVVHIEPVLEKMNLGEPIYLKSAKETHCNKGVSPDISSLTWMGPIVSDVIKRMTVLLSPAAGMWFSKFKIPSPGHILIYGPPGSGKTILARAAAKYFEEQKDLLAHVILVSCSTLALEKVQHIHHVLSSVIAEGLEHAPSVIILDDLDSIISSSSDTEGTQASVGVTMLTKFLTDVIDDYGEYRNSSCGIGPLAFVASVQSLEQIPQTLSSSGRFDFHVQLAAPATSERGAILKHEIQKRLLDCSEDILLNLAAKCEGYDAYDLEILVDRAVHAAIGRHLPLESNISKYNLVKEDFTRAMHDFVPVAMRDITKSASEGGRLGWEDVGGVTDIKNAIKEMIELPSKFPKIFAKSPLRLRSNVLLYGPPGCGKTHIVGAAAAACSLRFISVKGPELLNKYIGASEQAVRDIFSKAAAAAPCILFFDEFDSIAPKRGHDNTGVTDRVVNQFLTELDGVEVLTGVFVFAATSRPDLLDPALLRPGRLDRLLLCDFPSPPERLEILTVLSRKLLMADDIDLEPIALMTEGFSGADLQALLSDAQLAAVHEYLNREDKPETGTTPIITDPLLKSIASKTKPSVSETEKQKLYDIYSQFLDSRKSVSLSSPL

SEQ ID NO: 74155 - protein, 982 aa, Arabidopsis thaliana
  peptide (1)..(982): Ceres Seq. ID no. 4995137
  misc_feature (452)..(654): Pfam Name: ATPase family associated with various cellular Pfam Description: ATPase family associated with various cellular
  misc_feature (483)..(944): Homolog of NCBI NO: 6636328 NR Description: peroxisome assembly protein Pex1p [Yarrowia
  misc_feature (1)..(154): Homolog of NCBI NO: 6636328 NR Description: peroxisome assembly protein Pex1p [Yarrowia
  misc_feature (925)..(973): Homolog of NCBI NO: 6636328 NR Description: peroxisome assembly protein Pex1p [Yarrowia
  misc_feature (351)..(924): Homolog of NCBI NO: 4505725 NR Description: peroxisome biogenesis factor 1 [Homo sapiens]
  misc_feature (1)..(42): Homolog of NCBI NO: 4505725 NR Description: peroxisome biogenesis factor 1 [Homo sapiens]
  misc_feature (351)..(924): Homolog of NCBI NO: 14289173 NR Description: Pex1pL664P [Homo sapiens]
  misc_feature (351)..(924): Homolog of NCBI NO: 14289175 NR Description: Pex1pG843D [Homo sapiens]
  misc_feature (1)..(42): Homolog of NCBI NO: 14289173 NR Description: Pex1pL664P [Homo sapiens]
  misc_feature (1)..(42): Homolog of NCBI NO: 14289175 NR Description: Pex1pG843D [Homo sapiens]
  misc_feature (487)..(935): Homolog of NCBI NO: 5817536 NR Description: peroxin-1 [Pichia angusta]
MKFPLWLHDRTVIRFSVVSTFPSKGVVQLVPGTEVAVAPKRRDRNLKAKKSQEKECNNVKALLRVQETDRSAFHEADVKGFELRVALTSIAYIHPETAKKHSLESLQLISVSPRIPLKGSAKKDEALNMKNSEASKVAENGTSSAKKEPRQAILRLVFSDLAAKGHLMMVESLRLYLGAGLHSWVYLRGCNVNEDKEIPALSLSPCVFKISENEKVLDKGTDRLGNNNSVRKSSHPPSGLSTYVDVVDWSVHDKVVTALSSEGLHDEGNHDKNKKGLEYLTRLWSLAQLDAMASVTGVDVSSLIVGRETFFHFEVRGLESYKSIDGQPSVNDRWESGKKDKHTPLEILYVMTVSDESLLGDKFAGYDLSLDRSEKSDNVVHIEPVLEKMNLGEPIYLKSAKETHCNKGVSPDISSLTWMGPIVSDVIKRMTVLLSPAAGMWFSKFKIPSPGHILIYGPPGSGKTILARAAAKYFEEQKDLLAHVILVSCSTLALEKVQHIHHVLSSVIAEGLEHAPSVIILDDLDSIISSSSDTEGTQASVGVTMLTKFLTDVIDDYGEYRNSSCGIGPLAFVASVQSLEQIPQTLSSSGRFDFHVQLAAPATSERGAILKHEIQKRLLDCSEDILLNLAAKCEGYDAYDLEILVDRAVHAAIGRHLPLESNISKYNLVKEDFTRAMHDFVPVAMRDITKSASEGGRLGWEDVGGVTDIKNAIKEMIELPSKFPKIFAKSPLRLRSNVLLYGPPGCGKTHIVGAAAAACSLRFISVKGPELLNKYIGASEQAVRDIFSKAAAAAPCILFFDEFDSIAPKRGHDNTGVTDRVVNQFLTELDGVEVLTGVFVFAATSRPDLLDPALLRPGRLDRLLLCDFPSPPERLEILTVLSRKLLMADDIDLEPIALMTEGFSGADLQALLSDAQLAAVHEYLNREDKPETGTTPIITDPLLKSIASKTKPSVSETEKQKLYDIYSQFLDSRKSVSLSSPL

SEQ ID NO: 74156 - DNA, 2469 bp, Arabidopsis thaliana
  misc_feature (1)..(2469): Ceres Seq. ID no. 4995175
  misc_feature: MA Experiment ID: 20000180 Result: Down-regulated in Transcription
  misc_feature: MA Experiment 20000180 PARAMETER Experiment Name: At_Germinating_Seeds_P Parameter: Age (hr) Value: 24 vs. 0
  misc_feature: MA Experiment 20000180 PARAMETER Experiment Name: At_Germinating_Seeds_P Parameter: Tissue Value: Germinating Seeds
  misc_feature: MA Experiment ID: 20000573 Result: Down-regulated in Transcription
  misc_feature: MA Experiment 20000573 PARAMETER Experiment Name: At_100uM_ABA_Mutants__P Parameter: Organism Value: A. thaliana
  misc_feature: MA Experiment 20000573 PARAMETER Experiment Name: At_100uM_ABA_Mutants__P Parameter: Plant Line Value: CS22 vs. Ler wt
  misc_feature: MA Experiment 20000573 PARAMETER Experiment Name: At_100uM_ABA_Mutants__P Parameter: Timepoint (hr) Value: N/A
  misc_feature: MA Experiment 20000573 PARAMETER Experiment Name: At_100uM_ABA_Mutants__P Parameter: Tissue Value: Whole Plant
  misc_feature: MA Experiment 20000573 PARAMETER Experiment Name: At_100uM_ABA_Mutants__P Parameter: Treatment Value: None
  misc_feature: MA Experiment ID: 20001248 Result: Up-regulated in Transcription
  misc_feature: MA Experiment 20001248 PARAMETER Experiment Name: At_Far-red-induction_P Parameter: Age (day) Value: 7
  misc_feature: MA Experiment 20001248 PARAMETER Experiment Name: At_Far-red-induction_P Parameter: Light Value: Far-red vs. White
  misc_feature: MA Experiment 20001248 PARAMETER Experiment Name: At_Far-red-induction_P Parameter: Organism Value: A. thaliana
  misc_feature: MA Experiment 20001248 PARAMETER Experiment Name: At_Far-red-induction_P Parameter: Plant Line Value: Columbia
  misc_feature: MA Experiment 20001248 PARAMETER Experiment Name: At_Far-red-induction_P Parameter: Timepoint (hr) Value: 4
  misc_feature: MA Experiment 20001248 PARAMETER Experiment Name: At_Far-red-induction_P Parameter: Tissue Value: Whole Plant
  misc_feature: Pfam Name: Utp14 Pfam Description: Utp14 protein
atgggaggaggagagaagaggaaatctagtttcaaaaacctagctaatgcaaagaagaggagaacaggacctcacttacctagctcaatactcaagaccattgcgaatgagaaacgtcctttgaactctgacgaaggagacgatgagattgattctgcttacggtgatttttacgagtacgaagaaggtgtgcctgaagaggaatctaggaaaaacaaccgctacgaacgcgtcgttaactacgaattcgagcttgcagaggattgcgaggatgaaaacgtggagtcagaagatgatgatgatgatgatgatgatgatgatgatgataggcactcacgaatgttgaaaaatgtcactgaattgccaatttcagcctttcaaggagagagtaagaacaaacgtgtagtctttactgaaccatatccagagtctgaattcaatcctacccgtgatgttctggagggtaaatccctcaccacaattgatgactttatggagcctcttcaaggattacatggaaatagccaactaagcaatatgatctcccggatgcgaaaagatacgcagtctcttgttcatgctcctctgccaaagccagaacaagaaagactggaacgggatgtagcgaatgaactggtttacaaggggtttgatatttgggtgcctctggtaaaaaggaacagagaggcaccaactatttactttaaccaagatgtcaatgttggatactctaccgttggtgctatagcatcacaatttcatcccaggactgaatttgagatgaaaatggcttctctactcgatgatcatgagattttggaggctcacaaagaagatggagctaggcttcttgaattcaacgaggtatctatggaagatcacatcaagagacgtaaccatgttgctaagatgcggagcatgctcttccgagttgacctgaaacataaacgaatcaagcagattaagtctaaaacatatcatcgccttaaaaacaaagacctgaatcaatcgggtgttggagcattcatggagccagcaatggctaaagaagaggctaagaagcaggaggcgaggcgagtaaaggaacgtatgactttaaagcacaaaaacacaggacaatgggccaaacgcatgctaagccgtggactgaataggaaatacgatgtgactcaggcagctctatctaaacaacttcaaattcatgctactttgtccagaaagatgaactccacaaaagatgaaagtagtagtgatgaggaagatttgaatgatggttcagatcaggatacttctaaactgatagcggaagcaaaggagaagatactgaaaactgtggacgatgatgaagtccccatttctcgtcttatgtcattacctttcatggctcgtgctgtgaaaaagaaaaacgaggaagctaaagaagaaggtaaacgtgatattgaggagttggagaaatttggtggagcagaaacctctaaaaagtccactaatgttgttggtagaagagtatttggtgcagaagctccaaaagagtctgaaaaggaatcagacaacctttttgataacagtgatagtagtgacaatgatatggaagataatgagttagaggctgtaaaagataatgcttcacctgctagaaacactgaaaccattatggaagccgagaagttggatgatattgctggaaacccagcatctaagacaacatttgatgtcgccttatatgcatcaggctcctggaagaagatgacaggctgcaaaaacgcagaatccaaaaaagcttcaaagacgcatgtgcccatttcgcagtcccaagataaaaaggaatcgagtgattcagaaagtgatgattcagaaagtgatgattcagagagtgaagcagagcaaatggttgatgggattttgacatgcggttcaaaggaaacgtatgaaattccttgtcaagcagagcttgtaagccgtgcttttgctggtgatgacgttgaaggtgactttgagaaggataagcaagaggtactaaatcaggaagttcctgaacccgagaaaccggttcaagttgctggttggggacattggaccaataaccaaaacaagagaggtttaccatcaaggattgttagagaacacgaagaagccaagaaaacgagagagcaagctctcagaaaaaggaaagacgcttctttcaaacatgttatcatatcagaaaaagttgataaaaaggctgagaaacttcagacaaagagtctaccttacccttacacatcaaaggaagttttcgaacaaagtatgcgtatgcctataggacctgagtttaatcccacaactattgttggagttctaaaccgacctgaggttgtgaagaaagctggagtgatcattaaacctgtcaagtttgaggaagtaaatccgaatgacgaacaccctcgtagccatcagaaacaaaaacccaagaaaaaaggtggtaagtaa

SEQ ID NO: 74157 - protein, 822 aa, Arabidopsis thaliana
  peptide (1)..(822): Ceres Seq. ID no. 4995176
  misc_feature: Pfam Name: Utp14 Pfam Description: Utp14 protein
  misc_feature (44)..(822): Homolog of NCBI NO: 30679129 NR Description: expressed protein [Arabidopsis thaliana]
  misc_feature (44)..(822): Homolog of NCBI NO: 7487011 NR Description: hypothetical protein T14P8.20 - Arabidopsis >gi|3193300|gb|AAC19284.1| T14P8.20 gene product [Arabidopsis >gi|7269000|emb|CAB80733.1| contains EST gb:AI998867.1
  misc_feature (4)..(626): Homolog of NCBI NO: 7487011 NR Description: hypothetical protein T14P8.20 - Arabidopsis >gi|3193300|gb|AAC19284.1| T14P8.20 gene product [Arabidopsis >gi|7269000|emb|CAB80733.1| contains EST gb:AI998867.1
  misc_feature (4)..(626): Homolog of NCBI NO: 30679129 NR Description: expressed protein [Arabidopsis thaliana]
  misc_feature (61)..(797): Homolog of NCBI NO: 19114287 NR Description: hypothetical coiled-coil protein pombe] >gi|3183291|sp|P87137|YDM6_SCHPO Hypothetical protein
  misc_feature (100)..(819): Homolog of NCBI NO: 23599203 NR Description: RIKEN cDNA 2700066J21 [Mus musculus]
  misc_feature (84)..(801): Homolog of NCBI NO: 18056469 NR Description: dJ537K23.3 (KIAA0266 protein) [Homo sapiens]
  misc_feature (84)..(801): Homolog of NCBI NO: 21361348 NR Description: serologically defined colon cancer antigen 16 sapiens] >gi|12654625|gb|AAH01149.1|AAH01149 Similar to KIAA0266 product [Homo sapiens] >gi|15929064|gb|AAH14987.1|AAH14987
  misc_feature (92)..(801): Homolog of NCBI NO: 11063983 NR Description: KIAA0266 gene product [Homo sapiens] Similar to S.cerevisiae hypothetical protein 5 (S49634) [Homo
  misc_feature (92)..(801): Homolog of NCBI NO: 40788930 NR Description: KIAA0266 [Homo sapiens]
MGGGEKRKSSFKNLANAKKRRTGPHLPSSILKTIANEKRPLNSDEGDDEIDSAYGDFYEYEEGVPEEESRKNNRYERVVNYEFELAEDCEDENVESEDDDDDDDDDDDDRHSRMLKNVTELPISAFQGESKNKRVVFTEPYPESEFNPTRDVLEGKSLTTIDDFMEPLQGLHGNSQLSNMISRMRKDTQSLVHAPLPKPEQERLERDVANELVYKGFDIWVPLVKRNREAPTIYFNQDVNVGYSTVGAIASQFHPRTEFEMKMASLLDDHEILEAHKEDGARLLEFNEVSMEDHIKRRNHVAKMRSMLFRVDLKHKRIKQIKSKTYHRLKNKDLNQSGVGAFMEPAMAKEEAKKQEARRVKERMTLKHKNTGQWAKRMLSRGLNRKYDVTQAALSKQLQIHATLSRKMNSTKDESSSDEEDLNDGSDQDTSKLIAEAKEKILKTVDDDEVPISRLMSLPFMARAVKKKNEEAKEEGKRDIEELEKFGGAETSKKSTNVVGRRVFGAEAPKESEKESDNLFDNSDSSDNDMEDNELEAVKDNASPARNTETIMEAEKLDDIAGNPASKTTFDVALYASGSWKKMTGCKNAESKKASKTHVPISQSQDKKESSDSESDDSESDDSESEAEQMVDGILTCGSKETYEIPCQAELVSRAFAGDDVEGDFEKDKQEVLNQEVPEPEKPVQVAGWGHWTNNQNKRGLPSRIVREHEEAKKTREQALRKRKDASFKHVIISEKVDKKAEKLQTKSLPYPYTSKEVFEQSMRMPIGPEFNPTTIVGVLNRPEVVKKAGVIIKPVKFEEVNPNDEHPRSHQKQKPKKKGGK

SEQ ID NO: 74158 - protein, 709 aa, Arabidopsis thaliana
  peptide (1)..(709): Ceres Seq. ID no. 4995177
  misc_feature: Pfam Name: Utp14 Pfam Description: Utp14 protein
  misc_feature (1)..(709): Homolog of NCBI NO: 30679129 NR Description: expressed protein [Arabidopsis thaliana]
  misc_feature (1)..(709): Homolog of NCBI NO: 7487011 NR Description: hypothetical protein T14P8.20 - Arabidopsis >gi|3193300|gb|AAC19284.1| T14P8.20 gene product [Arabidopsis >gi|7269000|emb|CAB80733.1| contains EST gb:AI998867.1
  misc_feature (1)..(513): Homolog of NCBI NO: 7487011 NR Description: hypothetical protein T14P8.20 - Arabidopsis >gi|3193300|gb|AAC19284.1| T14P8.20 gene product [Arabidopsis >gi|7269000|emb|CAB80733.1| contains EST gb:AI998867.1
  misc_feature (1)..(513): Homolog of NCBI NO: 30679129 NR Description: expressed protein [Arabidopsis thaliana]
  misc_feature (1)..(684): Homolog of NCBI NO: 19114287 NR Description: hypothetical coiled-coil protein pombe] >gi|3183291|sp|P87137|YDM6_SCHPO Hypothetical protein
  misc_feature (1)..(706): Homolog of NCBI NO: 23599203 NR Description: RIKEN cDNA 2700066J21 [Mus musculus]
  misc_feature (1)..(688): Homolog of NCBI NO: 18056469 NR Description: dJ537K23.3 (KIAA0266 protein) [Homo sapiens]
  misc_feature (1)..(688): Homolog of NCBI NO: 21361348 NR Description: serologically defined colon cancer antigen 16 sapiens] >gi|12654625|gb|AAH01149.1|AAH01149 Similar to KIAA0266 product [Homo sapiens] >gi|15929064|gb|AAH14987.1|AAH14987
  misc_feature (1)..(688): Homolog of NCBI NO: 11063983 NR Description: KIAA0266 gene product [Homo sapiens] Similar to S.cerevisiae hypothetical protein 5 (S49634) [Homo
  misc_feature (1)..(688): Homolog of NCBI NO: 40788930 NR Description: KIAA0266 [Homo sapiens]
MLKNVTELPISAFQGESKNKRVVFTEPYPESEFNPTRDVLEGKSLTTIDDFMEPLQGLHGNSQLSNMISRMRKDTQSLVHAPLPKPEQERLERDVANELVYKGFDIWVPLVKRNREAPTIYFNQDVNVGYSTVGAIASQFHPRTEFEMKMASLLDDHEILEAHKEDGARLLEFNEVSMEDHIKRRNHVAKMRSMLFRVDLKHKRIKQIKSKTYHRLKNKDLNQSGVGAFMEPAMAKEEAKKQEARRVKERMTLKHKNTGQWAKRMLSRGLNRKYDVTQAALSKQLQIHATLSRKMNSTKDESSSDEEDLNDGSDQDTSKLIAEAKEKILKTVDDDEVPISRLMSLPFMARAVKKKNEEAKEEGKRDIEELEKFGGAETSKKSTNVVGRRVFGAEAPKESEKESDNLFDNSDSSDNDMEDNELEAVKDNASPARNTETIMEAEKLDDIAGNPASKTTFDVALYASGSWKKMTGCKNAESKKASKTHVPISQSQDKKESSDSESDDSESDDSESEAEQMVDGILTCGSKETYEIPCQAELVSRAFAGDDVEGDFEKDKQEVLNQEVPEPEKPVQVAGWGHWTNNQNKRGLPSRIVREHEEAKKTREQALRKRKDASFKHVIISEKVDKKAEKLQTKSLPYPYTSKEVFEQSMRMPIGPEFNPTTIVGVLNRPEVVKKAGVIIKPVKFEEVNPNDEHPRSHQKQKPKKKGGK

SEQ ID NO: 74159 - protein, 658 aa, Arabidopsis thaliana
  peptide (1)..(658): Ceres Seq. ID no. 4995178
  misc_feature: Pfam Name: Utp14 Pfam Description: Utp14 protein
  misc_feature (1)..(658): Homolog of NCBI NO: 30679129 NR Description: expressed protein [Arabidopsis thaliana]
  misc_feature (1)..(658): Homolog of NCBI NO: 7487011 NR Description: hypothetical protein T14P8.20 - Arabidopsis >gi|3193300|gb|AAC19284.1| T14P8.20 gene product [Arabidopsis >gi|7269000|emb|CAB80733.1| contains EST gb:AI998867.1
  misc_feature (1)..(462): Homolog of NCBI NO: 7487011 NR Description: hypothetical protein T14P8.20 - Arabidopsis >gi|3193300|gb|AAC19284.1| T14P8.20 gene product [Arabidopsis >gi|7269000|emb|CAB80733.1| contains EST gb:AI998867.1
  misc_feature (1)..(462): Homolog of NCBI NO: 30679129 NR Description: expressed protein [Arabidopsis thaliana]
  misc_feature (1)..(633): Homolog of NCBI NO: 19114287 NR Description: hypothetical coiled-coil protein pombe] >gi|3183291|sp|P87137|YDM6_SCHPO Hypothetical protein
  misc_feature (1)..(655): Homolog of NCBI NO: 23599203 NR Description: RIKEN cDNA 2700066J21 [Mus musculus]
  misc_feature (1)..(637): Homolog of NCBI NO: 18056469 NR Description: dJ537K23.3 (KIAA0266 protein) [Homo sapiens]
  misc_feature (1)..(637): Homolog of NCBI NO: 21361348 NR Description: serologically defined colon cancer antigen 16 sapiens] >gi|12654625|gb|AAH01149.1|AAH01149 Similar to KIAA0266 product [Homo sapiens] >gi|15929064|gb|AAH14987.1|AAH14987
  misc_feature (1)..(637): Homolog of NCBI NO: 11063983 NR Description: KIAA0266 gene product [Homo sapiens] Similar to S.cerevisiae hypothetical protein 5 (S49634) [Homo
  misc_feature (1)..(637): Homolog of NCBI NO: 40788930 NR Description: KIAA0266 [Homo sapiens]
MEPLQGLHGNSQLSNMISRMRKDTQSLVHAPLPKPEQERLERDVANELVYKGFDIWVPLVKRNREAPTIYFNQDVNVGYSTVGAIASQFHPRTEFEMKMASLLDDHEILEAHKEDGARLLEFNEVSMEDHIKRRNHVAKMRSMLFRVDLKHKRIKQIKSKTYHRLKNKDLNQSGVGAFMEPAMAKEEAKKQEARRVKERMTLKHKNTGQWAKRMLSRGLNRKYDVTQAALSKQLQIHATLSRKMNSTKDESSSDEEDLNDGSDQDTSKLIAEAKEKILKTVDDDEVPISRLMSLPFMARAVKKKNEEAKEEGKRDIEELEKFGGAETSKKSTNVVGRRVFGAEAPKESEKESDNLFDNSDSSDNDMEDNELEAVKDNASPARNTETIMEAEKLDDIAGNPASKTTFDVALYASGSWKKMTGCKNAESKKASKTHVPISQSQDKKESSDSESDDSESDDSESEAEQMVDGILTCGSKETYEIPCQAELVSRAFAGDDVEGDFEKDKQEVLNQEVPEPEKPVQVAGWGHWTNNQNKRGLPSRIVREHEEAKKTREQALRKRKDASFKHVIISEKVDKKAEKLQTKSLPYPYTSKEVFEQSMRMPIGPEFNPTTIVGVLNRPEVVKKAGVIIKPVKFEEVNPNDEHPRSHQKQKPKKKGGK

SEQ ID NO: 74160 - DNA, 1419 bp, Arabidopsis thaliana
  misc_feature (1)..(1419): Ceres Seq. ID no. 4995197
  misc_feature: MA Experiment ID: 108435 Result: Down-regulated in Transcription
  misc_feature: MA Experiment 108435 PARAMETER Experiment Name: At_stm_Mutants_cDNA_P Parameter: Plant Line Value: wt Landsburg vs stm
  misc_feature: MA Experiment 108435 PARAMETER Experiment Name: At_stm_Mutants_cDNA_P Parameter: Tissue Value: Shoot Apical Meristem Region
  misc_feature: MA Experiment ID: 108462 Result: Down-regulated in Transcription
  misc_feature: MA Experiment 108462 PARAMETER Experiment Name: At_Germinating_Seeds_cDNA_P Parameter: Age (day) Value: 2 vs. 0
  misc_feature: MA Experiment 108462 PARAMETER Experiment Name: At_Germinating_Seeds_cDNA_P Parameter: Tissue Value: Germinating Seeds
  misc_feature: MA Experiment ID: 108463 Result: Down-regulated in Transcription
  misc_feature: MA Experiment 108463 PARAMETER Experiment Name: At_Germinating_Seeds_cDNA_P Parameter: Age (day) Value: 3 vs. 0
  misc_feature: MA Experiment 108463 PARAMETER Experiment Name: At_Germinating_Seeds_cDNA_P Parameter: Tissue Value: Germinating Seeds
  misc_feature: MA Experiment ID: 108464 Result: Down-regulated in Transcription
  misc_feature: MA Experiment 108464 PARAMETER Experiment Name: At_Germinating_Seeds_cDNA_P Parameter: Age (day) Value: 4 vs. 0
  misc_feature: MA Experiment 108464 PARAMETER Experiment Name: At_Germinating_Seeds_cDNA_P Parameter: Tissue Value: Germinating Seeds
  misc_feature: MA Experiment ID: 108561 Result: Up-regulated in Transcription
  misc_feature: MA Experiment 108561 PARAMETER Experiment Name: At_100uM_ABA_cDNA_P Parameter: Timepoint (hr) Value: 6
  misc_feature: MA Experiment 108561 PARAMETER Experiment Name: At_100uM_ABA_cDNA_P Parameter: Tissue Value: Aerial
  misc_feature: MA Experiment 108561 PARAMETER Experiment Name: At_100uM_ABA_cDNA_P Parameter: Treatment Value: 100uM ABA vs. No Treatment
  misc_feature: MA Experiment ID: 108573 Result: Up-regulated in Transcription
  misc_feature: MA Experiment 108573 PARAMETER Experiment Name: At_Drought_cDNA_P Parameter: Timepoint (hr) Value: 6
  misc_feature: MA Experiment 108573 PARAMETER Experiment Name: At_Drought_cDNA_P Parameter: Tissue Value: Aerial
  misc_feature: MA Experiment 108573 PARAMETER Experiment Name: At_Drought_cDNA_P Parameter: Treatment Value: Drought vs. No Drought
  misc_feature: MA Experiment ID: 108574 Result: Down-regulated in Transcription
  misc_feature: MA Experiment 108574 PARAMETER Experiment Name: At_Wounding__cDNA_P Parameter: Timepoint (hr) Value: 1
  misc_feature: MA Experiment 108574 PARAMETER Experiment Name: At_Wounding__cDNA_P Parameter: Tissue Value: Aerial
  misc_feature: MA Experiment 108574 PARAMETER Experiment Name: At_Wounding__cDNA_P Parameter: Treatment Value: Wounding vs. No Wounding
  misc_feature: MA Experiment ID: 108579 Result: Down-regulated in Transcription
  misc_feature: MA Experiment 108579 PARAMETER Experiment Name: At_4deg_Cold_cDNA_P Parameter: Temperature (deg C) Value: 4 vs. 22
  misc_feature: MA Experiment 108579 PARAMETER Experiment Name: At_4deg_Cold_cDNA_P Parameter: Timepoint (hr) Value: 6
  misc_feature: MA Experiment 108579 PARAMETER Experiment Name: At_4deg_Cold_cDNA_P Parameter: Tissue Value: Aerial
  misc_feature: MA Experiment ID: 20000071 Result: Up-regulated in Transcription
  misc_feature: MA Experiment 20000071 PARAMETER Experiment Name: At_100uM_ABA_Mutants_cDNA_P Parameter: Plant Line Value: CS8104
  misc_feature: MA Experiment 20000071 PARAMETER Experiment Name: At_100uM_ABA_Mutants_cDNA_P Parameter: Timepoint (hr) Value: 6
  misc_feature: MA Experiment 20000071 PARAMETER Experiment Name: At_100uM_ABA_Mutants_cDNA_P Parameter: Tissue Value: Aerial
  misc_feature: MA Experiment 20000071 PARAMETER Experiment Name: At_100uM_ABA_Mutants_cDNA_P Parameter: Treatment Value: 100uM ABA vs. No Treatment
  misc_feature: MA Experiment ID: 20000072 Result: Up-regulated in Transcription
  misc_feature: MA Experiment 20000072 PARAMETER Experiment Name: At_100uM_ABA_Mutants_cDNA_P Parameter: Plant Line Value: CS8105
  misc_feature: MA Experiment 20000072 PARAMETER Experiment Name: At_100uM_ABA_Mutants_cDNA_P Parameter: Timepoint (hr) Value: 6
  misc_feature: MA Experiment 20000072 PARAMETER Experiment Name: At_100uM_ABA_Mutants_cDNA_P Parameter: Tissue Value: Aerial
  misc_feature: MA Experiment 20000072 PARAMETER Experiment Name: At_100uM_ABA_Mutants_cDNA_P Parameter: Treatment Value: 100uM ABA vs. No Treatment
  misc_feature: MA Experiment ID: 20000087 Result: Up-regulated in Transcription
  misc_feature: MA Experiment 20000087 PARAMETER Experiment Name: At_100uM_ABA_Mutants_cDNA_P Parameter: Plant Line Value: WS
  misc_feature: MA Experiment 20000087 PARAMETER Experiment Name: At_100uM_ABA_Mutants_cDNA_P Parameter: Timepoint (hr) Value: 6
  misc_feature: MA Experiment 20000087 PARAMETER Experiment Name: At_100uM_ABA_Mutants_cDNA_P Parameter: Tissue Value: Aerial
  misc_feature: MA Experiment 20000087 PARAMETER Experiment Name: At_100uM_ABA_Mutants_cDNA_P Parameter: Treatment Value: 100uM ABA vs. No Treatment
  misc_feature: MA Experiment ID: 20000111 Result: Up-regulated in Transcription
  misc_feature: MA Experiment 20000111 PARAMETER Experiment Name: At_42deg_Heat_cDNA_P Parameter: Temperature (deg C) Value: 42 vs. 22
  misc_feature: MA Experiment 20000111 PARAMETER Experiment Name: At_42deg_Heat_cDNA_P Parameter: Timepoint (hr) Value: 6
  misc_feature: MA Experiment 20000111 PARAMETER Experiment Name: At_42deg_Heat_cDNA_P Parameter: Tissue Value: Aerial
  misc_feature: MA Experiment ID: 20000112 Result: Up-regulated in Transcription
  misc_feature: MA Experiment 20000112 PARAMETER Experiment Name: At_42deg_Heat_cDNA_P Parameter: Temperature (deg C) Value: 42 vs. 22
  misc_feature: MA Experiment 20000112 PARAMETER Experiment Name: At_42deg_Heat_cDNA_P Parameter: Timepoint (hr) Value: 2
  misc_feature: MA Experiment 20000112 PARAMETER Experiment Name: At_42deg_Heat_cDNA_P Parameter: Tissue Value: Aerial
  misc_feature: MA Experiment ID: 20000113 Result: Up-regulated in Transcription
  misc_feature: MA Experiment 20000113 PARAMETER Experiment Name: At_42deg_Heat_cDNA_P Parameter: Temperature (deg C) Value: 42 vs. 22
  misc_feature: MA Experiment 20000113 PARAMETER Experiment Name: At_42deg_Heat_cDNA_P Parameter: Timepoint (hr) Value: 8
  misc_feature: MA Experiment 20000113 PARAMETER Experiment Name: At_42deg_Heat_cDNA_P Parameter: Tissue Value: Aerial
  misc_feature: MA Experiment ID: 20000117 Result: Up-regulated in Transcription
  misc_feature: MA Experiment 20000117 PARAMETER Experiment Name: At_100uM_ABA_Mutants_cDNA_P Parameter: Plant Line Value: Columbia
  misc_feature: MA Experiment 20000117 PARAMETER Experiment Name: At_100uM_ABA_Mutants_cDNA_P Parameter: Timepoint (hr) Value: 6
  misc_feature: MA Experiment 20000117 PARAMETER Experiment Name: At_100uM_ABA_Mutants_cDNA_P Parameter: Tissue Value: Aerial
  misc_feature: MA Experiment 20000117 PARAMETER Experiment Name: At_100uM_ABA_Mutants_cDNA_P Parameter: Treatment Value: 100uM ABA vs. No Treatment
atgaagaaagttgagttttttatgctccttctctgcttcatcgcagcgtcatctctagtgtctgctgatccaccaacatgtcctgctgatttgggaggcaagtgtagtgattctgatgactggcaaggtgatttcttccctgaaatccccaagattaagtatgagggaccttcgagtaagaacccacttgcttacaggtggtataacgctgaagaagagattcttgggaagaaaatgaaggattggtttagattcagtgttgcgttttggcatactttccgtgggactggaggtgatccatttggtgctgctactaagtattggccttgggaagatggtactaactctgtgtctatggctaagagaagaatgagagctaactttgagttcttgaagaaacttggagttgattggtggtgttttcatgacagagacatagcacctgatggcactacacttgaggaatctaacaaaaacttggatgaagttatcgaactcgccaaagaactccaaaaggggagcaaaatcaaaccattgtggggaacagctcagcttttcttgcatcctcgttatatgcacggaggagcgaccagctctgaagttggagtgtatgcttacgctgctgctcaggtgaagaaagccatggaggtaacacattacttaggtggtgaaaactacgttttttggggtggtcgtgaaggttatcagacactcttgaacactgatatgggaagagagcttgatcatctagccaggttctttgaagctgctgttgcttacaagaagaagattggattcaaaggcacgcttttaatcgagcccaagcctcaagaacccaccaagcaccagtatgactgggatgctgcaacagctgccaatttcttgaggaaatatggtcttattgatgagtttaagctcaacattgagtgtaaccatgccacgctctctggtcacacttgtcatcacgagcttgaaactgcaagaattaatggtttacttggcaacattgatgcaaacactggcgatgctcaaactggatgggatacagatcagtttcttacagatgttggagaagcaaccatggttatgatgagtgtcatcaaaaatggtgggattgctccaggcggcttcaactttgacgctaaactgcgaagagagagtacagacgtggaagacttattcattgctcatattagtggaatggatacaatggctcgtggactgagaaatgcagtcaaaatcttggaggagggaagtctaagtgaattggtacgcaagcgatatgcaacttgggactctgagcttgggaagcaaatagaagaaggaaaagctgattttgagtatcttgagaagaaagctaaagagtttggagaaccaaaggtttcttctgctaaacaggtacaagtttcttgctattaa

SEQ ID NO: 74161 - protein, 472 aa, Arabidopsis thaliana
  peptide (1)..(472): Ceres Seq. ID no. 4995198
  misc_feature (70)..(472): Pfam Name: Xylose isomerase Pfam Description: Xylose isomerase
  misc_feature (1)..(472): Homolog of NCBI NO: 17433690 NR Description: Xylose isomerase >gi|9758328|dbj|BAB08802.1|
  misc_feature (1)..(466): Homolog of NCBI NO: 30696904 NR Description: expressed protein [Arabidopsis thaliana] expressed protein; supported by full length cDNA: Ceres: 122798 thaliana] >gi|30387571|gb|AAP31951.1| At5g57655 [Arabidopsis
  misc_feature (1)..(466): Homolog of NCBI NO: 21537178 NR Description: xylose isomerase [Arabidopsis thaliana]
  misc_feature (9)..(466): Homolog of NCBI NO: 34395196 NR Description: putative xylose isomerase [Oryza sativa (japonica
  misc_feature (9)..(466): Homolog of NCBI NO: 34899308 NR Description: putative xylose isomerase [Oryza sativa (japonica
  misc_feature (1)..(466): Homolog of NCBI NO: 6175480 NR Description: Xylose isomerase >gi|1296809|emb|CAA64545.1|
  misc_feature (1)..(446): Homolog of NCBI NO: 2130051 NR Description: xylose isomerase (EC 5.3.1.5) - barley xylose isomerase [Hordeum vulgare subsp. vulgare]
  misc_feature (1)..(268): Homolog of NCBI NO: 30696901 NR Description: expressed protein [Arabidopsis thaliana]
  misc_feature (46)..(458): Homolog of NCBI NO: 32472084 NR Description: xylose isomerase [Pirellula sp.]
  misc_feature (44)..(466): Homolog of NCBI NO: 15644415 NR Description: xylose isomerase [Thermotoga maritima]
MKKVEFFMLLLCFIAASSLVSADPPTCPADLGGKCSDSDDWQGDFFPEIPKIKYEGPSSKNPLAYRWYNAEEEILGKKMKDWFRFSVAFWHTFRGTGGDPFGAATKYWPWEDGTNSVSMAKRRMRANFEFLKKLGVDWWCFHDRDIAPDGTTLEESNKNLDEVIELAKELQKGSKIKPLWGTAQLFLHPRYMHGGATSSEVGVYAYAAAQVKKAMEVTHYLGGENYVFWGGREGYQTLLNTDMGRELDHLARFFEAAVAYKKKIGFKGTLLIEPKPQEPTKHQYDWDAATAANFLRKYGLIDEFKLNIECNHATLSGHTCHHELETARINGLLGNIDANTGDAQTGWDTDQFLTDVGEATMVMMSVIKNGGIAPGGFNFDAKLRRESTDVEDLFIAHISGMDTMARGLRNAVKILEEGSLSELVRKRYATWDSELGKQIEEGKADFEYLEKKAKEFGEPKVSSAKQVQVSCY

SEQ ID NO: 74162 - protein, 465 aa, Arabidopsis thaliana
  peptide (1)..(465): Ceres Seq. ID no. 4995199
  misc_feature (63)..(465): Pfam Name: Xylose isomerase Pfam Description: Xylose isomerase
  misc_feature (1)..(465): Homolog of NCBI NO: 17433690 NR Description: Xylose isomerase >gi|9758328|dbj|BAB08802.1|
  misc_feature (1)..(459): Homolog of NCBI NO: 30696904 NR Description: expressed protein [Arabidopsis thaliana] expressed protein; supported by full length cDNA: Ceres: 122798 thaliana] >gi|30387571|gb|AAP31951.1| At5g57655 [Arabidopsis
  misc_feature (1)..(459): Homolog of NCBI NO: 21537178 NR Description: xylose isomerase [Arabidopsis thaliana]
  misc_feature (2)..(459): Homolog of NCBI NO: 34395196 NR Description: putative xylose isomerase [Oryza sativa (japonica
  misc_feature (2)..(459): Homolog of NCBI NO: 34899308 NR Description: putative xylose isomerase [Oryza sativa (japonica
  misc_feature (1)..(459): Homolog of NCBI NO: 6175480 NR Description: Xylose isomerase >gi|1296809|emb|CAA64545.1|
  misc_feature (1)..(439): Homolog of NCBI NO: 2130051 NR Description: xylose isomerase (EC 5.3.1.5) - barley xylose isomerase [Hordeum vulgare subsp. vulgare]
  misc_feature (1)..(261): Homolog of NCBI NO: 30696901 NR Description: expressed protein [Arabidopsis thaliana]
  misc_feature (39)..(451): Homolog of NCBI NO: 32472084 NR Description: xylose isomerase [Pirellula sp.]
  misc_feature (37)..(459): Homolog of NCBI NO: 15644415 NR Description: xylose isomerase [Thermotoga maritima]
MLLLCFIAASSLVSADPPTCPADLGGKCSDSDDWQGDFFPEIPKIKYEGPSSKNPLAYRWYNAEEEILGKKMKDWFRFSVAFWHTFRGTGGDPFGAATKYWPWEDGTNSVSMAKRRMRANFEFLKKLGVDWWCFHDRDIAPDGTTLEESNKNLDEVIELAKELQKGSKIKPLWGTAQLFLHPRYMHGGATSSEVGVYAYAAAQVKKAMEVTHYLGGENYVFWGGREGYQTLLNTDMGRELDHLARFFEAAVAYKKKIGFKGTLLIEPKPQEPTKHQYDWDAATAANFLRKYGLIDEFKLNIECNHATLSGHTCHHELETARINGLLGNIDANTGDAQTGWDTDQFLTDVGEATMVMMSVIKNGGIAPGGFNFDAKLRRESTDVEDLFIAHISGMDTMARGLRNAVKILEEGSLSELVRKRYATWDSELGKQIEEGKADFEYLEKKAKEFGEPKVSSAKQVQVSCY

SEQ ID NO: 74163 - protein, 394 aa, Arabidopsis thaliana
  peptide (1)..(394): Ceres Seq. ID no. 4995200
  misc_feature (1)..(394): Pfam Name: Xylose isomerase Pfam Description: Xylose isomerase
  misc_feature (1)..(394): Homolog of NCBI NO: 17433690 NR Description: Xylose isomerase >gi|9758328|dbj|BAB08802.1|
  misc_feature (1)..(388): Homolog of NCBI NO: 30696904 NR Description: expressed protein [Arabidopsis thaliana] expressed protein; supported by full length cDNA: Ceres: 122798 thaliana] >gi|30387571|gb|AAP31951.1| At5g57655 [Arabidopsis
  misc_feature (1)..(388): Homolog of NCBI NO: 21537178 NR Description: xylose isomerase [Arabidopsis thaliana]
  misc_feature (1)..(388): Homolog of NCBI NO: 34395196 NR Description: putative xylose isomerase [Oryza sativa (japonica
  misc_feature (1)..(388): Homolog of NCBI NO: 34899308 NR Description: putative xylose isomerase [Oryza sativa (japonica
  misc_feature (1)..(388): Homolog of NCBI NO: 6175480 NR Description: Xylose isomerase >gi|1296809|emb|CAA64545.1|
  misc_feature (1)..(368): Homolog of NCBI NO: 2130051 NR Description: xylose isomerase (EC 5.3.1.5) - barley xylose isomerase [Hordeum vulgare subsp. vulgare]
  misc_feature (1)..(190): Homolog of NCBI NO: 30696901 NR Description: expressed protein [Arabidopsis thaliana]
  misc_feature (1)..(380): Homolog of NCBI NO: 32472084 NR Description: xylose isomerase [Pirellula sp.]
  misc_feature (1)..(388): Homolog of NCBI NO: 15644415 NR Description: xylose isomerase [Thermotoga maritima]
MKDWFRFSVAFWHTFRGTGGDPFGAATKYWPWEDGTNSVSMAKRRMRANFEFLKKLGVDWWCFHDRDIAPDGTTLEESNKNLDEVIELAKELQKGSKIKPLWGTAQLFLHPRYMHGGATSSEVGVYAYAAAQVKKAMEVTHYLGGENYVFWGGREGYQTLLNTDMGRELDHLARFFEAAVAYKKKIGFKGTLLIEPKPQEPTKHQYDWDAATAANFLRKYGLIDEFKLNIECNHATLSGHTCHHELETARINGLLGNIDANTGDAQTGWDTDQFLTDVGEATMVMMSVIKNGGIAPGGFNFDAKLRRESTDVEDLFIAHISGMDTMARGLRNAVKILEEGSLSELVRKRYATWDSELGKQIEEGKADFEYLEKKAKEFGEPKVSSAKQVQVSCY

SEQ ID NO: 74164 - DNA, 1176 bp, Arabidopsis thaliana
  misc_feature (1)..(1176): Ceres Seq. ID no. 4995259
  misc_feature: MA Experiment ID: 20000184 Result: Down-regulated in Transcription
  misc_feature: MA Experiment 20000184 PARAMETER Experiment Name: At_Shoots__P Parameter: Age (day) Value: 7
  misc_feature: MA Experiment 20000184 PARAMETER Experiment Name: At_Shoots__P Parameter: Tissue Value: Shoots vs. Whole Plant
  misc_feature: MA Experiment ID: 20000264 Result: Up-regulated in Transcription
  misc_feature: MA Experiment 20000264 PARAMETER Experiment Name: At_Open_Flower_P Parameter: Age (day) Value: 21
  misc_feature: MA Experiment 20000264 PARAMETER Experiment Name: At_Open_Flower_P Parameter: Plant Line Value: WS
  misc_feature: MA Experiment 20000264 PARAMETER Experiment Name: At_Open_Flower_P Parameter: Tissue Value: Open Flower vs. Whole Plant
  misc_feature: MA Experiment ID: 20000794 Result: Up-regulated in Transcription
  misc_feature: MA Experiment 20000794 PARAMETER Experiment Name: At_Petals_P Parameter: Age (day) Value: 23-25 days
  misc_feature: MA Experiment 20000794 PARAMETER Experiment Name: At_Petals_P Parameter: Plant Line Value: WS
  misc_feature: MA Experiment 20000794 PARAMETER Experiment Name: At_Petals_P Parameter: Tissue Value: Petals vs. Whole plant
atgttgcccagattagctcgagtcgtcactcaaacctcaaagcttcgatctttgaccactaatggatcgatgaaaaatctctcctttttctcccgatatgggtacgcgactgttgcgccggcggcagctgatcctccgtcgcagaaggatttccccagtaaatctccgctgttaatgcgtagttgttgtgaatgtttaggtctcactatagtattcgaacctaagctcaatttgattctctctgtttctagtttcatcgaatgcgggactaaaataaacttggataagatgttttggtcaaagccatgttcattggctctgcctaaagactctcctctcagaattgatgaaccagactatgtagggattcgtcgtttcatactaaagatgatgatgttctatagcaaacagagcatgtctatccgtggggctaacgtgatctacaagcggatcattgcacaagttgataaacctgcaatatatgatgtattcaacttggagaaaacattcaaaataacgtattcgctgcttgtccttcatatgtggcttgttttacgccgcttgaaggaagatggacaggaaggtgttgaccttggtcaatacgtctatgagatctacaatcatgatgttgaactcagggtatctaaagccggggttaacttgctgctagccaagtggatgaaggagttggagagaatattttatggaaatgttgttgcctatgatgctgcgctacttccggaagctaaaccaaatgacctacaaatcaaattatggaggaacgtattttctgatgatggaacaacaacacctgataacacagatttaaaaacagcacaggcaatggcaagatatgtccggagagaacttggttctctttctttaacaggtacctatgacgctatagttggaatgcctcattatgttactcgcatttgcatttcgaatagacatgccttttcttatatggttcttttttgtcatacacagataaagagtccatattctccggcaatttctccttcacccctttggagaacaagcccctgtgatttgaatgaaattagaagaagctgtggtgctttgcgaatcaatctttcatttgtttctctgtttcatttgatttacttatatcaaaccaaagaaacctacacaagggaatgtgctagctgttag

SEQ ID NO: 74165 - protein, 391 aa, Arabidopsis thaliana
  peptide (1)..(391): Ceres Seq. ID no. 4995260
  misc_feature (162)..(317): Pfam Name: Ubiquinol-cytochrome C chaperone Pfam Description: Ubiquinol-cytochrome C chaperone
  misc_feature (1)..(391): Homolog of NCBI NO: 8843859 NR Description: contains similarity to unknown
  misc_feature (92)..(296): Homolog of NCBI NO: 30696021 NR Description: expressed protein [Arabidopsis thaliana]
  misc_feature (1)..(57): Homolog of NCBI NO: 30696021 NR Description: expressed protein [Arabidopsis thaliana]
  misc_feature (91)..(296): Homolog of NCBI NO: 33146996 NR Description: unknown protein [Oryza sativa (japonica
  misc_feature (142)..(293): Homolog of NCBI NO: 22964668 NR Description: hypothetical protein [Rhodopseudomonas palustris]
  misc_feature (147)..(297): Homolog of NCBI NO: 27380134 NR Description: bll5023 [Bradyrhizobium japonicum]
  misc_feature (145)..(268): Homolog of NCBI NO: 13476949 NR Description: unknown protein [Mesorhizobium loti]
  misc_feature (89)..(297): Homolog of NCBI NO: 31542261 NR Description: chromosome 20 open reading frame 44; likely of mouse basic FGF repressed, Zic binding protein [Homo sapiens]
  misc_feature (134)..(297): Homolog of NCBI NO: 28558076 NR Description: Basic FGF-repressed Zic binding protein homolog binding protein) >gi|4559310|gb|AAD22979.1|AF129131_1 putative
  misc_feature (89)..(297): Homolog of NCBI NO: 28558072 NR Description: Basic FGF-repressed Zic binding protein (bFZb)
MLPRLARVVTQTSKLRSLTTNGSMKNLSFFSRYGYATVAPAAADPPSQKDFPSKSPLLMRSCCECLGLTIVFEPKLNLILSVSSFIECGTKINLDKMFWSKPCSLALPKDSPLRIDEPDYVGIRRFILKMMMFYSKQSMSIRGANVIYKRIIAQVDKPAIYDVFNLEKTFKITYSLLVLHMWLVLRRLKEDGQEGVDLGQYVYEIYNHDVELRVSKAGVNLLLAKWMKELERIFYGNVVAYDAALLPEAKPNDLQIKLWRNVFSDDGTTTPDNTDLKTAQAMARYVRRELGSLSLTGTYDAIVGMPHYVTRICISNRHAFSYMVLFCHTQIKSPYSPAISPSPLWRTSPCDLNEIRRSCGALRINLSFVSLFHLIYLYQTKETYTRECASC

SEQ ID NO: 74166 - protein, 368 aa, Arabidopsis thaliana
  peptide (1)..(368): Ceres Seq. ID no. 4995261
  misc_feature (139)..(294): Pfam Name: Ubiquinol-cytochrome C chaperone Pfam Description: Ubiquinol-cytochrome C chaperone
  misc_feature (1)..(368): Homolog of NCBI NO: 8843859 NR Description: contains similarity to unknown
  misc_feature (69)..(273): Homolog of NCBI NO: 30696021 NR Description: expressed protein [Arabidopsis thaliana]
  misc_feature (1)..(34): Homolog of NCBI NO: 30696021 NR Description: expressed protein [Arabidopsis thaliana]
  misc_feature (68)..(273): Homolog of NCBI NO: 33146996 NR Description: unknown protein [Oryza sativa (japonica
  misc_feature (119)..(270): Homolog of NCBI NO: 22964668 NR Description: hypothetical protein [Rhodopseudomonas palustris]
  misc_feature (124)..(274): Homolog of NCBI NO: 27380134 NR Description: bll5023 [Bradyrhizobium japonicum]
  misc_feature (122)..(245): Homolog of NCBI NO: 13476949 NR Description: unknown protein [Mesorhizobium loti]
  misc_feature (66)..(274): Homolog of NCBI NO: 31542261 NR Description: chromosome 20 open reading frame 44; likely of mouse basic FGF repressed, Zic binding protein [Homo sapiens]
  misc_feature (111)..(274): Homolog of NCBI NO: 28558076 NR Description: Basic FGF-repressed Zic binding protein homolog binding protein) >gi|4559310|gb|AAD22979.1|AF129131_1 putative
  misc_feature (66)..(274): Homolog of NCBI NO: 28558072 NR Description: Basic FGF-repressed Zic binding protein (bFZb)
MKNLSFFSRYGYATVAPAAADPPSQKDFPSKSPLLMRSCCECLGLTIVFEPKLNLILSVSSFIECGTKINLDKMFWSKPCSLALPKDSPLRIDEPDYVGIRRFILKMMMFYSKQSMSIRGANVIYKRIIAQVDKPAIYDVFNLEKTFKITYSLLVLHMWLVLRRLKEDGQEGVDLGQYVYEIYNHDVELRVSKAGVNLLLAKWMKELERIFYGNVVAYDAALLPEAKPNDLQIKLWRNVFSDDGTTTPDNTDLKTAQAMARYVRRELGSLSLTGTYDAIVGMPHYVTRICISNRHAFSYMVLFCHTQIKSPYSPAISPSPLWRTSPCDLNEIRRSCGALRINLSFVSLFHLIYLYQTKETYTRECASC

SEQ ID NO: 74167 - protein, 333 aa, Arabidopsis thaliana
  peptide (1)..(333): Ceres Seq. ID no. 4995262
  misc_feature (104)..(259): Pfam Name: Ubiquinol-cytochrome C chaperone Pfam Description: Ubiquinol-cytochrome C chaperone
  misc_feature (1)..(333): Homolog of NCBI NO: 8843859 NR Description: contains similarity to unknown
  misc_feature (34)..(238): Homolog of NCBI NO: 30696021 NR Description: expressed protein [Arabidopsis thaliana]
  misc_feature (33)..(238): Homolog of NCBI NO: 33146996 NR Description: unknown protein [Oryza sativa (japonica
  misc_feature (84)..(235): Homolog of NCBI NO: 22964668 NR Description: hypothetical protein [Rhodopseudomonas palustris]
  misc_feature (89)..(239): Homolog of NCBI NO: 27380134 NR Description: bll5023 [Bradyrhizobium japonicum]
  misc_feature (87)..(210): Homolog of NCBI NO: 13476949 NR Description: unknown protein [Mesorhizobium loti]
  misc_feature (31)..(239): Homolog of NCBI NO: 31542261 NR Description: chromosome 20 open reading frame 44; likely of mouse basic FGF repressed, Zic binding protein [Homo sapiens]
  misc_feature (76)..(239): Homolog of NCBI NO: 28558076 NR Description: Basic FGF-repressed Zic binding protein homolog binding protein) >gi|4559310|gb|AAD22979.1|AF129131_1 putative
  misc_feature (31)..(239): Homolog of NCBI NO: 28558072 NR Description: Basic FGF-repressed Zic binding protein (bFZb)
  misc_feature (76)..(239): Homolog of NCBI NO: 9256564 NR Description: basic FGF repressed, Zic binding protein [Mus >gi|7595966|gb|AAF64519.1|AF253516_1 unknown protein [Mus >gi|12847091|dbj|BAB27433.1| unnamed protein product [Mus
MRSCCECLGLTIVFEPKLNLILSVSSFIECGTKINLDKMFWSKPCSLALPKDSPLRIDEPDYVGIRRFILKMMMFYSKQSMSIRGANVIYKRIIAQVDKPAIYDVFNLEKTFKITYSLLVLHMWLVLRRLKEDGQEGVDLGQYVYEIYNHDVELRVSKAGVNLLLAKWMKELERIFYGNVVAYDAALLPEAKPNDLQIKLWRNVFSDDGTTTPDNTDLKTAQAMARYVRRELGSLSLTGTYDAIVGMPHYVTRICISNRHAFSYMVLFCHTQIKSPYSPAISPSPLWRTSPCDLNEIRRSCGALRINLSFVSLFHLIYLYQTKETYTRECASC

SEQ ID NO: 74168 - DNA, 2148 bp, Arabidopsis thaliana
  misc_feature (1)..(2148): Ceres Seq. ID no. 4995303
  misc_feature: MA Experiment ID: 20000234 Result: Up-regulated in Transcription
  misc_feature: MA Experiment 20000234 PARAMETER Experiment Name: At_Siliques_P Parameter: Age (day) Value: 21
  misc_feature: MA Experiment 20000234 PARAMETER Experiment Name: At_Siliques_P Parameter: Organism Value: A. thaliana
  misc_feature: MA Experiment 20000234 PARAMETER Experiment Name: At_Siliques_P Parameter: Plant Line Value: WS
  misc_feature: MA Experiment 20000234 PARAMETER Experiment Name: At_Siliques_P Parameter: Tissue Value: Less Than 5mm Siliques vs. Whole Plant
  misc_feature: MA Experiment ID: 20000265 Result: Up-regulated in Transcription
  misc_feature: MA Experiment 20000265 PARAMETER Experiment Name: At_Open_Flower_P Parameter: Age (day) Value: 21
  misc_feature: MA Experiment 20000265 PARAMETER Experiment Name: At_Open_Flower_P Parameter: Plant Line Value: WS
  misc_feature: MA Experiment 20000265 PARAMETER Experiment Name: At_Open_Flower_P Parameter: Tissue Value: Closed Flower vs. Whole Plant
  misc_feature: MA Experiment ID: 20000286 Result: Up-regulated in Transcription
  misc_feature: MA Experiment 20000286 PARAMETER Experiment Name: At_Open_Flower_P Parameter: Age (day) Value: 21
  misc_feature: MA Experiment 20000286 PARAMETER Experiment Name: At_Open_Flower_P Parameter: Plant Line Value: WS
  misc_feature: MA Experiment 20000286 PARAMETER Experiment Name: At_Open_Flower_P Parameter: Tissue Value: Half Open vs. Whole Plant
  misc_feature: MA Experiment ID: 20000437 Result: Up-regulated in Transcription
  misc_feature: MA Experiment 20000437 PARAMETER Experiment Name: At_Drought_P Parameter: Age (day) Value: 8
  misc_feature: MA Experiment 20000437 PARAMETER Experiment Name: At_Drought_P Parameter: Organism Value: A. thaliana
  misc_feature: MA Experiment 20000437 PARAMETER Experiment Name: At_Drought_P Parameter: Plant Line Value: WS
  misc_feature: MA Experiment 20000437 PARAMETER Experiment Name: At_Drought_P Parameter: Timepoint (hr) Value: 24
  misc_feature: MA Experiment 20000437 PARAMETER Experiment Name: At_Drought_P Parameter: Tissue Value: Whole Plant
  misc_feature: MA Experiment 20000437 PARAMETER Experiment Name: At_Drought_P Parameter: Treatment Value: Drought vs. No Drought
atgccgttgttgcgctccgccatcaccgtcgtgtttcgctgctccggagaaattgaactttatgttgatgaggttgttgttgctatagttgtagcgttccgtgatgacaatactatttgtctgtctccaagcttgaagaataatgaactctcaagacagacaaattcatgggtttcaccattttgcttgcaacgcagagcgtattcgacgggtttcaccagcgtacatggtggaatacctacggcagagtatgcaaagttgcggagagaatcccttgaaactgaatttggacatgctctaggagcatatagctcgaaaagtttttctgcagtgtatcgttttggaccctttttggctttgtatagagctgcaatcatttcgtatcatgtggtgaagcttgccttttggcagctgtttgttcaggatatgaggaaacgggctgtcaaggcactgagcacgagaccagacatattaccatctatatactgtcaggaactttcaaaattgcaggaccagattcctccatttccaactactgttgccatgcgatgtattgaagagcaactgggtgctccagtgtcaaaactttttgcagatattagtcttaaacctgttgctgctgcatccctgggtcaggtatacaaagctcatctgcattctggacaattggtagccgttaaggttcagagacctggaatgtcactcattctaacacgtgatgccctcttattcaaaatgattgggggacaactgaaacgatttgctaaagcccgtaaggatcttttggtagcggtgaatgagatggtcaggcatatgtttgacgaaatagattacgttctcgaggcaaaaaatgcagaacgatttgcctctctatacagttttgactcagggaatgagcagattgatgataacgctggacctaggaatatgtccaggaatcacagagcagagaacatcaaagtccctaaaatttactggaattttacacgcacagcagtgctcacaatggaatggatcgatggcataaaattaacagatgaaattaagctgaaaagggcttcccttgatagaagggacttgatcgatcagggcttatcctgttcattaaagcagcttcttgaggttggattctttcatgctgatccgcacccaggaaatcttgtggctactaaagaagggtctcttgtttactttgacttcggaatgatggggaatattccacgccattaccgtgtgggacttattcaaattctggtgcattttgtcaaccgtgattctctaagtttggcaaatgatttcctgtccttgggatttttgcctgaaggggttgatatacaagcagtttcaaatgctttgcgtacttcatttggttctactacgagaatatcacaagatttccagggggtgatggaacaattatatgatgttatgtacgagttcaacttttcgctgcctccagactatgctcttgttataagatctcttggttcactggaaggcacggctaagattcttgatccagagtttaaagtgattgagagtgcatatccatttgttatcgggaggctattagcagatccaagcccagatatgaggaaaatactaagggagcttgtcatttgtaatgatggatcaataaggtggaatcgtcttgaacgcctggtagcagcaatatcagaacaggcttctgcgacttcaggagactctccagaagataaaacgttgaagaaatcatcggaactgaaatcattcgacatgcattcagtagtttccgcaacagaagatctgctactgttcatattatccgagaaagggcagagagttcgggtcttccttcttcaagacataatcagagtggttgatattttcctggaagtagaggctcttgagctcaacaagaccatcaatcttaagacggaagaagggacaatgaaaagagtgagcaatggattcaaaggtctgagtgaggcggtgaagcttgcaccgggaatgtggatatcaatgcttcttcggatgtcaaggaagtctgaggttcatagttatgctttagatattgtttctgcattgtctacacattttggccacaaagtgcctcacacttgttggatccttctctccaaattgctccatcacaataagagccaataa

SEQ ID NO: 74169 - protein, 715 aa, Arabidopsis thaliana
  peptide (1)..(715): Ceres Seq. ID no. 4995304
  misc_feature (187)..(292): Pfam Name: ABC1 family Pfam Description: ABC1 family
  misc_feature (66)..(711): Homolog of NCBI NO: 34901462 NR Description: OSJNBa0040K22.7 [Oryza sativa (japonica
  misc_feature (66)..(711): Homolog of NCBI NO: 34394127 NR Description: putative ubiquinone biosynthesis protein ubiB
  misc_feature (299)..(562): Homolog of NCBI NO: 33867054 NR Description: possible protein kinase: ABC1 family sp. WH 8102] >gi|33639655|emb|CAE09039.1| possible protein
  misc_feature (146)..(292): Homolog of NCBI NO: 33867054 NR Description: possible protein kinase: ABC1 family sp. WH 8102] >gi|33639655|emb|CAE09039.1| possible protein
  misc_feature (313)..(678): Homolog of NCBI NO: 33241332 NR Description: Predicted protein kinase [Prochlorococcus marinus marinus str. CCMP1375] >gi|33238862|gb|AAQ00927.1| Predicted
  misc_feature (146)..(292): Homolog of NCBI NO: 33241332 NR Description: Predicted protein kinase [Prochlorococcus marinus marinus str. CCMP1375] >gi|33238862|gb|AAQ00927.1| Predicted
  misc_feature (317)..(562): Homolog of NCBI NO: 33864536 NR Description: possible protein kinase:ABC1 family marinus str. MIT 9313] >gi|33641316|emb|CAE22446.1| possible
  misc_feature (146)..(293): Homolog of NCBI NO: 33864536 NR Description: possible protein kinase:ABC1 family marinus str. MIT 9313] >gi|33641316|emb|CAE22446.1| possible
  misc_feature (317)..(555): Homolog of NCBI NO: 23042448 NR Description: hypothetical protein [Trichodesmium erythraeum
  misc_feature (149)..(292): Homolog of NCBI NO: 23042448 NR Description: hypothetical protein [Trichodesmium erythraeum
MPLLRSAITVVFRCSGEIELYVDEVVVAIVVAFRDDNTICLSPSLKNNELSRQTNSWVSPFCLQRRAYSTGFTSVHGGIPTAEYAKLRRESLETEFGHALGAYSSKSFSAVYRFGPFLALYRAAIISYHVVKLAFWQLFVQDMRKRAVKALSTRPDILPSIYCQELSKLQDQIPPFPTTVAMRCIEEQLGAPVSKLFADISLKPVAAASLGQVYKAHLHSGQLVAVKVQRPGMSLILTRDALLFKMIGGQLKRFAKARKDLLVAVNEMVRHMFDEIDYVLEAKNAERFASLYSFDSGNEQIDDNAGPRNMSRNHRAENIKVPKIYWNFTRTAVLTMEWIDGIKLTDEIKLKRASLDRRDLIDQGLSCSLKQLLEVGFFHADPHPGNLVATKEGSLVYFDFGMMGNIPRHYRVGLIQILVHFVNRDSLSLANDFLSLGFLPEGVDIQAVSNALRTSFGSTTRISQDFQGVMEQLYDVMYEFNFSLPPDYALVIRSLGSLEGTAKILDPEFKVIESAYPFVIGRLLADPSPDMRKILRELVICNDGSIRWNRLERLVAAISEQASATSGDSPEDKTLKKSSELKSFDMHSVVSATEDLLLFILSEKGQRVRVFLLQDIIRVVDIFLEVEALELNKTINLKTEEGTMKRVSNGFKGLSEAVKLAPGMWISMLLRMSRKSEVHSYALDIVSALSTHFGHKVPHTCWILLSKLLHHNKSQ

SEQ ID NO: 74170 - protein, 573 aa, Arabidopsis thaliana
  peptide (1)..(573): Ceres Seq. ID no. 4995305
  misc_feature (45)..(150): Pfam Name: ABC1 family Pfam Description: ABC1 family
  misc_feature (1)..(569): Homolog of NCBI NO: 34901462 NR Description: OSJNBa0040K22.7 [Oryza sativa (japonica
  misc_feature (1)..(569): Homolog of NCBI NO: 34394127 NR Description: putative ubiquinone biosynthesis protein ubiB
  misc_feature (157)..(420): Homolog of NCBI NO: 33867054 NR Description: possible protein kinase: ABC1 family sp. WH 8102] >gi|33639655|emb|CAE09039.1| possible protein
  misc_feature (4)..(150): Homolog of NCBI NO: 33867054 NR Description: possible protein kinase: ABC1 family sp. WH 8102] >gi|33639655|emb|CAE09039.1| possible protein
  misc_feature (171)..(536): Homolog of NCBI NO: 33241332 NR Description: Predicted protein kinase [Prochlorococcus marinus marinus str. CCMP1375] >gi|33238862|gb|AAQ00927.1| Predicted
  misc_feature (4)..(150): Homolog of NCBI NO: 33241332 NR Description: Predicted protein kinase [Prochlorococcus marinus marinus str. CCMP1375] >gi|33238862|gb|AAQ00927.1| Predicted
  misc_feature (175)..(420): Homolog of NCBI NO: 33864536 NR Description: possible protein kinase:ABC1 family marinus str. MIT 9313] >gi|33641316|emb|CAE22446.1| possible
  misc_feature (4)..(151): Homolog of NCBI NO: 33864536 NR Description: possible protein kinase:ABC1 family marinus str. MIT 9313] >gi|33641316|emb|CAE22446.1| possible
  misc_feature (175)..(413): Homolog of NCBI NO: 23042448 NR Description: hypothetical protein [Trichodesmium erythraeum
  misc_feature (7)..(150): Homolog of NCBI NO: 23042448 NR Description: hypothetical protein [Trichodesmium erythraeum
MRKRAVKALSTRPDILPSIYCQELSKLQDQIPPFPTTVAMRCIEEQLGAPVSKLFADISLKPVAAASLGQVYKAHLHSGQLVAVKVQRPGMSLILTRDALLFKMIGGQLKRFAKARKDLLVAVNEMVRHMFDEIDYVLEAKNAERFASLYSFDSGNEQIDDNAGPRNMSRNHRAENIKVPKIYWNFTRTAVLTMEWIDGIKLTDEIKLKRASLDRRDLIDQGLSCSLKQLLEVGFFHADPHPGNLVATKEGSLVYFDFGMMGNIPRHYRVGLIQILVHFVNRDSLSLANDFLSLGFLPEGVDIQAVSNALRTSFGSTTRISQDFQGVMEQLYDVMYEFNFSLPPDYALVIRSLGSLEGTAKILDPEFKVIESAYPFVIGRLLADPSPDMRKILRELVICNDGSIRWNRLERLVAAISEQASATSGDSPEDKTLKKSSELKSFDMHSVVSATEDLLLFILSEKGQRVRVFLLQDIIRVVDIFLEVEALELNKTINLKTEEGTMKRVSNGFKGLSEAVKLAPGMWISMLLRMSRKSEVHSYALDIVSALSTHFGHKVPHTCWILLSKLLHHNKSQ

SEQ ID NO: 74171 - protein, 534 aa, Arabidopsis thaliana
  peptide (1)..(534): Ceres Seq. ID no. 4995306
  misc_feature (6)..(111): Pfam Name: ABC1 family Pfam Description: ABC1 family
  misc_feature (1)..(530): Homolog of NCBI NO: 34901462 NR Description: OSJNBa0040K22.7 [Oryza sativa (japonica
  misc_feature (1)..(530): Homolog of NCBI NO: 34394127 NR Description: putative ubiquinone biosynthesis protein ubiB
  misc_feature (118)..(381): Homolog of NCBI NO: 33867054 NR Description: possible protein kinase: ABC1 family sp. WH 8102] >gi|33639655|emb|CAE09039.1| possible protein
  misc_feature (1)..(111): Homolog of NCBI NO: 33867054 NR Description: possible protein kinase: ABC1 family sp. WH 8102] >gi|33639655|emb|CAE09039.1| possible protein
  misc_feature (132)..(497): Homolog of NCBI NO: 33241332 NR Description: Predicted protein kinase [Prochlorococcus marinus marinus str. CCMP1375] >gi|33238862|gb|AAQ00927.1| Predicted
  misc_feature (1)..(111): Homolog of NCBI NO: 33241332 NR Description: Predicted protein kinase [Prochlorococcus marinus marinus str. CCMP1375] >gi|33238862|gb|AAQ00927.1| Predicted
  misc_feature (136)..(381): Homolog of NCBI NO: 33864536 NR Description: possible protein kinase:ABC1 family marinus str. MIT 9313] >gi|33641316|emb|CAE22446.1| possible
  misc_feature (1)..(112): Homolog of NCBI NO: 33864536 NR Description: possible protein kinase:ABC1 family marinus str. MIT 9313] >gi|33641316|emb|CAE22446.1| possible
  misc_feature (136)..(374): Homolog of NCBI NO: 23042448 NR Description: hypothetical protein [Trichodesmium erythraeum
  misc_feature (1)..(111): Homolog of NCBI NO: 23042448 NR Description: hypothetical protein [Trichodesmium erythraeum
MRCIEEQLGAPVSKLFADISLKPVAAASLGQVYKAHLHSGQLVAVKVQRPGMSLILTRDALLFKMIGGQLKRFAKARKDLLVAVNEMVRHMFDEIDYVLEAKNAERFASLYSFDSGNEQIDDNAGPRNMSRNHRAENIKVPKIYWNFTRTAVLTMEWIDGIKLTDEIKLKRASLDRRDLIDQGLSCSLKQLLEVGFFHADPHPGNLVATKEGSLVYFDFGMMGNIPRHYRVGLIQILVHFVNRDSLSLANDFLSLGFLPEGVDIQAVSNALRTSFGSTTRISQDFQGVMEQLYDVMYEFNFSLPPDYALVIRSLGSLEGTAKILDPEFKVIESAYPFVIGRLLADPSPDMRKILRELVICNDGSIRWNRLERLVAAISEQASATSGDSPEDKTLKKSSELKSFDMHSVVSATEDLLLFILSEKGQRVRVFLLQDIIRVVDIFLEVEALELNKTINLKTEEGTMKRVSNGFKGLSEAVKLAPGMWISMLLRMSRKSEVHSYALDIVSALSTHFGHKVPHTCWILLSKLLHHNKSQ

SEQ ID NO: 74172 - DNA, 1218 bp, Arabidopsis thaliana
  misc_feature (1)..(1218): Ceres Seq. ID no. 4995393
  misc_feature: Pfam Name: Pkinase_Tyr Pfam Description: Protein tyrosine kinase
atgagacctcgcgggtatcaacgagctccgtcaatgcagaaaccaacagattatccgacggataagacgcttcatccgaattacccatttctcatgtcctctcatggtctcaagtcctttgaatcggacgacgaagacgacgactccgactcctccaacgatcaattcgctttcactatcaacacagagttgcttgtcgatgtcaaagacatatctataggggacttcatcggcgaaggttcatcatctactgtctacagaggattgttcaggagagttgtccctgtgtctgtgaagatattccagcctaaaagaacatctgctttaagcattgagcagaggaagaagtttcagagagaggttttgctgctttccaagtttagacatgaaaacattgtgcggttcattggggcgtgcatagaaccaaagttgatgataattactgaactcatggaaggcaatactcttcagaagtttatgttgagtgttcgtccaaagcctcttgatctgaagctctccattagctttgcgttggatattgctcggggaatggagttcttgaatgcaaatggcattattcaccgagatttgaaaccaagtaatatgctcttaacaggtgatcagaaacatgtaaagttggctgactttggacttgctagagaggagactaaaggtttcatgacctttgaggctggtacatacagatggatggctccagagttattcagctatgacacgcttgaaattggcgaaaagaaacactacgatcataaggtggacgtttacagtttcgccattgttttctgggagttacttaccaacaaaaccccattcaaaggaaagaacaacatctttgtagcttatgctgccagcaaaaaccagagaccaagtgtggagaatcttccagaaggcgttgtttctatcctgcaatcatgctgggcagagaatcctgacgctcgtcctgagtttaaagaaattacatattcactaacaaacttgctcagaagcttaagctcagacactgatgctacttcatccaatagcaaagccaatatagctaccgaggattcaacaagcagtctggttcaagaacgtgttgtctgtgattgtcccggactaaagatgagcaagacgaagaagctgaagaagaagacgaataaactgatgaatatgatcgtcccttttctcaagatcttcaaaagttgtatgtccaagtga

SEQ ID NO: 74173 - protein, 405 aa, Arabidopsis thaliana
  peptide (1)..(405): Ceres Seq. ID no. 4995394
  misc_feature: Pfam Name: Pkinase_Tyr Pfam Description: Protein tyrosine kinase
  misc_feature (1)..(405): Homolog of NCBI NO: 15240070 NR Description: protein kinase ATN1-like protein; protein id:
  misc_feature (19)..(401): Homolog of NCBI NO: 15230295 NR Description: protein kinase ATN1 -like protein; protein id:
  misc_feature (38)..(400): Homolog of NCBI NO: 15230296 NR Description: protein kinase ATN1 - like protein; protein id:
  misc_feature (58)..(380): Homolog of NCBI NO: 15240630 NR Description: protein kinase ATN1-like protein; protein id:
  misc_feature (58)..(338): Homolog of NCBI NO: 32815816 NR Description: protein kinase [Cucumis sativus]
  misc_feature (52)..(339): Homolog of NCBI NO: 2129698 NR Description: protein kinase ATN1 (EC 2.7.1.-) - Arabidopsis
  misc_feature (52)..(339): Homolog of NCBI NO: 15232197 NR Description: putative protein kinase, ATN1; protein id: supported by cDNA: gi_16604327, supported by cDNA: gi_19699189 thaliana] >gi|11994183|dbj|BAB01286.1| nearly identical to
  misc_feature (52)..(357): Homolog of NCBI NO: 15237443 NR Description: protein kinase - like protein; protein id: [Arabidopsis thaliana] >gi|9758080|dbj|BAB08524.1| protein kinase
  misc_feature (60)..(361): Homolog of NCBI NO: 28876011 NR Description: putative protein kinase [Oryza sativa (japonica
  misc_feature (59)..(338): Homolog of NCBI NO: 30679428 NR Description: protein kinase, putative [Arabidopsis thaliana]
MRPRGYQRAPSMQKPTDYPTDKTLHPNYPFLMSSHGLKSFESDDEDDDSDSSNDQFAFTINTELLVDVKDISIGDFIGEGSSSTVYRGLFRRVVPVSVKIFQPKRTSALSIEQRKKFQREVLLLSKFRHENIVRFIGACIEPKLMIITELMEGNTLQKFMLSVRPKPLDLKLSISFALDIARGMEFLNANGIIHRDLKPSNMLLTGDQKHVKLADFGLAREETKGFMTFEAGTYRWMAPELFSYDTLEIGEKKHYDHKVDVYSFAIVFWELLTNKTPFKGKNNIFVAYAASKNQRPSVENLPEGVVSILQSCWAENPDARPEFKEITYSLTNLLRSLSSDTDATSSNSKANIATEDSTSSLVQERVVCDCPGLKMSKTKKLKKKTNKLMNMIVPFLKIFKSCMSK

SEQ ID NO: 74174 - protein, 394 aa, Arabidopsis thaliana
  peptide (1)..(394): Ceres Seq. ID no. 4995395
  misc_feature: Pfam Name: Pkinase_Tyr Pfam Description: Protein tyrosine kinase
  misc_feature (1)..(394): Homolog of NCBI NO: 15240070 NR Description: protein kinase ATN1-like protein; protein id:
  misc_feature (8)..(390): Homolog of NCBI NO: 15230295 NR Description: protein kinase ATN1 -like protein; protein id:
  misc_feature (27)..(389): Homolog of NCBI NO: 15230296 NR Description: protein kinase ATN1 - like protein; protein id:
  misc_feature (47)..(369): Homolog of NCBI NO: 15240630 NR Description: protein kinase ATN1-like protein; protein id:
  misc_feature (47)..(327): Homolog of NCBI NO: 32815816 NR Description: protein kinase [Cucumis sativus]
  misc_feature (41)..(328): Homolog of NCBI NO: 2129698 NR Description: protein kinase ATN1 (EC 2.7.1.-) - Arabidopsis
  misc_feature (41)..(328): Homolog of NCBI NO: 15232197 NR Description: putative protein kinase, ATN1; protein id: supported by cDNA: gi_16604327, supported by cDNA: gi_19699189 thaliana] >gi|11994183|dbj|BAB01286.1| nearly identical to
  misc_feature (41)..(346): Homolog of NCBI NO: 15237443 NR Description: protein kinase - like protein; protein id: [Arabidopsis thaliana] >gi|9758080|dbj|BAB08524.1| protein kinase
  misc_feature (49)..(350): Homolog of NCBI NO: 28876011 NR Description: putative protein kinase [Oryza sativa (japonica
  misc_feature (48)..(327): Homolog of NCBI NO: 30679428 NR Description: protein kinase, putative [Arabidopsis thaliana]
MQKPTDYPTDKTLHPNYPFLMSSHGLKSFESDDEDDDSDSSNDQFAFTINTELLVDVKDISIGDFIGEGSSSTVYRGLFRRVVPVSVKIFQPKRTSALSIEQRKKFQREVLLLSKFRHENIVRFIGACIEPKLMIITELMEGNTLQKFMLSVRPKPLDLKLSISFALDIARGMEFLNANGIIHRDLKPSNMLLTGDQKHVKLADFGLAREETKGFMTFEAGTYRWMAPELFSYDTLEIGEKKHYDHKVDVYSFAIVFWELLTNKTPFKGKNNIFVAYAASKNQRPSVENLPEGVVSILQSCWAENPDARPEFKEITYSLTNLLRSLSSDTDATSSNSKANIATEDSTSSLVQERVVCDCPGLKMSKTKKLKKKTNKLMNMIVPFLKIFKSCMSK

SEQ ID NO: 74175 - protein, 374 aa, Arabidopsis thaliana
  peptide (1)..(374): Ceres Seq. ID no. 4995396
  misc_feature: Pfam Name: Pkinase_Tyr Pfam Description: Protein tyrosine kinase
  misc_feature (1)..(374): Homolog of NCBI NO: 15240070 NR Description: protein kinase ATN1-like protein; protein id:
  misc_feature (1)..(370): Homolog of NCBI NO: 15230295 NR Description: protein kinase ATN1 -like protein; protein id:
  misc_feature (7)..(369): Homolog of NCBI NO: 15230296 NR Description: protein kinase ATN1 - like protein; protein id:
  misc_feature (27)..(349): Homolog of NCBI NO: 15240630 NR Description: protein kinase ATN1-like protein; protein id:
  misc_feature (27)..(307): Homolog of NCBI NO: 32815816 NR Description: protein kinase [Cucumis sativus]
  misc_feature (21)..(308): Homolog of NCBI NO: 2129698 NR Description: protein kinase ATN1 (EC 2.7.1.-) - Arabidopsis
  misc_feature (21)..(308): Homolog of NCBI NO: 15232197 NR Description: putative protein kinase, ATN1; protein id: supported by cDNA: gi_16604327, supported by cDNA: gi_19699189 thaliana] >gi|11994183|dbj|BAB01286.1| nearly identical to
  misc_feature (21)..(326): Homolog of NCBI NO: 15237443 NR Description: protein kinase - like protein; protein id: [Arabidopsis thaliana] >gi|9758080|dbj|BAB08524.1| protein kinase
  misc_feature (29)..(330): Homolog of NCBI NO: 28876011 NR Description: putative protein kinase [Oryza sativa (japonica
  misc_feature (28)..(307): Homolog of NCBI NO: 30679428 NR Description: protein kinase, putative [Arabidopsis thaliana]
MSSHGLKSFESDDEDDDSDSSNDQFAFTINTELLVDVKDISIGDFIGEGSSSTVYRGLFRRVVPVSVKIFQPKRTSALSIEQRKKFQREVLLLSKFRHENIVRFIGACIEPKLMIITELMEGNTLQKFMLSVRPKPLDLKLSISFALDIARGMEFLNANGIIHRDLKPSNMLLTGDQKHVKLADFGLAREETKGFMTFEAGTYRWMAPELFSYDTLEIGEKKHYDHKVDVYSFAIVFWELLTNKTPFKGKNNIFVAYAASKNQRPSVENLPEGVVSILQSCWAENPDARPEFKEITYSLTNLLRSLSSDTDATSSNSKANIATEDSTSSLVQERVVCDCPGLKMSKTKKLKKKTNKLMNMIVPFLKIFKSCMSK

SEQ ID NO: 74176 - DNA, 1869 bp, Arabidopsis thaliana
  misc_feature (1)..(1869): Ceres Seq. ID no. 4995409
  misc_feature: MA Experiment ID: 20000184 Result: Down-regulated in Transcription
  misc_feature: MA Experiment 20000184 PARAMETER Experiment Name: At_Shoots__P Parameter: Age (day) Value: 7
  misc_feature: MA Experiment 20000184 PARAMETER Experiment Name: At_Shoots__P Parameter: Tissue Value: Shoots vs. Whole Plant
  misc_feature: MA Experiment ID: 20000185 Result: Down-regulated in Transcription
  misc_feature: MA Experiment 20000185 PARAMETER Experiment Name: At_Roots__P Parameter: Age (day) Value: 7 vs. 21
  misc_feature: MA Experiment 20000185 PARAMETER Experiment Name: At_Roots__P Parameter: Organism Value: A. thaliana
  misc_feature: MA Experiment 20000185 PARAMETER Experiment Name: At_Roots__P Parameter: Tissue Value: Roots vs. Whole Plant
  misc_feature: MA Experiment ID: 20000227 Result: Down-regulated in Transcription
  misc_feature: MA Experiment 20000227 PARAMETER Experiment Name: At_Root-Tips-vs-Tops_P Parameter: Tissue Value: Root Tips vs. Root Tops
  misc_feature: MA Experiment ID: 20000234 Result: Down-regulated in Transcription
  misc_feature: MA Experiment 20000234 PARAMETER Experiment Name: At_Siliques_P Parameter: Age (day) Value: 21
  misc_feature: MA Experiment 20000234 PARAMETER Experiment Name: At_Siliques_P Parameter: Organism Value: A. thaliana
  misc_feature: MA Experiment 20000234 PARAMETER Experiment Name: At_Siliques_P Parameter: Plant Line Value: WS
  misc_feature: MA Experiment 20000234 PARAMETER Experiment Name: At_Siliques_P Parameter: Tissue Value: Less Than 5mm Siliques vs. Whole Plant
  misc_feature: MA Experiment ID: 20000235 Result: Down-regulated in Transcription
  misc_feature: MA Experiment 20000235 PARAMETER Experiment Name: At_Siliques_P Parameter: Age (day) Value: 21
  misc_feature: MA Experiment 20000235 PARAMETER Experiment Name: At_Siliques_P Parameter: Organism Value: A. thaliana
  misc_feature: MA Experiment 20000235 PARAMETER Experiment Name: At_Siliques_P Parameter: Plant Line Value: WS
  misc_feature: MA Experiment 20000235 PARAMETER Experiment Name: At_Siliques_P Parameter: Tissue Value: 5-10mm Siliques vs. Whole Plant
  misc_feature: MA Experiment ID: 20000264 Result: Down-regulated in Transcription
  misc_feature: MA Experiment 20000264 PARAMETER Experiment Name: At_Open_Flower_P Parameter: Age (day) Value: 21
  misc_feature: MA Experiment 20000264 PARAMETER Experiment Name: At_Open_Flower_P Parameter: Plant Line Value: WS
  misc_feature: MA Experiment 20000264 PARAMETER Experiment Name: At_Open_Flower_P Parameter: Tissue Value: Open Flower vs. Whole Plant
  misc_feature: MA Experiment ID: 20000437 Result: Up-regulated in Transcription
  misc_feature: MA Experiment 20000437 PARAMETER Experiment Name: At_Drought_P Parameter: Age (day) Value: 8
  misc_feature: MA Experiment 20000437 PARAMETER Experiment Name: At_Drought_P Parameter: Organism Value: A. thaliana
  misc_feature: MA Experiment 20000437 PARAMETER Experiment Name: At_Drought_P Parameter: Plant Line Value: WS
  misc_feature: MA Experiment 20000437 PARAMETER Experiment Name: At_Drought_P Parameter: Timepoint (hr) Value: 24
  misc_feature: MA Experiment 20000437 PARAMETER Experiment Name: At_Drought_P Parameter: Tissue Value: Whole Plant
  misc_feature: MA Experiment 20000437 PARAMETER Experiment Name: At_Drought_P Parameter: Treatment Value: Drought vs. No Drought
  misc_feature: MA Experiment ID: 20000438 Result: Down-regulated in Transcription
  misc_feature: MA Experiment 20000438 PARAMETER Experiment Name: At_Shoots__P Parameter: Age (day) Value: 14
  misc_feature: MA Experiment 20000438 PARAMETER Experiment Name: At_Shoots__P Parameter: Tissue Value: Shoots vs. Whole Plant
  misc_feature: MA Experiment ID: 20000439 Result: Down-regulated in Transcription
  misc_feature: MA Experiment 20000439 PARAMETER Experiment Name: At_Roots__P Parameter: Age (day) Value: 14 vs. 21
  misc_feature: MA Experiment 20000439 PARAMETER Experiment Name: At_Roots__P Parameter: Organism Value: A. thaliana
  misc_feature: MA Experiment 20000439 PARAMETER Experiment Name: At_Roots__P Parameter: Tissue Value: Roots vs. Whole Plant
  misc_feature: MA Experiment ID: 20000794 Result: Down-regulated in Transcription
  misc_feature: MA Experiment 20000794 PARAMETER Experiment Name: At_Petals_P Parameter: Age (day) Value: 23-25 days
  misc_feature: MA Experiment 20000794 PARAMETER Experiment Name: At_Petals_P Parameter: Plant Line Value: WS
  misc_feature: MA Experiment 20000794 PARAMETER Experiment Name: At_Petals_P Parameter: Tissue Value: Petals vs. Whole plant
  misc_feature: MA Experiment ID: 20001248 Result: Up-regulated in Transcription
  misc_feature: MA Experiment 20001248 PARAMETER Experiment Name: At_Far-red-induction_P Parameter: Age (day) Value: 7
  misc_feature: MA Experiment 20001248 PARAMETER Experiment Name: At_Far-red-induction_P Parameter: Light Value: Far-red vs. White
  misc_feature: MA Experiment 20001248 PARAMETER Experiment Name: At_Far-red-induction_P Parameter: Organism Value: A. thaliana
  misc_feature: MA Experiment 20001248 PARAMETER Experiment Name: At_Far-red-induction_P Parameter: Plant Line Value: Columbia
  misc_feature: MA Experiment 20001248 PARAMETER Experiment Name: At_Far-red-induction_P Parameter: Timepoint (hr) Value: 4
  misc_feature: MA Experiment 20001248 PARAMETER Experiment Name: At_Far-red-induction_P Parameter: Tissue Value: Whole Plant
  misc_feature: MA Experiment ID: 20001450 Result: Up-regulated in Transcription
  misc_feature: MA Experiment 20001450 PARAMETER Experiment Name: At_Far-red-induction_P Parameter: Age (day) Value: 7
  misc_feature: MA Experiment 20001450 PARAMETER Experiment Name: At_Far-red-induction_P Parameter: Light Value: Far-red vs. White
  misc_feature: MA Experiment 20001450 PARAMETER Experiment Name: At_Far-red-induction_P Parameter: Organism Value: A. thaliana
  misc_feature: MA Experiment 20001450 PARAMETER Experiment Name: At_Far-red-induction_P Parameter: Plant Line Value: Columbia
  misc_feature: MA Experiment 20001450 PARAMETER Experiment Name: At_Far-red-induction_P Parameter: Timepoint (hr) Value: 8
  misc_feature: MA Experiment 20001450 PARAMETER Experiment Name: At_Far-red-induction_P Parameter: Tissue Value: Whole Plant
  misc_feature: MA Experiment ID: 20001558 Result: Down-regulated in Transcription
  misc_feature: MA Experiment 20001558 PARAMETER Experiment Name: At_Drought_Soil_Dry_P Parameter: Age (day) Value: 27
  misc_feature: MA Experiment 20001558 PARAMETER Experiment Name: At_Drought_Soil_Dry_P Parameter: Organism Value: A. thaliana
  misc_feature: MA Experiment 20001558 PARAMETER Experiment Name: At_Drought_Soil_Dry_P Parameter: Plant Line Value: WS
  misc_feature: MA Experiment 20001558 PARAMETER Experiment Name: At_Drought_Soil_Dry_P Parameter: Post Timepoint (hr) Value: 6
  misc_feature: MA Experiment 20001558 PARAMETER Experiment Name: At_Drought_Soil_Dry_P Parameter: Post-Treatment Value: Re-Water vs. No Drought
  misc_feature: MA Experiment 20001558 PARAMETER Experiment Name: At_Drought_Soil_Dry_P Parameter: Timepoint (day) Value: 13
  misc_feature: MA Experiment 20001558 PARAMETER Experiment Name: At_Drought_Soil_Dry_P Parameter: Treatment Value: Drought vs. No Drought
  misc_feature: MA Experiment ID: 20001560 Result: Down-regulated in Transcription
  misc_feature: MA Experiment 20001560 PARAMETER Experiment Name: At_Drought_Soil_Dry_P Parameter: Age (day) Value: 28
  misc_feature: MA Experiment 20001560 PARAMETER Experiment Name: At_Drought_Soil_Dry_P Parameter: Organism Value: A. thaliana
  misc_feature: MA Experiment 20001560 PARAMETER Experiment Name: At_Drought_Soil_Dry_P Parameter: Plant Line Value: WS
  misc_feature: MA Experiment 20001560 PARAMETER Experiment Name: At_Drought_Soil_Dry_P Parameter: Post Timepoint (hr) Value: None
  misc_feature: MA Experiment 20001560 PARAMETER Experiment Name: At_Drought_Soil_Dry_P Parameter: Post-Treatment Value: None
  misc_feature: MA Experiment 20001560 PARAMETER Experiment Name: At_Drought_Soil_Dry_P Parameter: Timepoint (day) Value: 14
  misc_feature: MA Experiment 20001560 PARAMETER Experiment Name: At_Drought_Soil_Dry_P Parameter: Treatment Value: Drought vs. No Drought
  misc_feature: MA Experiment ID: 20001905 Result: Down-regulated in Transcription
  misc_feature: MA Experiment 20001905 PARAMETER Experiment Name: At_Drought_Reproduction_P Parameter: Age (day) Value: 40
  misc_feature: MA Experiment 20001905 PARAMETER Experiment Name: At_Drought_Reproduction_P Parameter: Organism Value: A. thaliana
  misc_feature: MA Experiment 20001905 PARAMETER Experiment Name: At_Drought_Reproduction_P Parameter: Plant Line Value: WS
  misc_feature: MA Experiment 20001905 PARAMETER Experiment Name: At_Drought_Reproduction_P Parameter: Timepoint (day) Value: 10
  misc_feature: MA Experiment 20001905 PARAMETER Experiment Name: At_Drought_Reproduction_P Parameter: Tissue Value: Rosettes
  misc_feature: MA Experiment 20001905 PARAMETER Experiment Name: At_Drought_Reproduction_P Parameter: Treatment Value: Drought vs. No Drought
atggcagaaactcctcaaccgtatctcatcttcgtcttcttcgtcttcactctaaccgttgctacacaaaccaccggttcggttaagtgcaaaacaagtttgctccgttacccgtttggtttctccgacggttatccgatccgattcaactgctctgagataaccggagaggccgtgatcggtgaattcgctgtgcaagaagtgacaaactccaacatctacgtcgaaatcccgccggtttgcaaacgcaacatccgtaaaatcgaacaacttttccgggaaaatcttgctccgtcgaaattacagaacataattctcgtccaaggatgcaagaaacagaacaagtcttctaattgcttaatccgcaataaattcgttgaaaaccggttaaatctcagcaaatgtaaatctccggttagctgtctcgacggagcaacaacgacaactgccgatgtgatgagtttaggcgacgttgtgaacggaagtggatgtaagtattggttctcttctatttctcaatcgcaagtttcggtcaatttgggtcgactcaagcttgattggtggcttaagggaagttgcagtaacaccacttgctcggagaacgcagactgtgccaaagttaagctcgacgacggtggactcggtcatcgctgcacttgtcgtgaaggatttagcggtaaagccttcaccgtgcctggtggttgccaccgattagtttacaaacgcaaaggactacacaaactcgttgttcttggtactgcggggattttggttggagttttagtaatcgtggtcttgatagctacatatttcttccggaacaagcaatctgcgtcatctgaaagagcatcaatcgcgaatcgcttgctttgcgagctagccggaaactcaagtgttcctttctacacctacaaagagattgagaaagctaccgatagtttctccgacaagaacatgctcggaaccggagcatacggaacagtctacgcaggcgaattcccaaacagctcatgcgtcgctataaaacgtctcaaacacaaagacactacaagcattgaccaagttgtgaacgagatcaagcttctttcctctgtgagccacccaaatctagtacgtctcttaggttgttgctttgcagatggagaaccgtttctagtctatgagttcatgccaaacggaactctttatcagcatttacaacacgagagaggccaaccaccactttcttggcagctccgactcgccattgcgtgtcaaaccgcaaacgcaatcgcacatctccactcttcagtaaaccctcctatctaccaccgagacataaaatctagtaacatcctccttgaccacgaattcaactccaagatatctgatttcggactctctaggctcggcatgtctaccgatttcgaagcctctcatatctccacggctccacaaggcactccaggatacttagatcctcaatatcaccaagattttcagctctcggacaagagtgatgtctatagctttggagttgttctcgtagaaatcatctcaggctttaaagtcatagacttcactcgtccctactctgaagtgaacctagcctctcttgccgtcgacaggatcggaagagggcgtgtggtagatatcatcgatccctgcttaaacaaagaaatcaatccgaaaatgtttgcatctatccacaacttagcagaattggcgtttcgctgcttatcctttcacagaaacatgaggcctacgatggtagaaattacggaagatctccaccggattaagcttatgcactatggtacagagtcaggtaagttcaaaaaccgatccgaaatagatatgaagagacaacaatcatttccgagagaatga

SEQ ID NO: 74177 - protein, 622 aa, Arabidopsis thaliana
  peptide (1)..(622): Ceres Seq. ID no. 4995410
  misc_feature (153)..(622): Homolog of NCBI NO: 30698255 NR Description: protein kinase family [Arabidopsis thaliana]
  misc_feature (29)..(595): Homolog of NCBI NO: 7486158 NR Description: probable protein kinase [imported] - Arabidopsis
  misc_feature (29)..(595): Homolog of NCBI NO: 18400282 NR Description: putative protein kinase; protein id: At2g23450.1, by cDNA: 19958., supported by cDNA: gi_19715596 [Arabidopsis >gi|20197000|gb|AAC23760.2| putative protein kinase [Arabidopsis
  misc_feature (29)..(595): Homolog of NCBI NO: 19715597 NR Description: At2g23450/F26B6.10 [Arabidopsis thaliana]
  misc_feature (30)..(595): Homolog of NCBI NO: 34902300 NR Description: Putative protein kinase [Oryza sativa (japonica group)] >gi|24308627|gb|AAN52750.1| Putative protein kinase
  misc_feature (183)..(593): Homolog of NCBI NO: 15241674 NR Description: putative protein kinase; protein id: At5g02070.1
  misc_feature (198)..(593): Homolog of NCBI NO: 15232348 NR Description: protein kinase-like protein; protein id:
  misc_feature (251)..(606): Homolog of NCBI NO: 34911340 NR Description: P0034C09.1 [Oryza sativa (japonica
  misc_feature (251)..(594): Homolog of NCBI NO: 15222572 NR Description: wall-associated kinase, putative; protein id: supported by cDNA: gi_15529241 [Arabidopsis thaliana]
  misc_feature (214)..(596): Homolog of NCBI NO: 15408730 NR Description: P0443D08.12 [Oryza sativa (japonica
MAETPQPYLIFVFFVFTLTVATQTTGSVKCKTSLLRYPFGFSDGYPIRFNCSEITGEAVIGEFAVQEVTNSNIYVEIPPVCKRNIRKIEQLFRENLAPSKLQNIILVQGCKKQNKSSNCLIRNKFVENRLNLSKCKSPVSCLDGATTTTADVMSLGDVVNGSGCKYWFSSISQSQVSVNLGRLKLDWWLKGSCSNTTCSENADCAKVKLDDGGLGHRCTCREGFSGKAFTVPGGCHRLVYKRKGLHKLVVLGTAGILVGVLVIVVLIATYFFRNKQSASSERASIANRLLCELAGNSSVPFYTYKEIEKATDSFSDKNMLGTGAYGTVYAGEFPNSSCVAIKRLKHKDTTSIDQVVNEIKLLSSVSHPNLVRLLGCCFADGEPFLVYEFMPNGTLYQHLQHERGQPPLSWQLRLAIACQTANAIAHLHSSVNPPIYHRDIKSSNILLDHEFNSKISDFGLSRLGMSTDFEASHISTAPQGTPGYLDPQYHQDFQLSDKSDVYSFGVVLVEIISGFKVIDFTRPYSEVNLASLAVDRIGRGRVVDIIDPCLNKEINPKMFASIHNLAELAFRCLSFHRNMRPTMVEITEDLHRIKLMHYGTESGKFKNRSEIDMKRQQSFPRE

SEQ ID NO: 74178 - protein, 470 aa, Arabidopsis thaliana
  peptide (1)..(470): Ceres Seq. ID no. 4995411
  misc_feature (1)..(470): Homolog of NCBI NO: 30698255 NR Description: protein kinase family [Arabidopsis thaliana]
  misc_feature (1)..(443): Homolog of NCBI NO: 7486158 NR Description: probable protein kinase [imported] - Arabidopsis
  misc_feature (1)..(443): Homolog of NCBI NO: 18400282 NR Description: putative protein kinase; protein id: At2g23450.1, by cDNA: 19958., supported by cDNA: gi_19715596 [Arabidopsis >gi|20197000|gb|AAC23760.2| putative protein kinase [Arabidopsis
  misc_feature (1)..(443): Homolog of NCBI NO: 19715597 NR Description: At2g23450/F26B6.10 [Arabidopsis thaliana]
  misc_feature (1)..(443): Homolog of NCBI NO: 34902300 NR Description: Putative protein kinase [Oryza sativa (japonica group)] >gi|24308627|gb|AAN52750.1| Putative protein kinase
  misc_feature (31)..(441): Homolog of NCBI NO: 15241674 NR Description: putative protein kinase; protein id: At5g02070.1
  misc_feature (46)..(441): Homolog of NCBI NO: 15232348 NR Description: protein kinase-like protein; protein id:
  misc_feature (99)..(454): Homolog of NCBI NO: 34911340 NR Description: P0034C09.1 [Oryza sativa (japonica
  misc_feature (99)..(442): Homolog of NCBI NO: 15222572 NR Description: wall-associated kinase, putative; protein id: supported by cDNA: gi_15529241 [Arabidopsis thaliana]
  misc_feature (62)..(444): Homolog of NCBI NO: 15408730 NR Description: P0443D08.12 [Oryza sativa (japonica
MSLGDVVNGSGCKYWFSSISQSQVSVNLGRLKLDWWLKGSCSNTTCSENADCAKVKLDDGGLGHRCTCREGFSGKAFTVPGGCHRLVYKRKGLHKLVVLGTAGILVGVLVIVVLIATYFFRNKQSASSERASIANRLLCELAGNSSVPFYTYKEIEKATDSFSDKNMLGTGAYGTVYAGEFPNSSCVAIKRLKHKDTTSIDQVVNEIKLLSSVSHPNLVRLLGCCFADGEPFLVYEFMPNGTLYQHLQHERGQPPLSWQLRLAIACQTANAIAHLHSSVNPPIYHRDIKSSNILLDHEFNSKISDFGLSRLGMSTDFEASHISTAPQGTPGYLDPQYHQDFQLSDKSDVYSFGVVLVEIISGFKVIDFTRPYSEVNLASLAVDRIGRGRVVDIIDPCLNKEINPKMFASIHNLAELAFRCLSFHRNMRPTMVEITEDLHRIKLMHYGTESGKFKNRSEIDMKRQQSFPRE

SEQ ID NO: 74179 - DNA, 1827 bp, Arabidopsis thaliana
  misc_feature (1)..(1827): Ceres Seq. ID no. 4995432
  misc_feature: MA Experiment ID: 20000355 Result: Up-regulated in Transcription
  misc_feature: MA Experiment 20000355 PARAMETER Experiment Name: At_Siliques_Sub_P Parameter: Age (day) Value: 21
  misc_feature: MA Experiment 20000355 PARAMETER Experiment Name: At_Siliques_Sub_P Parameter: Organism Value: A. thaliana
  misc_feature: MA Experiment 20000355 PARAMETER Experiment Name: At_Siliques_Sub_P Parameter: Plant Line Value: WS
  misc_feature: MA Experiment 20000355 PARAMETER Experiment Name: At_Siliques_Sub_P Parameter: Tissue Value: Less Than 5mm Siliques vs. Whole Plant
  misc_feature: MA Experiment ID: 20000440 Result: Up-regulated in Transcription
  misc_feature: MA Experiment 20000440 PARAMETER Experiment Name: At_Closed-Flower__Sub_P Parameter: Tissue Value: Closed Flower vs. Whole Plant
atgggggtggctcaagcaatggaagccctaaccgagcgagcaagtttgatgaaagagtctttgcataagagccagaccatcaccgataacatggtcggaatcttaggttctttcgatcatcgtctctcggctcttgaaaccgcaatgcgtcccacacaggttgtggaatttgagatctatcttctgttgaaattgaaatgtgattctggatttggtgataaaatgataagaacacattctataaggagagctcatgagaatattgacaaggcattgaaagcagctgaggttatattggatcaatttgatatctctagaaaggcggaagctaaaatattgagaggaccacatgaggatcttgaaagctatctggaagcaattgatcaactaagaggcactatcaaattcttcagcaacaacaaaatgttcaaaagtgctagtggagttattagtcatgctcacggtttactttctaaagctctatcaaagctagaagatgagttcagacagatactgcaaaactacagtaagccaatggaacctgatcgccttttcgaatgtcttccgagtaatcttcgaccatcatcagaaggtgaaggtggtggtggaaagactcatgatccccatcacaagagcttagaaaacgctatttttactgtcccaactgtcattcctccaagggttctgcctctgcttcatgacttagctcaacaaatggttcaagctggtcatcagcaacaacttttcaaatcttacagggatactcgagctgcggtgttggaacagagtttgaggaaattaggagtggagaggcttagcaaagatgatgttcagagaatgcaatgggaggtattagaggccaagattgggaattggatacattacatgagaatatccgtgaaactgttattcgccgcggaaaagaaaatctgcgaccaaattcttgatggtgttgagtctctcagagatcaatgttttggtgaggtcactgtaaatagtgtagctgtgctgcttagtttcggggaggctattgctaaaagcaagagatcacctgaaaaactgtttgttctgttagatatgtatgaaataatgagagagcttcagcctgagattgagttgctctttggaagcaaaccatgtgctgagatgaaagaatccgcgctgaatctgacaaagcggttagctcagacagctcaagaaacttttgctgattttgaagaagcggttgaaaaggatgctacgaaaaccgcggttatggatggaaccgttcatccacttactagctacgttataaattatgtcaagttcttgttcgattaccaaacgacgttgaggctactttttcaagagtttgatagtaaagatcctgatagcgagcttggagctgtaacaacgaggatcatgcacgctttacagaataatctggatgaaccagaaaagcctaaacataatcctgagttagagttacatttttcacagattttgcagtgtctcacggttcagtcgagtgggagcggtccgatagaaaactcaaatatatcaagagcatcagtaaaagacagattcaagactttcaattctcagtttgaagagcttcaccaaagacaatgccaatggacagttccggacagcgagttgcgtgaatctcttagacttgctgttgcggaagttcttttacctgctttcagatcgtttcttaaacgttttgggccgatgatagagagtggtaagaacccccagaagtatataaggtttagtcctgaagatcttgagagaatgcttaacgagttctttgaaggcaagacatggagtgagccaaagagataa

SEQ ID NO: 74180 - protein, 608 aa, Arabidopsis thaliana
  peptide (1)..(608): Ceres Seq. ID no. 4995433
  misc_feature (76)..(599): Pfam Name: Exo70 exocyst complex subunit Pfam Description: Exo70 exocyst complex subunit
  misc_feature (76)..(487): Homolog of NCBI NO: 22326587 NR Description: putative protein; protein id: At5g03540.1, by cDNA: gi_18176063 [Arabidopsis thaliana]
  misc_feature (491)..(608): Homolog of NCBI NO: 22326587 NR Description: putative protein; protein id: At5g03540.1, by cDNA: gi_18176063 [Arabidopsis thaliana]
  misc_feature (1)..(54): Homolog of NCBI NO: 22326587 NR Description: putative protein; protein id: At5g03540.1, by cDNA: gi_18176063 [Arabidopsis thaliana]
  misc_feature (68)..(490): Homolog of NCBI NO: 32488717 NR Description: OSJNBa0088H09.18 [Oryza sativa (japonica
  misc_feature (491)..(601): Homolog of NCBI NO: 32488717 NR Description: OSJNBa0088H09.18 [Oryza sativa (japonica
  misc_feature (7)..(54): Homolog of NCBI NO: 32488717 NR Description: OSJNBa0088H09.18 [Oryza sativa (japonica
  misc_feature (150)..(608): Homolog of NCBI NO: 15242974 NR Description: putative protein; protein id: At5g52350.1 thaliana] >gi|10177401|dbj|BAB10532.1|
  misc_feature (77)..(489): Homolog of NCBI NO: 32488716 NR Description: OSJNBa0088H09.17 [Oryza sativa (japonica
  misc_feature (508)..(605): Homolog of NCBI NO: 32488716 NR Description: OSJNBa0088H09.17 [Oryza sativa (japonica
  misc_feature (200)..(458): Homolog of NCBI NO: 30682979 NR Description: exocyst subunit EXO70 family [Arabidopsis >gi|9294634|dbj|BAB02973.1| gb|AAD25781.1~gene_id:MAG2.5~strong
MGVAQAMEALTERASLMKESLHKSQTITDNMVGILGSFDHRLSALETAMRPTQVVEFEIYLLLKLKCDSGFGDKMIRTHSIRRAHENIDKALKAAEVILDQFDISRKAEAKILRGPHEDLESYLEAIDQLRGTIKFFSNNKMFKSASGVISHAHGLLSKALSKLEDEFRQILQNYSKPMEPDRLFECLPSNLRPSSEGEGGGGKTHDPHHKSLENAIFTVPTVIPPRVLPLLHDLAQQMVQAGHQQQLFKSYRDTRAAVLEQSLRKLGVERLSKDDVQRMQWEVLEAKIGNWIHYMRISVKLLFAAEKKICDQILDGVESLRDQCFGEVTVNSVAVLLSFGEAIAKSKRSPEKLFVLLDMYEIMRELQPEIELLFGSKPCAEMKESALNLTKRLAQTAQETFADFEEAVEKDATKTAVMDGTVHPLTSYVINYVKFLFDYQTTLRLLFQEFDSKDPDSELGAVTTRIMHALQNNLDEPEKPKHNPELELHFSQILQCLTVQSSGSGPIENSNISRASVKDRFKTFNSQFEELHQRQCQWTVPDSELRESLRLAVAEVLLPAFRSFLKRFGPMIESGKNPQKYIRFSPEDLERMLNEFFEGKTWSEPKR

SEQ ID NO: 74181 - protein, 602 aa, Arabidopsis thaliana
  peptide (1)..(602): Ceres Seq. ID no. 4995434
  misc_feature (70)..(593): Pfam Name: Exo70 exocyst complex subunit Pfam Description: Exo70 exocyst complex subunit
  misc_feature (70)..(481): Homolog of NCBI NO: 22326587 NR Description: putative protein; protein id: At5g03540.1, by cDNA: gi_18176063 [Arabidopsis thaliana]
  misc_feature (485)..(602): Homolog of NCBI NO: 22326587 NR Description: putative protein; protein id: At5g03540.1, by cDNA: gi_18176063 [Arabidopsis thaliana]
  misc_feature (1)..(48): Homolog of NCBI NO: 22326587 NR Description: putative protein; protein id: At5g03540.1, by cDNA: gi_18176063 [Arabidopsis thaliana]
  misc_feature (62)..(484): Homolog of NCBI NO: 32488717 NR Description: OSJNBa0088H09.18 [Oryza sativa (japonica
  misc_feature (485)..(595): Homolog of NCBI NO: 32488717 NR Description: OSJNBa0088H09.18 [Oryza sativa (japonica
  misc_feature (1)..(48): Homolog of NCBI NO: 32488717 NR Description: OSJNBa0088H09.18 [Oryza sativa (japonica
  misc_feature (144)..(602): Homolog of NCBI NO: 15242974 NR Description: putative protein; protein id: At5g52350.1 thaliana] >gi|10177401|dbj|BAB10532.1|
  misc_feature (71)..(483): Homolog of NCBI NO: 32488716 NR Description: OSJNBa0088H09.17 [Oryza sativa (japonica
  misc_feature (502)..(599): Homolog of NCBI NO: 32488716 NR Description: OSJNBa0088H09.17 [Oryza sativa (japonica
  misc_feature (194)..(452): Homolog of NCBI NO: 30682979 NR Description: exocyst subunit EXO70 family [Arabidopsis >gi|9294634|dbj|BAB02973.1| gb|AAD25781.1~gene_id:MAG2.5~strong
MEALTERASLMKESLHKSQTITDNMVGILGSFDHRLSALETAMRPTQVVEFEIYLLLKLKCDSGFGDKMIRTHSIRRAHENIDKALKAAEVILDQFDISRKAEAKILRGPHEDLESYLEAIDQLRGTIKFFSNNKMFKSASGVISHAHGLLSKALSKLEDEFRQILQNYSKPMEPDRLFECLPSNLRPSSEGEGGGGKTHDPHHKSLENAIFTVPTVIPPRVLPLLHDLAQQMVQAGHQQQLFKSYRDTRAAVLEQSLRKLGVERLSKDDVQRMQWEVLEAKIGNWIHYMRISVKLLFAAEKKICDQILDGVESLRDQCFGEVTVNSVAVLLSFGEAIAKSKRSPEKLFVLLDMYEIMRELQPEIELLFGSKPCAEMKESALNLTKRLAQTAQETFADFEEAVEKDATKTAVMDGTVHPLTSYVINYVKFLFDYQTTLRLLFQEFDSKDPDSELGAVTTRIMHALQNNLDEPEKPKHNPELELHFSQILQCLTVQSSGSGPIENSNISRASVKDRFKTFNSQFEELHQRQCQWTVPDSELRESLRLAVAEVLLPAFRSFLKRFGPMIESGKNPQKYIRFSPEDLERMLNEFFEGKTWSEPKR

SEQ ID NO: 74182 - protein, 592 aa, Arabidopsis thaliana
  peptide (1)..(592): Ceres Seq. ID no. 4995435
  misc_feature (60)..(583): Pfam Name: Exo70 exocyst complex subunit Pfam Description: Exo70 exocyst complex subunit
  misc_feature (60)..(471): Homolog of NCBI NO: 22326587 NR Description: putative protein; protein id: At5g03540.1, by cDNA: gi_18176063 [Arabidopsis thaliana]
  misc_feature (475)..(592): Homolog of NCBI NO: 22326587 NR Description: putative protein; protein id: At5g03540.1, by cDNA: gi_18176063 [Arabidopsis thaliana]
  misc_feature (1)..(38): Homolog of NCBI NO: 22326587 NR Description: putative protein; protein id: At5g03540.1, by cDNA: gi_18176063 [Arabidopsis thaliana]
  misc_feature (52)..(474): Homolog of NCBI NO: 32488717 NR Description: OSJNBa0088H09.18 [Oryza sativa (japonica
  misc_feature (475)..(585): Homolog of NCBI NO: 32488717 NR Description: OSJNBa0088H09.18 [Oryza sativa (japonica
  misc_feature (1)..(38): Homolog of NCBI NO: 32488717 NR Description: OSJNBa0088H09.18 [Oryza sativa (japonica
  misc_feature (134)..(592): Homolog of NCBI NO: 15242974 NR Description: putative protein; protein id: At5g52350.1 thaliana] >gi|10177401|dbj|BAB10532.1|
  misc_feature (61)..(473): Homolog of NCBI NO: 32488716 NR Description: OSJNBa0088H09.17 [Oryza sativa (japonica
  misc_feature (492)..(589): Homolog of NCBI NO: 32488716 NR Description: OSJNBa0088H09.17 [Oryza sativa (japonica
  misc_feature (184)..(442): Homolog of NCBI NO: 30682979 NR Description: exocyst subunit EXO70 family [Arabidopsis >gi|9294634|dbj|BAB02973.1| gb|AAD25781.1~gene_id:MAG2.5~strong
MKESLHKSQTITDNMVGILGSFDHRLSALETAMRPTQVVEFEIYLLLKLKCDSGFGDKMIRTHSIRRAHENIDKALKAAEVILDQFDISRKAEAKILRGPHEDLESYLEAIDQLRGTIKFFSNNKMFKSASGVISHAHGLLSKALSKLEDEFRQILQNYSKPMEPDRLFECLPSNLRPSSEGEGGGGKTHDPHHKSLENAIFTVPTVIPPRVLPLLHDLAQQMVQAGHQQQLFKSYRDTRAAVLEQSLRKLGVERLSKDDVQRMQWEVLEAKIGNWIHYMRISVKLLFAAEKKICDQILDGVESLRDQCFGEVTVNSVAVLLSFGEAIAKSKRSPEKLFVLLDMYEIMRELQPEIELLFGSKPCAEMKESALNLTKRLAQTAQETFADFEEAVEKDATKTAVMDGTVHPLTSYVINYVKFLFDYQTTLRLLFQEFDSKDPDSELGAVTTRIMHALQNNLDEPEKPKHNPELELHFSQILQCLTVQSSGSGPIENSNISRASVKDRFKTFNSQFEELHQRQCQWTVPDSELRESLRLAVAEVLLPAFRSFLKRFGPMIESGKNPQKYIRFSPEDLERMLNEFFEGKTWSEPKR

SEQ ID NO: 74183 - DNA, 1329 bp, Arabidopsis thaliana
  misc_feature (1)..(1329): Ceres Seq. ID no. 4995464
  misc_feature: MA Experiment ID: 20000794 Result: Up-regulated in Transcription
  misc_feature: MA Experiment 20000794 PARAMETER Experiment Name: At_Petals_P Parameter: Age (day) Value: 23-25 days
  misc_feature: MA Experiment 20000794 PARAMETER Experiment Name: At_Petals_P Parameter: Plant Line Value: WS
  misc_feature: MA Experiment 20000794 PARAMETER Experiment Name: At_Petals_P Parameter: Tissue Value: Petals vs. Whole plant
atgggcacaactagggtctgctcggaggtttcttctggatcttcgaaatcgcttagccaatctctcacggtatcgacctctaccacagaaacagtcaatggtttccatgaattcaagatctgtgggtactctctcgctaaaggtgttggtgtcggcaaatacgtcgcttccgatacgtttatggtcggtggttactcgtgggcaatctacttttatccagatgggaagagtccggaggataactcgtcttacgtttctttgttcatagctcttgctagcgaaggagctgatgttagggctttgtttgagctcacgcttgtggatcagagtggtaatgggaagcataaggttcatagccattttggtagagctctcgatagcggtccctatactctcaagtatcgtggaagcatgtggggatacaagcggtttttcaggaggtccagtctagaatcgtcggattatttgaaggagaatagtctcttggttaggtgccgtgtgggtgtggtgaagtcagttacggagggaccgaggtattacaatatccctgtgccagtttctaacttgggacaacagttgggaaatttattggagagtgggaaaggctgtgatgttgttttccaagttgatggagaaaccttcaacgcacacaaattggttcttgcaacgcgttccccggttttcaacgcacagctttttggccctttaggagaccgaaataccaaatgcataacgatagaagacatggaagcacccattttcaaggtcctccctttaactctcttgctgattgtctattcacggatgtaccatccgggatcttctcctggggcgctactcctattctcgagtttactcacccgggataaggtattgctccattttatctactgggacgaattgcctgatatgcaagagttaataggaacagactctacattggcgtctactcttgtggctcagcatctactagcagcggcagaccgttatgctcttgagcggcttaaagcaatctgtgagtcaaaactctgtgaaggggttgccataaacacggttgcaactactttggccctagcagagcagcatcattgtttgcagctaaaagcagtgtgtctcaaattcgtggcactgccagagaacctgaaagctgtgatgcaaacagatgggtttgattatctgaaagagagttgcccatctttactaacggagctattgcagtatgtggcgaggctaagtgaacactctgttatagtatctggacatcgaaaagaaatatttgccgatggttgtgacgcgagtggaagacgagtgaagccccggttgcactga

SEQ ID NO: 74184 - protein, 442 aa, Arabidopsis thaliana
  peptide (1)..(442): Ceres Seq. ID no. 4995465
  misc_feature (40)..(169): Pfam Name: MATH domain Pfam Description: MATH domain
  misc_feature (1)..(442): Homolog of NCBI NO: 15239625 NR Description: putative protein; protein id: At5g19000.1
  misc_feature (1)..(339): Homolog of NCBI NO: 22531225 NR Description: putative protein [Arabidopsis thaliana]
  misc_feature (1)..(376): Homolog of NCBI NO: 18397497 NR Description: expressed protein; protein id: At3g06190.1, by cDNA: gi_15028068, supported by cDNA: gi_20259304 [Arabidopsis >gi|6862923|gb|AAF30312.1|AC018907_12 unknown protein
  misc_feature (8)..(376): Homolog of NCBI NO: 23617108 NR Description: contains ESTs to Arabidopsis thaliana chromosome 5, At5g19000~unknown protein
  misc_feature (23)..(401): Homolog of NCBI NO: 18405153 NR Description: expressed protein; protein id: At2g39760.1, by cDNA: 8256. [Arabidopsis thaliana] >gi|7487697|pir||T01006
  misc_feature (23)..(401): Homolog of NCBI NO: 21595740 NR Description: unknown [Arabidopsis thaliana]
  misc_feature (19)..(376): Homolog of NCBI NO: 21536509 NR Description: unknown [Arabidopsis thaliana]
  misc_feature (19)..(376): Homolog of NCBI NO: 30678912 NR Description: expressed protein [Arabidopsis thaliana] unknown protein [Arabidopsis thaliana] AT3g03740/F20H23_23 [Arabidopsis thaliana]
  misc_feature (10)..(402): Homolog of NCBI NO: 14596183 NR Description: Unknown protein [Arabidopsis thaliana]
  misc_feature (10)..(376): Homolog of NCBI NO: 15242126 NR Description: hypothetical protein (fragment); protein id: supported by cDNA: 113260., supported by cDNA: gi_14596182
MGTTRVCSEVSSGSSKSLSQSLTVSTSTTETVNGFHEFKICGYSLAKGVGVGKYVASDTFMVGGYSWAIYFYPDGKSPEDNSSYVSLFIALASEGADVRALFELTLVDQSGNGKHKVHSHFGRALDSGPYTLKYRGSMWGYKRFFRRSSLESSDYLKENSLLVRCRVGVVKSVTEGPRYYNIPVPVSNLGQQLGNLLESGKGCDVVFQVDGETFNAHKLVLATRSPVFNAQLFGPLGDRNTKCITIEDMEAPIFKVLPLTLLLIVYSRMYHPGSSPGALLLFSSLLTRDKVLLHFIYWDELPDMQELIGTDSTLASTLVAQHLLAAADRYALERLKAICESKLCEGVAINTVATTLALAEQHHCLQLKAVCLKFVALPENLKAVMQTDGFDYLKESCPSLLTELLQYVARLSEHSVIVSGHRKEIFADGCDASGRRVKPRLH

SEQ ID NO: 74185 - protein, 382 aa, Arabidopsis thaliana
  peptide (1)..(382): Ceres Seq. ID no. 4995466
  misc_feature (1)..(109): Pfam Name: MATH domain Pfam Description: MATH domain
  misc_feature (1)..(382): Homolog of NCBI NO: 15239625 NR Description: putative protein; protein id: At5g19000.1
  misc_feature (1)..(279): Homolog of NCBI NO: 22531225 NR Description: putative protein [Arabidopsis thaliana]
  misc_feature (1)..(316): Homolog of NCBI NO: 18397497 NR Description: expressed protein; protein id: At3g06190.1, by cDNA: gi_15028068, supported by cDNA: gi_20259304 [Arabidopsis >gi|6862923|gb|AAF30312.1|AC018907_12 unknown protein
  misc_feature (1)..(316): Homolog of NCBI NO: 23617108 NR Description: contains ESTs to Arabidopsis thaliana chromosome 5, At5g19000~unknown protein
  misc_feature (1)..(341): Homolog of NCBI NO: 18405153 NR Description: expressed protein; protein id: At2g39760.1, by cDNA: 8256. [Arabidopsis thaliana] >gi|7487697|pir||T01006
  misc_feature (1)..(341): Homolog of NCBI NO: 21595740 NR Description: unknown [Arabidopsis thaliana]
  misc_feature (1)..(316): Homolog of NCBI NO: 21536509 NR Description: unknown [Arabidopsis thaliana]
  misc_feature (1)..(316): Homolog of NCBI NO: 30678912 NR Description: expressed protein [Arabidopsis thaliana] unknown protein [Arabidopsis thaliana] AT3g03740/F20H23_23 [Arabidopsis thaliana]
  misc_feature (1)..(342): Homolog of NCBI NO: 14596183 NR Description: Unknown protein [Arabidopsis thaliana]
  misc_feature (1)..(316): Homolog of NCBI NO: 15242126 NR Description: hypothetical protein (fragment); protein id: supported by cDNA: 113260., supported by cDNA: gi_14596182
MVGGYSWAIYFYPDGKSPEDNSSYVSLFIALASEGADVRALFELTLVDQSGNGKHKVHSHFGRALDSGPYTLKYRGSMWGYKRFFRRSSLESSDYLKENSLLVRCRVGVVKSVTEGPRYYNIPVPVSNLGQQLGNLLESGKGCDVVFQVDGETFNAHKLVLATRSPVFNAQLFGPLGDRNTKCITIEDMEAPIFKVLPLTLLLIVYSRMYHPGSSPGALLLFSSLLTRDKVLLHFIYWDELPDMQELIGTDSTLASTLVAQHLLAAADRYALERLKAICESKLCEGVAINTVATTLALAEQHHCLQLKAVCLKFVALPENLKAVMQTDGFDYLKESCPSLLTELLQYVARLSEHSVIVSGHRKEIFADGCDASGRRVKPRLH

SEQ ID NO: 74186 - protein, 305 aa, Arabidopsis thaliana
  peptide (1)..(305): Ceres Seq. ID no. 4995467
  misc_feature (56)..(120): Pfam Name: BTB/POZ domain Pfam Description: BTB/POZ domain
  misc_feature (1)..(305): Homolog of NCBI NO: 15239625 NR Description: putative protein; protein id: At5g19000.1
  misc_feature (1)..(202): Homolog of NCBI NO: 22531225 NR Description: putative protein [Arabidopsis thaliana]
  misc_feature (1)..(239): Homolog of NCBI NO: 18397497 NR Description: expressed protein; protein id: At3g06190.1, by cDNA: gi_15028068, supported by cDNA: gi_20259304 [Arabidopsis >gi|6862923|gb|AAF30312.1|AC018907_12 unknown protein
  misc_feature (1)..(239): Homolog of NCBI NO: 23617108 NR Description: contains ESTs to Arabidopsis thaliana chromosome 5, At5g19000~unknown protein
  misc_feature (1)..(264): Homolog of NCBI NO: 18405153 NR Description: expressed protein; protein id: At2g39760.1, by cDNA: 8256. [Arabidopsis thaliana] >gi|7487697|pir||T01006
  misc_feature (1)..(264): Homolog of NCBI NO: 21595740 NR Description: unknown [Arabidopsis thaliana]
  misc_feature (1)..(239): Homolog of NCBI NO: 21536509 NR Description: unknown [Arabidopsis thaliana]
  misc_feature (1)..(239): Homolog of NCBI NO: 30678912 NR Description: expressed protein [Arabidopsis thaliana] unknown protein [Arabidopsis thaliana] AT3g03740/F20H23_23 [Arabidopsis thaliana]
  misc_feature (1)..(265): Homolog of NCBI NO: 14596183 NR Description: Unknown protein [Arabidopsis thaliana]
  misc_feature (1)..(239): Homolog of NCBI NO: 15242126 NR Description: hypothetical protein (fragment); protein id: supported by cDNA: 113260., supported by cDNA: gi_14596182
MWGYKRFFRRSSLESSDYLKENSLLVRCRVGVVKSVTEGPRYYNIPVPVSNLGQQLGNLLESGKGCDVVFQVDGETFNAHKLVLATRSPVFNAQLFGPLGDRNTKCITIEDMEAPIFKVLPLTLLLIVYSRMYHPGSSPGALLLFSSLLTRDKVLLHFIYWDELPDMQELIGTDSTLASTLVAQHLLAAADRYALERLKAICESKLCEGVAINTVATTLALAEQHHCLQLKAVCLKFVALPENLKAVMQTDGFDYLKESCPSLLTELLQYVARLSEHSVIVSGHRKEIFADGCDASGRRVKPRLH

SEQ ID NO: 74187 - DNA, 789 bp, Arabidopsis thaliana
  misc_feature (1)..(789): Ceres Seq. ID no. 4995515
  misc_feature: MA Experiment ID: 20000234 Result: Down-regulated in Transcription
  misc_feature: MA Experiment 20000234 PARAMETER Experiment Name: At_Siliques_P Parameter: Age (day) Value: 21
  misc_feature: MA Experiment 20000234 PARAMETER Experiment Name: At_Siliques_P Parameter: Organism Value: A. thaliana
  misc_feature: MA Experiment 20000234 PARAMETER Experiment Name: At_Siliques_P Parameter: Plant Line Value: WS
  misc_feature: MA Experiment 20000234 PARAMETER Experiment Name: At_Siliques_P Parameter: Tissue Value: Less Than 5mm Siliques vs. Whole Plant
  misc_feature: MA Experiment ID: 20000235 Result: Down-regulated in Transcription
  misc_feature: MA Experiment 20000235 PARAMETER Experiment Name: At_Siliques_P Parameter: Age (day) Value: 21
  misc_feature: MA Experiment 20000235 PARAMETER Experiment Name: At_Siliques_P Parameter: Organism Value: A. thaliana
  misc_feature: MA Experiment 20000235 PARAMETER Experiment Name: At_Siliques_P Parameter: Plant Line Value: WS
  misc_feature: MA Experiment 20000235 PARAMETER Experiment Name: At_Siliques_P Parameter: Tissue Value: 5-10mm Siliques vs. Whole Plant
  misc_feature: MA Experiment ID: 20000264 Result: Down-regulated in Transcription
  misc_feature: MA Experiment 20000264 PARAMETER Experiment Name: At_Open_Flower_P Parameter: Age (day) Value: 21
  misc_feature: MA Experiment 20000264 PARAMETER Experiment Name: At_Open_Flower_P Parameter: Plant Line Value: WS
  misc_feature: MA Experiment 20000264 PARAMETER Experiment Name: At_Open_Flower_P Parameter: Tissue Value: Open Flower vs. Whole Plant
  misc_feature: MA Experiment ID: 20000265 Result: Down-regulated in Transcription
  misc_feature: MA Experiment 20000265 PARAMETER Experiment Name: At_Open_Flower_P Parameter: Age (day) Value: 21
  misc_feature: MA Experiment 20000265 PARAMETER Experiment Name: At_Open_Flower_P Parameter: Plant Line Value: WS
  misc_feature: MA Experiment 20000265 PARAMETER Experiment Name: At_Open_Flower_P Parameter: Tissue Value: Closed Flower vs. Whole Plant
  misc_feature: MA Experiment ID: 20000286 Result: Down-regulated in Transcription
  misc_feature: MA Experiment 20000286 PARAMETER Experiment Name: At_Open_Flower_P Parameter: Age (day) Value: 21
  misc_feature: MA Experiment 20000286 PARAMETER Experiment Name: At_Open_Flower_P Parameter: Plant Line Value: WS
  misc_feature: MA Experiment 20000286 PARAMETER Experiment Name: At_Open_Flower_P Parameter: Tissue Value: Half Open vs. Whole Plant
  misc_feature: MA Experiment ID: 20000451 Result: Up-regulated in Transcription
  misc_feature: MA Experiment 20000451 PARAMETER Experiment Name: At_CS6879_Shoots-Roots_P Parameter: Age (day) Value: 14
  misc_feature: MA Experiment 20000451 PARAMETER Experiment Name: At_CS6879_Shoots-Roots_P Parameter: Organism Value: A. thaliana
  misc_feature: MA Experiment 20000451 PARAMETER Experiment Name: At_CS6879_Shoots-Roots_P Parameter: Plant Line Value: CS6879 vs. WS
  misc_feature: MA Experiment 20000451 PARAMETER Experiment Name: At_CS6879_Shoots-Roots_P Parameter: Tissue Value: Roots
  misc_feature: MA Experiment ID: 20000452 Result: Up-regulated in Transcription
  misc_feature: MA Experiment 20000452 PARAMETER Experiment Name: At_CS6879_Shoots-Roots_P Parameter: Age (day) Value: 14
  misc_feature: MA Experiment 20000452 PARAMETER Experiment Name: At_CS6879_Shoots-Roots_P Parameter: Organism Value: A. thaliana
  misc_feature: MA Experiment 20000452 PARAMETER Experiment Name: At_CS6879_Shoots-Roots_P Parameter: Plant Line Value: CS6879 vs. WS
  misc_feature: MA Experiment 20000452 PARAMETER Experiment Name: At_CS6879_Shoots-Roots_P Parameter: Tissue Value: Shoots
  misc_feature: MA Experiment ID: 20000574 Result: Down-regulated in Transcription
  misc_feature: MA Experiment 20000574 PARAMETER Experiment Name: At_100uM_ABA_Mutants__P Parameter: Organism Value: A. thaliana
  misc_feature: MA Experiment 20000574 PARAMETER Experiment Name: At_100uM_ABA_Mutants__P Parameter: Plant Line Value: CS23 vs. Ler wt
  misc_feature: MA Experiment 20000574 PARAMETER Experiment Name: At_100uM_ABA_Mutants__P Parameter: Timepoint (hr) Value: N/A
  misc_feature: MA Experiment 20000574 PARAMETER Experiment Name: At_100uM_ABA_Mutants__P Parameter: Tissue Value: Whole Plant
  misc_feature: MA Experiment 20000574 PARAMETER Experiment Name: At_100uM_ABA_Mutants__P Parameter: Treatment Value: None
atggcgttcacgtggggatctgctctccggatttctgttctccttatccttgtagctgcaattgtcttagcttgttattttctccctgttgagaagctattgaaggattttttgttatgggttgaacaagatctagggccttggggaccttttgccctagctgttgcgtacattcctctaacagttttggctgttcctgcctcggttctcacgctcggtggtggctacctttttgggctgccaattggttttgtggcggactcagtcggtgctacacttggctcaggagctgcatttctactaggccgtacgattggaaaaccttttgtagttgcaaaattaaaggattatcctcagtttcaatcagtggcactcgcgatagagaaatccggcttcaagcatgttgaactacctcttatctgtcacgccaattcggctaggtccatacttgctttcttcgtgccaataacacttgcgttagtgtatgttggaacaactctaaaagacctttctgatgtaactcacaagtggagcgagttctcgccaggtcgctgggcgttcttgatttcgagccttgtaatatccgtgatattaatggtgtgtgttacaaaggtggcgaaggacgctctaagaaaagctttagcagagcacggaggagacatgaacgaagcggttgcagccttgccggagctgaccgttactgatgatgcttcgacggatttaaatgagcctctcttgataaagatagatgcacaacaacctcaagaccaagtaaaccatagtcattaa

SEQ ID NO: 74188 - protein, 262 aa, Arabidopsis thaliana
  peptide (1)..(262): Ceres Seq. ID no. 4995516
  misc_feature (46)..(131): Pfam Name: DedA family Pfam Description: DedA family
  misc_feature (1)..(133): Homolog of NCBI NO: 30687125 NR Description: expressed protein [Arabidopsis thaliana]
  misc_feature (154)..(262): Homolog of NCBI NO: 30687125 NR Description: expressed protein [Arabidopsis thaliana]
  misc_feature (1)..(137): Homolog of NCBI NO: 40823094 NR Description: At1g03260 [Arabidopsis thaliana]
  misc_feature (154)..(250): Homolog of NCBI NO: 40823094 NR Description: At1g03260 [Arabidopsis thaliana]
  misc_feature (1)..(174): Homolog of NCBI NO: 30678508 NR Description: expressed protein [Arabidopsis thaliana]
  misc_feature (150)..(250): Homolog of NCBI NO: 30678508 NR Description: expressed protein [Arabidopsis thaliana]
  misc_feature (1)..(174): Homolog of NCBI NO: 25406732 NR Description: protein F15K9.14 [imported] - Arabidopsis
  misc_feature (150)..(250): Homolog of NCBI NO: 25406732 NR Description: protein F15K9.14 [imported] - Arabidopsis
  misc_feature (1)..(250): Homolog of NCBI NO: 23617115 NR Description: contains EST AU173803(R3795)~integral membrane
  misc_feature (7)..(141): Homolog of NCBI NO: 23128176 NR Description: hypothetical protein [Nostoc punctiforme]
MAFTWGSALRISVLLILVAAIVLACYFLPVEKLLKDFLLWVEQDLGPWGPFALAVAYIPLTVLAVPASVLTLGGGYLFGLPIGFVADSVGATLGSGAAFLLGRTIGKPFVVAKLKDYPQFQSVALAIEKSGFKHVELPLICHANSARSILAFFVPITLALVYVGTTLKDLSDVTHKWSEFSPGRWAFLISSLVISVILMVCVTKVAKDALRKALAEHGGDMNEAVAALPELTVTDDASTDLNEPLLIKIDAQQPQDQVNHSH

SEQ ID NO: 74189 - DNA, 1872 bp, Arabidopsis thaliana
  misc_feature (1)..(1872): Ceres Seq. ID no. 4995660
  misc_feature: MA Experiment ID: 20000327 Result: Up-regulated in Transcription
  misc_feature: MA Experiment 20000327 PARAMETER Experiment Name: At_42deg_Heat_Sub_P Parameter: Age (day) Value: 14
  misc_feature: MA Experiment 20000327 PARAMETER Experiment Name: At_42deg_Heat_Sub_P Parameter: Organism Value: A. thaliana
  misc_feature: MA Experiment 20000327 PARAMETER Experiment Name: At_42deg_Heat_Sub_P Parameter: Plant Line Value: WS
  misc_feature: MA Experiment 20000327 PARAMETER Experiment Name: At_42deg_Heat_Sub_P Parameter: Temperature (deg C) Value: 42 vs. 22
  misc_feature: MA Experiment 20000327 PARAMETER Experiment Name: At_42deg_Heat_Sub_P Parameter: Timepoint (hr) Value: 1
  misc_feature: MA Experiment 20000327 PARAMETER Experiment Name: At_42deg_Heat_Sub_P Parameter: Tissue Value: Aerial
  misc_feature: MA Experiment ID: 20000328 Result: Up-regulated in Transcription
  misc_feature: MA Experiment 20000328 PARAMETER Experiment Name: At_42deg_Heat_Sub_P Parameter: Age (day) Value: 14
  misc_feature: MA Experiment 20000328 PARAMETER Experiment Name: At_42deg_Heat_Sub_P Parameter: Organism Value: A. thaliana
  misc_feature: MA Experiment 20000328 PARAMETER Experiment Name: At_42deg_Heat_Sub_P Parameter: Plant Line Value: WS
  misc_feature: MA Experiment 20000328 PARAMETER Experiment Name: At_42deg_Heat_Sub_P Parameter: Temperature (deg C) Value: 42 vs. 22
  misc_feature: MA Experiment 20000328 PARAMETER Experiment Name: At_42deg_Heat_Sub_P Parameter: Timepoint (hr) Value: 6
  misc_feature: MA Experiment 20000328 PARAMETER Experiment Name: At_42deg_Heat_Sub_P Parameter: Tissue Value: Aerial
atgctttttaatttgaacgatgaggcaagaattattgggatctcagggatgatcggttcagggaaaaccattcttgccaaggagcttgcgcgggacgaggaggtccgaggccattttgcgaaccgagttttgtttctgactgtgtcacaatctcccaatcttgaggagctgagatcccttatacgggattttcttactggtcatgaggctggctttggtaccgctcttccggaatccgttggtcatacacggaagctagtgatccttgatgatgttaggacaagggaatctctagaccagctgatgttcaatattcctggaaccacaacgcttgtggtctcacagtctaaactcgtagatcctagaaccacctatgatgtagagttattaaatgaacatgacgcaacatctctgttctgtctctctgctttcaaccagaaatcagttccttcagggttcagcaaaagtttggtcaagcaggttgttggggagtctaaaggtctacctttgtctctgaaagtccttggcgcttcattaaacgatcgacctgaaacatattgggcaattgcagtggagaggttatcaagaggtgaacctgttgatgaaactcatgagagtaaagtgtttgctcaaatcgaagcaactctagaaaatctcgatccaaaaaccaaagagtgtttcttggatatgggtgctttccctgaaggcaagaaaatccctgttgatgttctcatcaacatgttggtcaagatacatgatcttgaggacgcagccgcctttgatgttcttgttgatctagcaaataggaatcttcttactctcgtgaaagatccaacgtttgtcgctatgggcactagctactatgatatattcgtgacgcagcacgatgttttaagagatgtagcacttcatcttaccaatcgtggaaaagtaagtagaagagaccgcttattgatgccaaaaagagagaccatgcttcccagcgaatgggagaggagcaatgatgagccatacaatgcacgagtggtttccattcacacaggagaaatgactgagatggactggtttgacatggatttccccaaggcagaagttctgatagtaaacttctcttcagacaactatgtattgcctcctttcattgctaagatgggaatgcttagggtgttcgtgattataaacaacggtacctctccagcgcatctacatgacttccccatccctaccagtttgaccaatctaaggagtctctggcttgagagggttcatgtccctgaactctctagcagtatgatacccttgaaaaacctccacaagctatatctgattatttgcaagatcaataacagttttgatcagacagccatagacattgcccaaatcttcccaaaattgactgatatcacaatagattattgcgatgatcttgcggaactaccttcgaccatctgtggaataacctctctcaactccatcagcataacaaattgtcccaacatcaaggagttaccgaagaatataagtaagctacaagcccttcaacttttgaggctatacgcttgcccagagctaaaatctctgcctgtggaaatctgtgaattgccaagactagtgtatgtcgacatctctcactgtctcagcctaagttctcttccggaaaagataggaaatgtaaggacacttgagaaaatcgacatgagagaatgtagcttatcgagcataccaagttccgcagtttcattgacttccctatgctatgtaacatgctatagagaggctttgtggatgtggaaagaggttgagaaggcagttcccggacttcgtattgaagctactgaaaaatggttcaacatgacttggcccgacgagtag

SEQ ID NO: 74190 - protein, 623 aa, Arabidopsis thaliana
  peptide (1)..(623): Ceres Seq. ID no. 4995661
  misc_feature (119)..(249): Pfam Name: NB-ARC domain Pfam Description: NB-ARC domain
  misc_feature (1)..(623): Homolog of NCBI NO: 15238281 NR Description: disease resistance protein (CC-NBS-LRR class), protein id: At5g04720.1, supported by cDNA: gi_15292720,
  misc_feature (1)..(623): Homolog of NCBI NO: 30689664 NR Description: disease resistance protein (CC-NBS-LRR class),
  misc_feature (1)..(623): Homolog of NCBI NO: 30692890 NR Description: disease resistance protein (CC-NBS-LRR class),
  misc_feature (1)..(623): Homolog of NCBI NO: 25403197 NR Description: probable disease resistance protein [imported] - thaliana >gi|10998939|gb|AAG26078.1|AC069299_4 disease resistance putative [Arabidopsis thaliana]
  misc_feature (346)..(623): Homolog of NCBI NO: 7485661 NR Description: hypothetical protein F17M5.60 - Arabidopsis >gi|4490297|emb|CAB38788.1| putative protein [Arabidopsis >gi|7270278|emb|CAB80047.1| putative protein [Arabidopsis
  misc_feature (103)..(349): Homolog of NCBI NO: 7485661 NR Description: hypothetical protein F17M5.60 - Arabidopsis >gi|4490297|emb|CAB38788.1| putative protein [Arabidopsis >gi|7270278|emb|CAB80047.1| putative protein [Arabidopsis
  misc_feature (1)..(160): Homolog of NCBI NO: 7485661 NR Description: hypothetical protein F17M5.60 - Arabidopsis >gi|4490297|emb|CAB38788.1| putative protein [Arabidopsis >gi|7270278|emb|CAB80047.1| putative protein [Arabidopsis
  misc_feature (155)..(623): Homolog of NCBI NO: 21655203 NR Description: NBS/LRR [Pinus taeda]
  misc_feature (5)..(618): Homolog of NCBI NO: 15240126 NR Description: disease resistance protein (CC-NBS-LRR class), protein id: At5g66900.1 [Arabidopsis thaliana]
  misc_feature (11)..(618): Homolog of NCBI NO: 15240127 NR Description: disease resistance protein (CC-NBS-LRR class), protein id: At5g66910.1, supported by cDNA: gi_18087525
MLFNLNDEARIIGISGMIGSGKTILAKELARDEEVRGHFANRVLFLTVSQSPNLEELRSLIRDFLTGHEAGFGTALPESVGHTRKLVILDDVRTRESLDQLMFNIPGTTTLVVSQSKLVDPRTTYDVELLNEHDATSLFCLSAFNQKSVPSGFSKSLVKQVVGESKGLPLSLKVLGASLNDRPETYWAIAVERLSRGEPVDETHESKVFAQIEATLENLDPKTKECFLDMGAFPEGKKIPVDVLINMLVKIHDLEDAAAFDVLVDLANRNLLTLVKDPTFVAMGTSYYDIFVTQHDVLRDVALHLTNRGKVSRRDRLLMPKRETMLPSEWERSNDEPYNARVVSIHTGEMTEMDWFDMDFPKAEVLIVNFSSDNYVLPPFIAKMGMLRVFVIINNGTSPAHLHDFPIPTSLTNLRSLWLERVHVPELSSSMIPLKNLHKLYLIICKINNSFDQTAIDIAQIFPKLTDITIDYCDDLAELPSTICGITSLNSISITNCPNIKELPKNISKLQALQLLRLYACPELKSLPVEICELPRLVYVDISHCLSLSSLPEKIGNVRTLEKIDMRECSLSSIPSSAVSLTSLCYVTCYREALWMWKEVEKAVPGLRIEATEKWFNMTWPDE

SEQ ID NO: 74191 - protein, 607 aa, Arabidopsis thaliana
  peptide (1)..(607): Ceres Seq. ID no. 4995662
  misc_feature (103)..(233): Pfam Name: NB-ARC domain Pfam Description: NB-ARC domain
  misc_feature (1)..(607): Homolog of NCBI NO: 15238281 NR Description: disease resistance protein (CC-NBS-LRR class), protein id: At5g04720.1, supported by cDNA: gi_15292720,
  misc_feature (1)..(607): Homolog of NCBI NO: 30689664 NR Description: disease resistance protein (CC-NBS-LRR class),
  misc_feature (1)..(607): Homolog of NCBI NO: 30692890 NR Description: disease resistance protein (CC-NBS-LRR class),
  misc_feature (1)..(607): Homolog of NCBI NO: 25403197 NR Description: probable disease resistance protein [imported] - thaliana >gi|10998939|gb|AAG26078.1|AC069299_4 disease resistance putative [Arabidopsis thaliana]
  misc_feature (330)..(607): Homolog of NCBI NO: 7485661 NR Description: hypothetical protein F17M5.60 - Arabidopsis >gi|4490297|emb|CAB38788.1| putative protein [Arabidopsis >gi|7270278|emb|CAB80047.1| putative protein [Arabidopsis
  misc_feature (87)..(333): Homolog of NCBI NO: 7485661 NR Description: hypothetical protein F17M5.60 - Arabidopsis >gi|4490297|emb|CAB38788.1| putative protein [Arabidopsis >gi|7270278|emb|CAB80047.1| putative protein [Arabidopsis
  misc_feature (1)..(144): Homolog of NCBI NO: 7485661 NR Description: hypothetical protein F17M5.60 - Arabidopsis >gi|4490297|emb|CAB38788.1| putative protein [Arabidopsis >gi|7270278|emb|CAB80047.1| putative protein [Arabidopsis
  misc_feature (139)..(607): Homolog of NCBI NO: 21655203 NR Description: NBS/LRR [Pinus taeda]
  misc_feature (1)..(602): Homolog of NCBI NO: 15240126 NR Description: disease resistance protein (CC-NBS-LRR class), protein id: At5g66900.1 [Arabidopsis thaliana]
  misc_feature (1)..(602): Homolog of NCBI NO: 15240127 NR Description: disease resistance protein (CC-NBS-LRR class), protein id: At5g66910.1, supported by cDNA: gi_18087525
MIGSGKTILAKELARDEEVRGHFANRVLFLTVSQSPNLEELRSLIRDFLTGHEAGFGTALPESVGHTRKLVILDDVRTRESLDQLMFNIPGTTTLVVSQSKLVDPRTTYDVELLNEHDATSLFCLSAFNQKSVPSGFSKSLVKQVVGESKGLPLSLKVLGASLNDRPETYWAIAVERLSRGEPVDETHESKVFAQIEATLENLDPKTKECFLDMGAFPEGKKIPVDVLINMLVKIHDLEDAAAFDVLVDLANRNLLTLVKDPTFVAMGTSYYDIFVTQHDVLRDVALHLTNRGKVSRRDRLLMPKRETMLPSEWERSNDEPYNARVVSIHTGEMTEMDWFDMDFPKAEVLIVNFSSDNYVLPPFIAKMGMLRVFVIINNGTSPAHLHDFPIPTSLTNLRSLWLERVHVPELSSSMIPLKNLHKLYLIICKINNSFDQTAIDIAQIFPKLTDITIDYCDDLAELPSTICGITSLNSISITNCPNIKELPKNISKLQALQLLRLYACPELKSLPVEICELPRLVYVDISHCLSLSSLPEKIGNVRTLEKIDMRECSLSSIPSSAVSLTSLCYVTCYREALWMWKEVEKAVPGLRIEATEKWFNMTWPDE

SEQ ID NO: 74192 - protein, 522 aa, Arabidopsis thaliana
  peptide (1)..(522): Ceres Seq. ID no. 4995663
  misc_feature (18)..(148): Pfam Name: NB-ARC domain Pfam Description: NB-ARC domain
  misc_feature (1)..(522): Homolog of NCBI NO: 15238281 NR Description: disease resistance protein (CC-NBS-LRR class), protein id: At5g04720.1, supported by cDNA: gi_15292720,
  misc_feature (1)..(522): Homolog of NCBI NO: 30689664 NR Description: disease resistance protein (CC-NBS-LRR class),
  misc_feature (1)..(522): Homolog of NCBI NO: 30692890 NR Description: disease resistance protein (CC-NBS-LRR class),
  misc_feature (1)..(522): Homolog of NCBI NO: 25403197 NR Description: probable disease resistance protein [imported] - thaliana >gi|10998939|gb|AAG26078.1|AC069299_4 disease resistance putative [Arabidopsis thaliana]
  misc_feature (245)..(522): Homolog of NCBI NO: 7485661 NR Description: hypothetical protein F17M5.60 - Arabidopsis >gi|4490297|emb|CAB38788.1| putative protein [Arabidopsis >gi|7270278|emb|CAB80047.1| putative protein [Arabidopsis
  misc_feature (2)..(248): Homolog of NCBI NO: 7485661 NR Description: hypothetical protein F17M5.60 - Arabidopsis >gi|4490297|emb|CAB38788.1| putative protein [Arabidopsis >gi|7270278|emb|CAB80047.1| putative protein [Arabidopsis
  misc_feature (1)..(59): Homolog of NCBI NO: 7485661 NR Description: hypothetical protein F17M5.60 - Arabidopsis >gi|4490297|emb|CAB38788.1| putative protein [Arabidopsis >gi|7270278|emb|CAB80047.1| putative protein [Arabidopsis
  misc_feature (54)..(522): Homolog of NCBI NO: 21655203 NR Description: NBS/LRR [Pinus taeda]
  misc_feature (1)..(517): Homolog of NCBI NO: 15240126 NR Description: disease resistance protein (CC-NBS-LRR class), protein id: At5g66900.1 [Arabidopsis thaliana]
  misc_feature (1)..(517): Homolog of NCBI NO: 15240127 NR Description: disease resistance protein (CC-NBS-LRR class), protein id: At5g66910.1, supported by cDNA: gi_18087525
MFNIPGTTTLVVSQSKLVDPRTTYDVELLNEHDATSLFCLSAFNQKSVPSGFSKSLVKQVVGESKGLPLSLKVLGASLNDRPETYWAIAVERLSRGEPVDETHESKVFAQIEATLENLDPKTKECFLDMGAFPEGKKIPVDVLINMLVKIHDLEDAAAFDVLVDLANRNLLTLVKDPTFVAMGTSYYDIFVTQHDVLRDVALHLTNRGKVSRRDRLLMPKRETMLPSEWERSNDEPYNARVVSIHTGEMTEMDWFDMDFPKAEVLIVNFSSDNYVLPPFIAKMGMLRVFVIINNGTSPAHLHDFPIPTSLTNLRSLWLERVHVPELSSSMIPLKNLHKLYLIICKINNSFDQTAIDIAQIFPKLTDITIDYCDDLAELPSTICGITSLNSISITNCPNIKELPKNISKLQALQLLRLYACPELKSLPVEICELPRLVYVDISHCLSLSSLPEKIGNVRTLEKIDMRECSLSSIPSSAVSLTSLCYVTCYREALWMWKEVEKAVPGLRIEATEKWFNMTWPDE

SEQ ID NO: 74193 - DNA, 477 bp, Arabidopsis thaliana
  misc_feature (1)..(477): Ceres Seq. ID no. 4995888
  misc_feature: MA Experiment ID: 20000173 Result: Down-regulated in Transcription
  misc_feature: MA Experiment 20000173 PARAMETER Experiment Name: At_42deg_Heat_P Parameter: Age (day) Value: 14
  misc_feature: MA Experiment 20000173 PARAMETER Experiment Name: At_42deg_Heat_P Parameter: Organism Value: A. thaliana
  misc_feature: MA Experiment 20000173 PARAMETER Experiment Name: At_42deg_Heat_P Parameter: Plant Line Value: WS
  misc_feature: MA Experiment 20000173 PARAMETER Experiment Name: At_42deg_Heat_P Parameter: Temperature (deg C) Value: 42 vs. 22
  misc_feature: MA Experiment 20000173 PARAMETER Experiment Name: At_42deg_Heat_P Parameter: Timepoint (hr) Value: 6
  misc_feature: MA Experiment 20000173 PARAMETER Experiment Name: At_42deg_Heat_P Parameter: Tissue Value: Aerial
  misc_feature: MA Experiment ID: 20000235 Result: Up-regulated in Transcription
  misc_feature: MA Experiment 20000235 PARAMETER Experiment Name: At_Siliques_P Parameter: Age (day) Value: 21
  misc_feature: MA Experiment 20000235 PARAMETER Experiment Name: At_Siliques_P Parameter: Organism Value: A. thaliana
  misc_feature: MA Experiment 20000235 PARAMETER Experiment Name: At_Siliques_P Parameter: Plant Line Value: WS
  misc_feature: MA Experiment 20000235 PARAMETER Experiment Name: At_Siliques_P Parameter: Tissue Value: 5-10mm Siliques vs. Whole Plant
  misc_feature: MA Experiment ID: 20001905 Result: Down-regulated in Transcription
  misc_feature: MA Experiment 20001905 PARAMETER Experiment Name: At_Drought_Reproduction_P Parameter: Age (day) Value: 40
  misc_feature: MA Experiment 20001905 PARAMETER Experiment Name: At_Drought_Reproduction_P Parameter: Organism Value: A. thaliana
  misc_feature: MA Experiment 20001905 PARAMETER Experiment Name: At_Drought_Reproduction_P Parameter: Plant Line Value: WS
  misc_feature: MA Experiment 20001905 PARAMETER Experiment Name: At_Drought_Reproduction_P Parameter: Timepoint (day) Value: 10
  misc_feature: MA Experiment 20001905 PARAMETER Experiment Name: At_Drought_Reproduction_P Parameter: Tissue Value: Rosettes
  misc_feature: MA Experiment 20001905 PARAMETER Experiment Name: At_Drought_Reproduction_P Parameter: Treatment Value: Drought vs. No Drought
atggctctactgcaatatcaacgcgagaatctccattatctcagtgaagaggtgacaatccatggaatatttatcatgagtacttcatttctgaatcttgatgcttgtgatattctgcgtttgcaggagtccttaagtaaatatgaaacgaatggtagtagcacgcctcaggttgatctggcgcatcttgtggcaactcgagatcaggaattacgaacactatctgctgaggtggatcaactccattcagagcttaatctcgctcgatctctgatctctgagagagatagagagatacaacacgtccggaataccaataatcagtatgtagcagaaaatgaaaggttaagagctattcttggagaatggagtatgcgagctgcaaagcttgaacgagctctggaggtggagagaatatcaaatattgaactgcggaagaaagtttcagctctcagagaccagaggcaggtggcatga

SEQ ID NO: 74194 - protein, 158 aa, Arabidopsis thaliana
  peptide (1)..(158): Ceres Seq. ID no. 4995889
  misc_feature (1)..(158): Homolog of NCBI NO: 15242018 NR Description: putative protein; protein id: At5g20580.1
  misc_feature (37)..(157): Homolog of NCBI NO: 18396221 NR Description: Expressed protein; protein id: At2g06005.1, by cDNA: 253548. [Arabidopsis thaliana] Expressed protein [Arabidopsis thaliana]
  misc_feature (37)..(157): Homolog of NCBI NO: 20453094 NR Description: At2g06010/F5K7.23 [Arabidopsis thaliana]
  misc_feature (6)..(112): Homolog of NCBI NO: 25411202 NR Description: hypothetical protein At2g06010 [imported] -
MALLQYQRENLHYLSEEVTIHGIFIMSTSFLNLDACDILRLQESLSKYETNGSSTPQVDLAHLVATRDQELRTLSAEVDQLHSELNLARSLISERDREIQHVRNTNNQYVAENERLRAILGEWSMRAAKLERALEVERISNIELRKKVSALRDQRQVA

SEQ ID NO: 74195 - protein, 133 aa, Arabidopsis thaliana
  peptide (1)..(133): Ceres Seq. ID no. 4995890
  misc_feature (1)..(133): Homolog of NCBI NO: 15242018 NR Description: putative protein; protein id: At5g20580.1
  misc_feature (12)..(132): Homolog of NCBI NO: 18396221 NR Description: Expressed protein; protein id: At2g06005.1, by cDNA: 253548. [Arabidopsis thaliana] Expressed protein [Arabidopsis thaliana]
  misc_feature (12)..(132): Homolog of NCBI NO: 20453094 NR Description: At2g06010/F5K7.23 [Arabidopsis thaliana]
  misc_feature (1)..(87): Homolog of NCBI NO: 25411202 NR Description: hypothetical protein At2g06010 [imported] -
MSTSFLNLDACDILRLQESLSKYETNGSSTPQVDLAHLVATRDQELRTLSAEVDQLHSELNLARSLISERDREIQHVRNTNNQYVAENERLRAILGEWSMRAAKLERALEVERISNIELRKKVSALRDQRQVA

SEQ ID NO: 74196 - DNA, 1095 bp, Arabidopsis thaliana
  misc_feature (1)..(1095): Ceres Seq. ID no. 4995940
  misc_feature: MA Experiment ID: 20000171 Result: Up-regulated in Transcription
  misc_feature: MA Experiment 20000171 PARAMETER Experiment Name: At_42deg_Heat_P Parameter: Age (day) Value: 14
  misc_feature: MA Experiment 20000171 PARAMETER Experiment Name: At_42deg_Heat_P Parameter: Organism Value: A. thaliana
  misc_feature: MA Experiment 20000171 PARAMETER Experiment Name: At_42deg_Heat_P Parameter: Plant Line Value: WS
  misc_feature: MA Experiment 20000171 PARAMETER Experiment Name: At_42deg_Heat_P Parameter: Temperature (deg C) Value: 42 vs. 22
  misc_feature: MA Experiment 20000171 PARAMETER Experiment Name: At_42deg_Heat_P Parameter: Timepoint (hr) Value: 1
  misc_feature: MA Experiment 20000171 PARAMETER Experiment Name: At_42deg_Heat_P Parameter: Tissue Value: Aerial
  misc_feature: MA Experiment ID: 20000264 Result: Up-regulated in Transcription
  misc_feature: MA Experiment 20000264 PARAMETER Experiment Name: At_Open_Flower_P Parameter: Age (day) Value: 21
  misc_feature: MA Experiment 20000264 PARAMETER Experiment Name: At_Open_Flower_P Parameter: Plant Line Value: WS
  misc_feature: MA Experiment 20000264 PARAMETER Experiment Name: At_Open_Flower_P Parameter: Tissue Value: Open Flower vs. Whole Plant
  misc_feature: MA Experiment ID: 20000794 Result: Up-regulated in Transcription
  misc_feature: MA Experiment 20000794 PARAMETER Experiment Name: At_Petals_P Parameter: Age (day) Value: 23-25 days
  misc_feature: MA Experiment 20000794 PARAMETER Experiment Name: At_Petals_P Parameter: Plant Line Value: WS
  misc_feature: MA Experiment 20000794 PARAMETER Experiment Name: At_Petals_P Parameter: Tissue Value: Petals vs. Whole plant
atgcaatttttttgtgtaaatttgtatcgatcggtgctcaatctccttgaggagaggatgaagacggagatgatagaagagatggtgatagtaggaggtttagtaatggttcaatttgtatacgcaggcaattctttgctcatgagttatttgatgtcactcggtcttggccctttcaccattgtcatcttttctacattcgccactttcataatcctctcccctttcgccattctcttcgaaaggaagcaatggccaaatgagcttagcttgaggctgattggtaagctagttttgatctcctttgcaggggttactctgttccagtctctgtttctagaaggaatcaggttgacatcaccagcaatggcaacagcgatgccaaatcttgctcctggtctcatttttttcatcgcttggatcgttgggttagagaagatgaatctgaaatgtgtgtacagcaagttgaagatcttagggacattgttgtgcgtatttggcgctttagctatgagcgtaatgcacagcacttcgatcagtcacaaagaagaagatgacactccaatattcgtctttgatcgagacaaggtcgttggatgtatctaccttcttggagccgtctttgttttatccaccaacgtcgttcttcaggcgtcaacgttggcagagttcccggcaccgatatcgttaagtgcaataacggcattactaggagtgttgataacaacggtggtactactattacaaaaccgaaaaacaaaagtacttgccagttcattaattagtttcggtaacctcgttggttattctgtcctggcaggggcagtgagtggagcatgtgttagctttaatggatgggccatgaagaaacgtggaccggttttcgtttcaatgtttagtcctttcgctaccgttatttcggttgctttcgccgttttgacattaggagagtccgttagccttggaagtgtgggagggatggtgttgatgttcgtagggctataccttgtgttatgggctaaaggcaaagaagggttctctgaaattgagagttttgagagtgagttcgactctaagaagcctcttttgtcttga

SEQ ID NO: 74197 - protein, 364 aa, Arabidopsis thaliana
  peptide (1)..(364): Ceres Seq. ID no. 4995941
  misc_feature (39)..(173): Pfam Name: Integral membrane protein DUF6 Pfam Description: Integral membrane protein DUF6
  misc_feature (1)..(364): Homolog of NCBI NO: 15238103 NR Description: nodulin-like protein; protein id: At5g47470.1
  misc_feature (8)..(336): Homolog of NCBI NO: 7488131 NR Description: probable membrane protein - Arabidopsis thaliana membrane protein homolog [Arabidopsis thaliana]
  misc_feature (323)..(363): Homolog of NCBI NO: 7488131 NR Description: probable membrane protein - Arabidopsis thaliana membrane protein homolog [Arabidopsis thaliana]
  misc_feature (20)..(336): Homolog of NCBI NO: 22328726 NR Description: membrane protein homolog; protein id: At4g16620.1
  misc_feature (323)..(363): Homolog of NCBI NO: 22328726 NR Description: membrane protein homolog; protein id: At4g16620.1
  misc_feature (25)..(252): Homolog of NCBI NO: 34897744 NR Description: Similar to Arabidopsis thaliana DNA chromosome 4, I contig fragment No. 6, membrane protein homolog. (Z97341)
  misc_feature (26)..(242): Homolog of NCBI NO: 22775675 NR Description: nodulin-like protein [Oryza sativa (japonica
  misc_feature (34)..(344): Homolog of NCBI NO: 15234742 NR Description: nodulin-like protein; protein id: At4g30420.1
  misc_feature (34)..(362): Homolog of NCBI NO: 15225480 NR Description: nodulin-like protein; protein id: At2g39510.1
  misc_feature (17)..(363): Homolog of NCBI NO: 9294076 NR Description: nodulin-like protein [Arabidopsis thaliana]
MQFFCVNLYRSVLNLLEERMKTEMIEEMVIVGGLVMVQFVYAGNSLLMSYLMSLGLGPFTIVIFSTFATFIILSPFAILFERKQWPNELSLRLIGKLVLISFAGVTLFQSLFLEGIRLTSPAMATAMPNLAPGLIFFIAWIVGLEKMNLKCVYSKLKILGTLLCVFGALAMSVMHSTSISHKEEDDTPIFVFDRDKVVGCIYLLGAVFVLSTNVVLQASTLAEFPAPISLSAITALLGVLITTVVLLLQNRKTKVLASSLISFGNLVGYSVLAGAVSGACVSFNGWAMKKRGPVFVSMFSPFATVISVAFAVLTLGESVSLGSVGGMVLMFVGLYLVLWAKGKEGFSEIESFESEFDSKKPLLS

SEQ ID NO: 74198 - protein, 345 aa, Arabidopsis thaliana
  peptide (1)..(345): Ceres Seq. ID no. 4995942
  misc_feature (20)..(154): Pfam Name: Integral membrane protein DUF6 Pfam Description: Integral membrane protein DUF6
  misc_feature (1)..(345): Homolog of NCBI NO: 15238103 NR Description: nodulin-like protein; protein id: At5g47470.1
  misc_feature (1)..(317): Homolog of NCBI NO: 7488131 NR Description: probable membrane protein - Arabidopsis thaliana membrane protein homolog [Arabidopsis thaliana]
  misc_feature (304)..(344): Homolog of NCBI NO: 7488131 NR Description: probable membrane protein - Arabidopsis thaliana membrane protein homolog [Arabidopsis thaliana]
  misc_feature (1)..(317): Homolog of NCBI NO: 22328726 NR Description: membrane protein homolog; protein id: At4g16620.1
  misc_feature (304)..(344): Homolog of NCBI NO: 22328726 NR Description: membrane protein homolog; protein id: At4g16620.1
  misc_feature (6)..(233): Homolog of NCBI NO: 34897744 NR Description: Similar to Arabidopsis thaliana DNA chromosome 4, I contig fragment No. 6, membrane protein homolog. (Z97341)
  misc_feature (7)..(223): Homolog of NCBI NO: 22775675 NR Description: nodulin-like protein [Oryza sativa (japonica
  misc_feature (15)..(325): Homolog of NCBI NO: 15234742 NR Description: nodulin-like protein; protein id: At4g30420.1
  misc_feature (15)..(343): Homolog of NCBI NO: 15225480 NR Description: nodulin-like protein; protein id: At2g39510.1
  misc_feature (1)..(344): Homolog of NCBI NO: 9294076 NR Description: nodulin-like protein [Arabidopsis thaliana]
MKTEMIEEMVIVGGLVMVQFVYAGNSLLMSYLMSLGLGPFTIVIFSTFATFIILSPFAILFERKQWPNELSLRLIGKLVLISFAGVTLFQSLFLEGIRLTSPAMATAMPNLAPGLIFFIAWIVGLEKMNLKCVYSKLKILGTLLCVFGALAMSVMHSTSISHKEEDDTPIFVFDRDKVVGCIYLLGAVFVLSTNVVLQASTLAEFPAPISLSAITALLGVLITTVVLLLQNRKTKVLASSLISFGNLVGYSVLAGAVSGACVSFNGWAMKKRGPVFVSMFSPFATVISVAFAVLTLGESVSLGSVGGMVLMFVGLYLVLWAKGKEGFSEIESFESEFDSKKPLLS

SEQ ID NO: 74199 - protein, 341 aa, Arabidopsis thaliana
  peptide (1)..(341): Ceres Seq. ID no. 4995943
  misc_feature (16)..(150): Pfam Name: Integral membrane protein DUF6 Pfam Description: Integral membrane protein DUF6
  misc_feature (1)..(341): Homolog of NCBI NO: 15238103 NR Description: nodulin-like protein; protein id: At5g47470.1
  misc_feature (1)..(313): Homolog of NCBI NO: 7488131 NR Description: probable membrane protein - Arabidopsis thaliana membrane protein homolog [Arabidopsis thaliana]
  misc_feature (300)..(340): Homolog of NCBI NO: 7488131 NR Description: probable membrane protein - Arabidopsis thaliana membrane protein homolog [Arabidopsis thaliana]
  misc_feature (1)..(313): Homolog of NCBI NO: 22328726 NR Description: membrane protein homolog; protein id: At4g16620.1
  misc_feature (300)..(340): Homolog of NCBI NO: 22328726 NR Description: membrane protein homolog; protein id: At4g16620.1
  misc_feature (2)..(229): Homolog of NCBI NO: 34897744 NR Description: Similar to Arabidopsis thaliana DNA chromosome 4, I contig fragment No. 6, membrane protein homolog. (Z97341)
  misc_feature (3)..(219): Homolog of NCBI NO: 22775675 NR Description: nodulin-like protein [Oryza sativa (japonica
  misc_feature (11)..(321): Homolog of NCBI NO: 15234742 NR Description: nodulin-like protein; protein id: At4g30420.1
  misc_feature (11)..(339): Homolog of NCBI NO: 15225480 NR Description: nodulin-like protein; protein id: At2g39510.1
  misc_feature (1)..(340): Homolog of NCBI NO: 9294076 NR Description: nodulin-like protein [Arabidopsis thaliana]
MIEEMVIVGGLVMVQFVYAGNSLLMSYLMSLGLGPFTIVIFSTFATFIILSPFAILFERKQWPNELSLRLIGKLVLISFAGVTLFQSLFLEGIRLTSPAMATAMPNLAPGLIFFIAWIVGLEKMNLKCVYSKLKILGTLLCVFGALAMSVMHSTSISHKEEDDTPIFVFDRDKVVGCIYLLGAVFVLSTNVVLQASTLAEFPAPISLSAITALLGVLITTVVLLLQNRKTKVLASSLISFGNLVGYSVLAGAVSGACVSFNGWAMKKRGPVFVSMFSPFATVISVAFAVLTLGESVSLGSVGGMVLMFVGLYLVLWAKGKEGFSEIESFESEFDSKKPLLS

SEQ ID NO: 74200 - DNA, 1618 bp, Arabidopsis thaliana
  misc_feature (1)..(1618): Ceres Seq. ID no. 4996480
  misc_feature: MA Experiment ID: 108462 Result: Down-regulated in Transcription
  misc_feature: MA Experiment 108462 PARAMETER Experiment Name: At_Germinating_Seeds_cDNA_P Parameter: Age (day) Value: 2 vs. 0
  misc_feature: MA Experiment 108462 PARAMETER Experiment Name: At_Germinating_Seeds_cDNA_P Parameter: Tissue Value: Germinating Seeds
  misc_feature: MA Experiment ID: 108463 Result: Down-regulated in Transcription
  misc_feature: MA Experiment 108463 PARAMETER Experiment Name: At_Germinating_Seeds_cDNA_P Parameter: Age (day) Value: 3 vs. 0
  misc_feature: MA Experiment 108463 PARAMETER Experiment Name: At_Germinating_Seeds_cDNA_P Parameter: Tissue Value: Germinating Seeds
  misc_feature: MA Experiment ID: 108573 Result: Up-regulated in Transcription
  misc_feature: MA Experiment 108573 PARAMETER Experiment Name: At_Drought_cDNA_P Parameter: Timepoint (hr) Value: 6
  misc_feature: MA Experiment 108573 PARAMETER Experiment Name: At_Drought_cDNA_P Parameter: Tissue Value: Aerial
  misc_feature: MA Experiment 108573 PARAMETER Experiment Name: At_Drought_cDNA_P Parameter: Treatment Value: Drought vs. No Drought
  misc_feature: MA Experiment ID: 108577 Result: Up-regulated in Transcription
  misc_feature: MA Experiment 108577 PARAMETER Experiment Name: At_42deg_Heat_cDNA_P Parameter: Temperature (deg C) Value: 42 vs. 22
  misc_feature: MA Experiment 108577 PARAMETER Experiment Name: At_42deg_Heat_cDNA_P Parameter: Timepoint (hr) Value: 6
  misc_feature: MA Experiment 108577 PARAMETER Experiment Name: At_42deg_Heat_cDNA_P Parameter: Tissue Value: Aerial
  misc_feature: MA Experiment ID: 20000087 Result: Down-regulated in Transcription
  misc_feature: MA Experiment 20000087 PARAMETER Experiment Name: At_100uM_ABA_Mutants_cDNA_P Parameter: Plant Line Value: WS
  misc_feature: MA Experiment 20000087 PARAMETER Experiment Name: At_100uM_ABA_Mutants_cDNA_P Parameter: Timepoint (hr) Value: 6
  misc_feature: MA Experiment 20000087 PARAMETER Experiment Name: At_100uM_ABA_Mutants_cDNA_P Parameter: Tissue Value: Aerial
  misc_feature: MA Experiment 20000087 PARAMETER Experiment Name: At_100uM_ABA_Mutants_cDNA_P Parameter: Treatment Value: 100uM ABA vs. No Treatment
  misc_feature: MA Experiment ID: 20000111 Result: Up-regulated in Transcription
  misc_feature: MA Experiment 20000111 PARAMETER Experiment Name: At_42deg_Heat_cDNA_P Parameter: Temperature (deg C) Value: 42 vs. 22
  misc_feature: MA Experiment 20000111 PARAMETER Experiment Name: At_42deg_Heat_cDNA_P Parameter: Timepoint (hr) Value: 6
  misc_feature: MA Experiment 20000111 PARAMETER Experiment Name: At_42deg_Heat_cDNA_P Parameter: Tissue Value: Aerial
  misc_feature: MA Experiment ID: 20000113 Result: Up-regulated in Transcription
  misc_feature: MA Experiment 20000113 PARAMETER Experiment Name: At_42deg_Heat_cDNA_P Parameter: Temperature (deg C) Value: 42 vs. 22
  misc_feature: MA Experiment 20000113 PARAMETER Experiment Name: At_42deg_Heat_cDNA_P Parameter: Timepoint (hr) Value: 8
  misc_feature: MA Experiment 20000113 PARAMETER Experiment Name: At_42deg_Heat_cDNA_P Parameter: Tissue Value: Aerial
  misc_feature: MA Experiment ID: 20000173 Result: Up-regulated in Transcription
  misc_feature: MA Experiment 20000173 PARAMETER Experiment Name: At_42deg_Heat_P Parameter: Age (day) Value: 14
  misc_feature: MA Experiment 20000173 PARAMETER Experiment Name: At_42deg_Heat_P Parameter: Organism Value: A. thaliana
  misc_feature: MA Experiment 20000173 PARAMETER Experiment Name: At_42deg_Heat_P Parameter: Plant Line Value: WS
  misc_feature: MA Experiment 20000173 PARAMETER Experiment Name: At_42deg_Heat_P Parameter: Temperature (deg C) Value: 42 vs. 22
  misc_feature: MA Experiment 20000173 PARAMETER Experiment Name: At_42deg_Heat_P Parameter: Timepoint (hr) Value: 6
  misc_feature: MA Experiment 20000173 PARAMETER Experiment Name: At_42deg_Heat_P Parameter: Tissue Value: Aerial
  misc_feature: MA Experiment ID: 20000179 Result: Down-regulated in Transcription
  misc_feature: MA Experiment 20000179 PARAMETER Experiment Name: At_Germinating_Seeds_P Parameter: Age (hr) Value: 6 vs. 0
  misc_feature: MA Experiment 20000179 PARAMETER Experiment Name: At_Germinating_Seeds_P Parameter: Tissue Value: Germinating Seeds
  misc_feature: MA Experiment ID: 20000180 Result: Down-regulated in Transcription
  misc_feature: MA Experiment 20000180 PARAMETER Experiment Name: At_Germinating_Seeds_P Parameter: Age (hr) Value: 24 vs. 0
  misc_feature: MA Experiment 20000180 PARAMETER Experiment Name: At_Germinating_Seeds_P Parameter: Tissue Value: Germinating Seeds
  misc_feature: MA Experiment ID: 20001557 Result: Up-regulated in Transcription
  misc_feature: MA Experiment 20001557 PARAMETER Experiment Name: At_Drought_Soil_Dry_P Parameter: Age (day) Value: 27
  misc_feature: MA Experiment 20001557 PARAMETER Experiment Name: At_Drought_Soil_Dry_P Parameter: Organism Value: A. thaliana
  misc_feature: MA Experiment 20001557 PARAMETER Experiment Name: At_Drought_Soil_Dry_P Parameter: Plant Line Value: WS
  misc_feature: MA Experiment 20001557 PARAMETER Experiment Name: At_Drought_Soil_Dry_P Parameter: Post Timepoint (hr) Value: 3
  misc_feature: MA Experiment 20001557 PARAMETER Experiment Name: At_Drought_Soil_Dry_P Parameter: Post-Treatment Value: Re-Water vs. No Drought
  misc_feature: MA Experiment 20001557 PARAMETER Experiment Name: At_Drought_Soil_Dry_P Parameter: Timepoint (day) Value: 13
  misc_feature: MA Experiment 20001557 PARAMETER Experiment Name: At_Drought_Soil_Dry_P Parameter: Treatment Value: Drought vs. No Drought
aagcatttgggggaaatcaatcgaaaaccctaggagagataaaaacaaaaatctagacggagatttatggcgacagcgaatcctggccgtggaggtggtagaagaggcggtggagctatggatgacgataagttggtcttcgagactaccgatggaattgagcccatcacgagcttcaatgatatgggcattaaggaagatgtgcttcgcggtgtctacgaatatggattcgagaagccttccgcgattcagcagagggctgttatgccgattcttcaaggacgtgatgttattgctcaagctcagtccggtaccgggaagacatctatgattgctctctccgtttgtcaagtcgttgatacttcttctagagaggttcaggccttgatattatccccaacaagagagctggctacacaaacagagaagacgatacaagctattggattacatgccaatattcaggcacatgcttgcatcggtgggaatagtgttggagaagacatcaggaagctggagcatggtgttcatgttgtgtctgggacacctggtcgtgtctgtgacatgataaagaggagaagtcttcgtaccagagctattaaacttctgattcttgatgaatcagatgaaatgctgagcagagggttcaaggaccagatctatgatgtttacagatatcttccaccagatcttcaggtttgcttggtttctgcaactcttcctcacgagattttggagatgacatccaagtttatgacagaaccagtgaagatacttgtgaagcgtgatgagttgactcttgaaggaatcaaacaattttttgttgctgttgagaaggaagagtggaaatttgatacactctgtgatctttatgacacgcttactatcactcaagctgttatcttctgcaatactaaacgaaaggtggattatcttagtgagaaaatgagaagtcacaacttcactgtctcatcaatgcatggagacatgcctcagaaggagagagacgccatcatgaatgagtttcggtcaggtgatagtcgtgttttgataacaacagatgtatgggcacgtgggattgatgtgcaacaagtttctcttgttatcaattatgatctccccaacaaccgtgagctctacatccatcgtattgggcggtctggtcgattcgggcgtaagggtgttgcaatcaactttgttaaaagcgacgacatcaagattctcagagacattgagcagtactacagtacccagattgatgagatgccaatgaatgtagctgatcttatctaaaagagcttgtctgagatttttgtgctttcagcggggaagtgtctggatgaaaaagtattgttgagcgcttctgtcaaattattgcactatcttaacggtgtatttcctttgatgtttctgtgggctcttttgaacaaacttaaactcgcgtgtggtaaatgtttaatgacttgagaagcgatttaggtttagggtttggaccgtttggtttttcgtttcctcgtaattgattctgggggctttgattgtggtttgtgggtcaaaactctcaactatcactacttgtaagacttttgctcgacagttgaaacggttcattgttatc

SEQ ID NO: 74201 - protein, 408 aa, Arabidopsis thaliana; identical to SEQ ID NO: 28696
  peptide (1)..(408): Ceres Seq. ID no. 4996481
  misc_feature (48)..(251): Pfam Name: DEAD/DEAH box helicase Pfam Description: DEAD/DEAH box helicase
  misc_feature (1)..(408): Homolog of NCBI NO: 15230945 NR Description: eukaryotic translation initiation factor 4A putative; protein id: At3g19760.1, supported by cDNA: gi_15215677
  misc_feature (1)..(408): Homolog of NCBI NO: 15215678 NR Description: AT3g19760/MMB12_21 [Arabidopsis thaliana]
  misc_feature (18)..(408): Homolog of NCBI NO: 11277760 NR Description: RNA helicase RH2 [imported] - Arabidopsis >gi|3775985|emb|CAA09195.1| RNA helicase [Arabidopsis thaliana]
  misc_feature (12)..(408): Homolog of NCBI NO: 34896594 NR Description: putative translation initiation factor [Oryza >gi|13957631|gb|AAK50586.1| putative translation initiation
  misc_feature (18)..(408): Homolog of NCBI NO: 1170507 NR Description: Eukaryotic initiation factor 4A-3 (eIF-4A-3)
  misc_feature (13)..(408): Homolog of NCBI NO: 7443503 NR Description: translation initiation factor - garden pea
  misc_feature (12)..(408): Homolog of NCBI NO: 24645031 NR Description: CG7483-PA [Drosophila melanogaster]
  misc_feature (12)..(408): Homolog of NCBI NO: 19528517 NR Description: RE50350p [Drosophila melanogaster]
  misc_feature (19)..(408): Homolog of NCBI NO: 28277876 NR Description: Unknown (protein for MGC:56139) [Danio rerio]
  misc_feature (14)..(408): Homolog of NCBI NO: 29612461 NR Description: Similar to eukaryotic translation initiation

SEQ ID NO: 74202 - protein, 391 aa, Arabidopsis thaliana; identical to SEQ ID NO: 28697
  peptide (1)..(391): Ceres Seq. ID no. 4996482
  misc_feature (31)..(234): Pfam Name: DEAD/DEAH box helicase Pfam Description: DEAD/DEAH box helicase
  misc_feature (1)..(391): Homolog of NCBI NO: 15230945 NR Description: eukaryotic translation initiation factor 4A putative; protein id: At3g19760.1, supported by cDNA: gi_15215677
  misc_feature (1)..(391): Homolog of NCBI NO: 15215678 NR Description: AT3g19760/MMB12_21 [Arabidopsis thaliana]
  misc_feature (1)..(391): Homolog of NCBI NO: 11277760 NR Description: RNA helicase RH2 [imported] - Arabidopsis >gi|3775985|emb|CAA09195.1| RNA helicase [Arabidopsis thaliana]
  misc_feature (1)..(391): Homolog of NCBI NO: 34896594 NR Description: putative translation initiation factor [Oryza >gi|13957631|gb|AAK50586.1| putative translation initiation
  misc_feature (1)..(391): Homolog of NCBI NO: 1170507 NR Description: Eukaryotic initiation factor 4A-3 (eIF-4A-3)
  misc_feature (1)..(391): Homolog of NCBI NO: 7443503 NR Description: translation initiation factor - garden pea
  misc_feature (1)..(391): Homolog of NCBI NO: 24645031 NR Description: CG7483-PA [Drosophila melanogaster]
  misc_feature (1)..(391): Homolog of NCBI NO: 19528517 NR Description: RE50350p [Drosophila melanogaster]
  misc_feature (2)..(391): Homolog of NCBI NO: 28277876 NR Description: Unknown (protein for MGC:56139) [Danio rerio]
  misc_feature (1)..(391): Homolog of NCBI NO: 29612461 NR Description: Similar to eukaryotic translation initiation

SEQ ID NO: 74203 - protein, 369 aa, Arabidopsis thaliana; identical to SEQ ID NO: 28698
  peptide (1)..(369): Ceres Seq. ID no. 4996483
  misc_feature (9)..(212): Pfam Name: DEAD/DEAH box helicase Pfam Description: DEAD/DEAH box helicase
  misc_feature (1)..(369): Homolog of NCBI NO: 15230945 NR Description: eukaryotic translation initiation factor 4A putative; protein id: At3g19760.1, supported by cDNA: gi_15215677
  misc_feature (1)..(369): Homolog of NCBI NO: 15215678 NR Description: AT3g19760/MMB12_21 [Arabidopsis thaliana]
  misc_feature (1)..(369): Homolog of NCBI NO: 11277760 NR Description: RNA helicase RH2 [imported] - Arabidopsis >gi|3775985|emb|CAA09195.1| RNA helicase [Arabidopsis thaliana]
  misc_feature (1)..(369): Homolog of NCBI NO: 34896594 NR Description: putative translation initiation factor [Oryza >gi|13957631|gb|AAK50586.1| putative translation initiation
  misc_feature (1)..(369): Homolog of NCBI NO: 1170507 NR Description: Eukaryotic initiation factor 4A-3 (eIF-4A-3)
  misc_feature (1)..(369): Homolog of NCBI NO: 7443503 NR Description: translation initiation factor - garden pea
  misc_feature (1)..(369): Homolog of NCBI NO: 24645031 NR Description: CG7483-PA [Drosophila melanogaster]
  misc_feature (1)..(369): Homolog of NCBI NO: 19528517 NR Description: RE50350p [Drosophila melanogaster]
  misc_feature (1)..(369): Homolog of NCBI NO: 28277876 NR Description: Unknown (protein for MGC:56139) [Danio rerio]
  misc_feature (1)..(369): Homolog of NCBI NO: 29612461 NR Description: Similar to eukaryotic translation initiation

SEQ ID NO: 74204 - DNA, 1132 bp, Arabidopsis thaliana
  misc_feature (1)..(1132): Ceres Seq. ID no. 4996634
  misc_feature: MA Experiment ID: 108474 Result: Down-regulated in Transcription
  misc_feature: MA Experiment 108474 PARAMETER Experiment Name: At_Drought_Flowers_cDNA_P Parameter: Timepoint (hr) Value: null
  misc_feature: MA Experiment 108474 PARAMETER Experiment Name: At_Drought_Flowers_cDNA_P Parameter: Treatment Value: Drought vs. No Drought
  misc_feature: MA Experiment ID: 108501 Result: Down-regulated in Transcription
  misc_feature: MA Experiment 108501 PARAMETER Experiment Name: At_ap2_floral_buds_cDNA_P Parameter: Plant Line Value: ap2 (Ler.)
  misc_feature: MA Experiment 108501 PARAMETER Experiment Name: At_ap2_floral_buds_cDNA_P Parameter: Tissue Value: Closed Flower
  misc_feature: MA Experiment ID: 20000111 Result: Up-regulated in Transcription
  misc_feature: MA Experiment 20000111 PARAMETER Experiment Name: At_42deg_Heat_cDNA_P Parameter: Temperature (deg C) Value: 42 vs. 22
  misc_feature: MA Experiment 20000111 PARAMETER Experiment Name: At_42deg_Heat_cDNA_P Parameter: Timepoint (hr) Value: 6
  misc_feature: MA Experiment 20000111 PARAMETER Experiment Name: At_42deg_Heat_cDNA_P Parameter: Tissue Value: Aerial
  misc_feature: MA Experiment ID: 20000306 Result: Down-regulated in Transcription
  misc_feature: MA Experiment 20000306 PARAMETER Experiment Name: At_Germinating_Seeds_Sub_P Parameter: Age (hr) Value: 6 vs. 0
  misc_feature: MA Experiment 20000306 PARAMETER Experiment Name: At_Germinating_Seeds_Sub_P Parameter: Organism Value: A. thaliana
  misc_feature: MA Experiment 20000306 PARAMETER Experiment Name: At_Germinating_Seeds_Sub_P Parameter: Plant Line Value: WS
  misc_feature: MA Experiment 20000306 PARAMETER Experiment Name: At_Germinating_Seeds_Sub_P Parameter: Tissue Value: Germinating Seeds
  misc_feature: MA Experiment ID: 20000307 Result: Down-regulated in Transcription
  misc_feature: MA Experiment 20000307 PARAMETER Experiment Name: At_Germinating_Seeds_Sub_P Parameter: Age (hr) Value: 24 vs. 0
  misc_feature: MA Experiment 20000307 PARAMETER Experiment Name: At_Germinating_Seeds_Sub_P Parameter: Organism Value: A. thaliana
  misc_feature: MA Experiment 20000307 PARAMETER Experiment Name: At_Germinating_Seeds_Sub_P Parameter: Plant Line Value: WS
  misc_feature: MA Experiment 20000307 PARAMETER Experiment Name: At_Germinating_Seeds_Sub_P Parameter: Tissue Value: Germinating Seeds
  misc_feature: MA Experiment ID: 20000314 Result: Down-regulated in Transcription
  misc_feature: MA Experiment 20000314 PARAMETER Experiment Name: At_14day_Shoots-Roots_Sub_P Parameter: Age (day) Value: 14
  misc_feature: MA Experiment 20000314 PARAMETER Experiment Name: At_14day_Shoots-Roots_Sub_P Parameter: Organism Value: A. thaliana
  misc_feature: MA Experiment 20000314 PARAMETER Experiment Name: At_14day_Shoots-Roots_Sub_P Parameter: Plant Line Value: WS
  misc_feature: MA Experiment 20000314 PARAMETER Experiment Name: At_14day_Shoots-Roots_Sub_P Parameter: Tissue Value: Roots vs. Whole Plant
  misc_feature: MA Experiment ID: 20000355 Result: Down-regulated in Transcription
  misc_feature: MA Experiment 20000355 PARAMETER Experiment Name: At_Siliques_Sub_P Parameter: Age (day) Value: 21
  misc_feature: MA Experiment 20000355 PARAMETER Experiment Name: At_Siliques_Sub_P Parameter: Organism Value: A. thaliana
  misc_feature: MA Experiment 20000355 PARAMETER Experiment Name: At_Siliques_Sub_P Parameter: Plant Line Value: WS
  misc_feature: MA Experiment 20000355 PARAMETER Experiment Name: At_Siliques_Sub_P Parameter: Tissue Value: Less Than 5mm Siliques vs. Whole Plant
  misc_feature: MA Experiment ID: 20000440 Result: Up-regulated in Transcription
  misc_feature: MA Experiment 20000440 PARAMETER Experiment Name: At_Closed-Flower__Sub_P Parameter: Tissue Value: Closed Flower vs. Whole Plant
aatcgaattttgttgtgtgtgacctcaaactgacaacttccagtaattgtaatattaccaatttttttataaaaaagatgaacttcactttagagcaatagcaatccctcgagtctcccctatataaagattccaactccttaacgattcatctaatgaaaaaacacacacaccaaaaatatcagatatctcaaacaatgtcttcagtttttggatctgtccatatcttggccatgatagccatacaactcctccttacacacagtgtttcatctctgaaccttaccaatgcgtatctgcaccacaaatgcagcaacactcaaggaaaatataagcaggggagcgcgttcgagaaaaatctcaacttagtcctcagtaccatcacctcgattggaaattttcgtgacggtttccgctacaccgaagaaggtgaggatcccaataacgtctttgtcatgttccagtgtcgcggcgactcctactggtccaagtgccccccttgcattagcaccgccgtctctgggcttcgtaggagatgtccaagaaataagggagcaataatatggtatgaccaatgtcttttaaagatatcttcagttgcctccttcaataagatagattatgagaacgatttctatttgtccaacccaaacaacatgagtgatcgggggttgttcaacaaggagacgtcggctctcctggagaagctggcatataaagcctccgatagaaacaacttggatggtaaacaattggtgttgtacgcagcaggggagaagagaattgggacaaagaaggtgtatgcaatggtgcagtgtacgaaagacttaatatttacaaagtgctttgagtgtttggaagggattttgaggaagtttccacagtgttgtgacggtaaacgaggagggagagttttcggtacgagctgtaactttaggtatgagttatatccttttcttagaaactacagcaacagtacaatgagagctccatattaaatgaaagggttctagagataaacagtcttataatatacactgtgttgcattttagtacgtgaacttgagcgaataaatgtactttcctctttgtgatttttgttttttttttgtgaacttgagttattaagagg

SEQ ID NO: 74205 - protein, 280 aa, Arabidopsis thaliana; identical to SEQ ID NO: 71993
  peptide (1)..(280): Ceres Seq. ID no. 4996635
  misc_feature (215)..(269): Pfam Name: Domain of unknown function DUF26 Pfam Description: Domain of unknown function DUF26
  misc_feature (15)..(280): Homolog of NCBI NO: 15233366 NR Description: pollen coat receptor kinase, putative; protein At4g20670.1 [Arabidopsis thaliana] >gi|7485931|pir||T10609
  misc_feature (15)..(270): Homolog of NCBI NO: 15233235 NR Description: receptor kinase common family, putative; protein At3g21990.1 [Arabidopsis thaliana] >gi|9279756|dbj|BAB01382.1| similarity to receptor kinase~gene_id:MZN24.17 [Arabidopsis
  misc_feature (15)..(261): Homolog of NCBI NO: 15233364 NR Description: receptor kinase common family, 3' partial, protein id: At4g20650.1 [Arabidopsis thaliana]
  misc_feature (15)..(261): Homolog of NCBI NO: 18415518 NR Description: putative protein; protein id: At4g20530.1 thaliana] >gi|18415520|ref|NP_567604.1| putative protein; protein At4g20540.1 [Arabidopsis thaliana] >gi|18415522|ref|NP_567605.1|
  misc_feature (149)..(270): Homolog of NCBI NO: 15233231 NR Description: hypothetical protein; protein id: At3g21980.1
  misc_feature (15)..(124): Homolog of NCBI NO: 15233231 NR Description: hypothetical protein; protein id: At3g21980.1
  misc_feature (15)..(253): Homolog of NCBI NO: 9279755 NR Description: emb|CAB45833.1~gene_id:MZN24.16~similar to
  misc_feature (25)..(276): Homolog of NCBI NO: 15233368 NR Description: putative protein; protein id: At4g20680.1
  misc_feature (25)..(276): Homolog of NCBI NO: 15233236 NR Description: hypothetical protein; protein id: At3g22000.1 thaliana] >gi|9279757|dbj|BAB01383.1| contains similarity to
  misc_feature (6)..(269): Homolog of NCBI NO: 15233238 NR Description: hypothetical protein; protein id: At3g22010.1 thaliana] >gi|9279758|dbj|BAB01384.1| contains similarity to

SEQ ID NO: 74206 - protein, 266 aa, Arabidopsis thaliana; identical to SEQ ID NO: 71994
  peptide (1)..(266): Ceres Seq. ID no. 4996636
  misc_feature (201)..(255): Pfam Name: Domain of unknown function DUF26 Pfam Description: Domain of unknown function DUF26
  misc_feature (1)..(266): Homolog of NCBI NO: 15233366 NR Description: pollen coat receptor kinase, putative; protein At4g20670.1 [Arabidopsis thaliana] >gi|7485931|pir||T10609
  misc_feature (1)..(256): Homolog of NCBI NO: 15233235 NR Description: receptor kinase common family, putative; protein At3g21990.1 [Arabidopsis thaliana] >gi|9279756|dbj|BAB01382.1| similarity to receptor kinase~gene_id:MZN24.17 [Arabidopsis
  misc_feature (1)..(247): Homolog of NCBI NO: 15233364 NR Description: receptor kinase common family, 3' partial, protein id: At4g20650.1 [Arabidopsis thaliana]
  misc_feature (1)..(247): Homolog of NCBI NO: 18415518 NR Description: putative protein; protein id: At4g20530.1 thaliana] >gi|18415520|ref|NP_567604.1| putative protein; protein At4g20540.1 [Arabidopsis thaliana] >gi|18415522|ref|NP_567605.1|
  misc_feature (135)..(256): Homolog of NCBI NO: 15233231 NR Description: hypothetical protein; protein id: At3g21980.1
  misc_feature (1)..(110): Homolog of NCBI NO: 15233231 NR Description: hypothetical protein; protein id: At3g21980.1
  misc_feature (1)..(239): Homolog of NCBI NO: 9279755 NR Description: emb|CAB45833.1~gene_id:MZN24.16~similar to
  misc_feature (11)..(262): Homolog of NCBI NO: 15233368 NR Description: putative protein; protein id: At4g20680.1
  misc_feature (11)..(262): Homolog of NCBI NO: 15233236 NR Description: hypothetical protein; protein id: At3g22000.1 thaliana] >gi|9279757|dbj|BAB01383.1| contains similarity to
  misc_feature (1)..(255): Homolog of NCBI NO: 15233238 NR Description: hypothetical protein; protein id: At3g22010.1 thaliana] >gi|9279758|dbj|BAB01384.1| contains similarity to

SEQ ID NO: 74207 - protein, 254 aa, Arabidopsis thaliana; identical to SEQ ID NO: 71995
  peptide (1)..(254): Ceres Seq. ID no. 4996637
  misc_feature (189)..(243): Pfam Name: Domain of unknown function DUF26 Pfam Description: Domain of unknown function DUF26
  misc_feature (1)..(254): Homolog of NCBI NO: 15233366 NR Description: pollen coat receptor kinase, putative; protein At4g20670.1 [Arabidopsis thaliana] >gi|7485931|pir||T10609
  misc_feature (1)..(244): Homolog of NCBI NO: 15233235 NR Description: receptor kinase common family, putative; protein At3g21990.1 [Arabidopsis thaliana] >gi|9279756|dbj|BAB01382.1| similarity to receptor kinase~gene_id:MZN24.17 [Arabidopsis
  misc_feature (1)..(235): Homolog of NCBI NO: 15233364 NR Description: receptor kinase common family, 3' partial, protein id: At4g20650.1 [Arabidopsis thaliana]
  misc_feature (1)..(235): Homolog of NCBI NO: 18415518 NR Description: putative protein; protein id: At4g20530.1 thaliana] >gi|18415520|ref|NP_567604.1| putative protein; protein At4g20540.1 [Arabidopsis thaliana] >gi|18415522|ref|NP_567605.1|
  misc_feature (123)..(244): Homolog of NCBI NO: 15233231 NR Description: hypothetical protein; protein id: At3g21980.1
  misc_feature (1)..(98): Homolog of NCBI NO: 15233231 NR Description: hypothetical protein; protein id: At3g21980.1
  misc_feature (1)..(227): Homolog of NCBI NO: 9279755 NR Description: emb|CAB45833.1~gene_id:MZN24.16~similar to
  misc_feature (1)..(250): Homolog of NCBI NO: 15233368 NR Description: putative protein; protein id: At4g20680.1
  misc_feature (1)..(250): Homolog of NCBI NO: 15233236 NR Description: hypothetical protein; protein id: At3g22000.1 thaliana] >gi|9279757|dbj|BAB01383.1| contains similarity to
  misc_feature (1)..(243): Homolog of NCBI NO: 15233238 NR Description: hypothetical protein; protein id: At3g22010.1 thaliana] >gi|9279758|dbj|BAB01384.1| contains similarity to

SEQ ID NO: 74208 - DNA, 1531 bp, Arabidopsis thaliana
  misc_feature (1)..(1531): Ceres Seq. ID no. 4996658
  misc_feature: MA Experiment ID: 108462 Result: Up-regulated in Transcription
  misc_feature: MA Experiment 108462 PARAMETER Experiment Name: At_Germinating_Seeds_cDNA_P Parameter: Age (day) Value: 2 vs. 0
  misc_feature: MA Experiment 108462 PARAMETER Experiment Name: At_Germinating_Seeds_cDNA_P Parameter: Tissue Value: Germinating Seeds
  misc_feature: MA Experiment ID: 108488 Result: Down-regulated in Transcription
  misc_feature: MA Experiment ID: 108573 Result: Up-regulated in Transcription
  misc_feature: MA Experiment 108573 PARAMETER Experiment Name: At_Drought_cDNA_P Parameter: Timepoint (hr) Value: 6
  misc_feature: MA Experiment 108573 PARAMETER Experiment Name: At_Drought_cDNA_P Parameter: Tissue Value: Aerial
  misc_feature: MA Experiment 108573 PARAMETER Experiment Name: At_Drought_cDNA_P Parameter: Treatment Value: Drought vs. No Drought
  misc_feature: MA Experiment ID: 108577 Result: Down-regulated in Transcription
  misc_feature: MA Experiment 108577 PARAMETER Experiment Name: At_42deg_Heat_cDNA_P Parameter: Temperature (deg C) Value: 42 vs. 22
  misc_feature: MA Experiment 108577 PARAMETER Experiment Name: At_42deg_Heat_cDNA_P Parameter: Timepoint (hr) Value: 6
  misc_feature: MA Experiment 108577 PARAMETER Experiment Name: At_42deg_Heat_cDNA_P Parameter: Tissue Value: Aerial
  misc_feature: MA Experiment ID: 108585 Result: Up-regulated in Transcription
  misc_feature: MA Experiment 108585 PARAMETER Experiment Name: At_5mM_NaNP_cDNA_P Parameter: Timepoint (hr) Value: 6
  misc_feature: MA Experiment 108585 PARAMETER Experiment Name: At_5mM_NaNP_cDNA_P Parameter: Tissue Value: Aerial
  misc_feature: MA Experiment 108585 PARAMETER Experiment Name: At_5mM_NaNP_cDNA_P Parameter: Treatment Value: null
  misc_feature: MA Experiment ID: 108595 Result: Down-regulated in Transcription
  misc_feature: MA Experiment 108595 PARAMETER Experiment Name: At_Ler-pi_Ovule_cDNA_P Parameter: Plant Line Value: null
  misc_feature: MA Experiment ID: 20000224 Result: Down-regulated in Transcription
  misc_feature: MA Experiment ID: 20000307 Result: Up-regulated in Transcription
  misc_feature: MA Experiment 20000307 PARAMETER Experiment Name: At_Germinating_Seeds_Sub_P Parameter: Age (hr) Value: 24 vs. 0
  misc_feature: MA Experiment 20000307 PARAMETER Experiment Name: At_Germinating_Seeds_Sub_P Parameter: Organism Value: A. thaliana
  misc_feature: MA Experiment 20000307 PARAMETER Experiment Name: At_Germinating_Seeds_Sub_P Parameter: Plant Line Value: WS
  misc_feature: MA Experiment 20000307 PARAMETER Experiment Name: At_Germinating_Seeds_Sub_P Parameter: Tissue Value: Germinating Seeds
  misc_feature: MA Experiment ID: 20000327 Result: Down-regulated in Transcription
  misc_feature: MA Experiment 20000327 PARAMETER Experiment Name: At_42deg_Heat_Sub_P Parameter: Age (day) Value: 14
  misc_feature: MA Experiment 20000327 PARAMETER Experiment Name: At_42deg_Heat_Sub_P Parameter: Organism Value: A. thaliana
  misc_feature: MA Experiment 20000327 PARAMETER Experiment Name: At_42deg_Heat_Sub_P Parameter: Plant Line Value: WS
  misc_feature: MA Experiment 20000327 PARAMETER Experiment Name: At_42deg_Heat_Sub_P Parameter: Temperature (deg C) Value: 42 vs. 22
  misc_feature: MA Experiment 20000327 PARAMETER Experiment Name: At_42deg_Heat_Sub_P Parameter: Timepoint (hr) Value: 1
  misc_feature: MA Experiment 20000327 PARAMETER Experiment Name: At_42deg_Heat_Sub_P Parameter: Tissue Value: Aerial
  misc_feature: MA Experiment ID: 20000328 Result: Down-regulated in Transcription
  misc_feature: MA Experiment 20000328 PARAMETER Experiment Name: At_42deg_Heat_Sub_P Parameter: Age (day) Value: 14
  misc_feature: MA Experiment 20000328 PARAMETER Experiment Name: At_42deg_Heat_Sub_P Parameter: Organism Value: A. thaliana
  misc_feature: MA Experiment 20000328 PARAMETER Experiment Name: At_42deg_Heat_Sub_P Parameter: Plant Line Value: WS
  misc_feature: MA Experiment 20000328 PARAMETER Experiment Name: At_42deg_Heat_Sub_P Parameter: Temperature (deg C) Value: 42 vs. 22
  misc_feature: MA Experiment 20000328 PARAMETER Experiment Name: At_42deg_Heat_Sub_P Parameter: Timepoint (hr) Value: 6
  misc_feature: MA Experiment 20000328 PARAMETER Experiment Name: At_42deg_Heat_Sub_P Parameter: Tissue Value: Aerial
atcgtcgtcttctattttttcttctttcttcgatttcataccaaaacaagaactctctgttttcgacaaaaacgaaaccttgagatctattttgattgacttttaagaaagagagagatctttcttagaagattttgtctcgtcggcattgaagatccagggtttgtctttcgaaattcagagagaaaatgggtgatgaggcagagatcaaggaacatttaaagccacaagcttcatctgaaacaatggacaagaaacataatgtgaaagggaagaggttatggcagaaagtcaagtatcaattggtggagtttcattcattgcctgcttatttaagagacaatgagtacatcattggtcattaccgatccgaatggccgatcaaacagattcttctcagcatctttaccattcataatgagactttgaatgtttggacgcacttgattgggtttttcctgtttttggcgctcactatatacactgcaacgaaagtaccgagtgtcgtggatcttcattcgcttcaacaccgtttacccgatttgttgaggaaaacagatctccacaaacttcattctgagctcatggctcgccttccttctagtccatctagttggcatgtgatggaccttctttataactgtttgcctgaaagattttctcatggcaactacactgacatgtgtgttctgcattctgtgagggaagatcttgcaaacttgatagctcctttgatcttcaggccaattactcgatggccgttttatgcatttctaggtggtgctatgttctgtctattagcaagcagcacgtgccacctcctctcatgtcactccgagcgagtctcctacataatgcttaggcttgattacgccggcatcgcagctctaatagcgacttccttctaccctccggtttattactccttcatgtgtgatcctttcttctgcaacctctacttaggattcataaccatcttaggaatcgccactgtgcttgtttctctcctcccggttttccaaagcccggagtttcgggtggtgagggcgtctctgttctttggaatgggattctctggcttagctccgattcttcacaagctgataatcttttgggaccaacctgaagcccttcacacgacaggttatgagattttgatgggtttgctttatgggttaggagctctggtttatgcaactaggatcccagagagatggatgccgggtaaattcgatatagcaggacatagccatcagttgtttcatgttctggttgttgctggtgcgttcacgcactatagagctgggctagtgtatcttaagtggagagatattgaaggatgttgaagatgaagattgaagattagatggaatctttgaatcttgtttgtagtagcttcatataaaagttggattatgtaaagtcttatatgtaatcaaacgtttaattgtttcctttattcaacaaaggatttatattgttaatccacatatgtattactggttaaagaagctgaaggattcatattttt

SEQ ID NO: 74209 - protein, 385 aa, Arabidopsis thaliana; identical to SEQ ID NO: 37016
  peptide (1)..(385): Ceres Seq. ID no. 4996659
  misc_feature (73)..(374): Pfam Name: Uncharacterised protein family (Hly-III / UPF0073) Pfam Description: Uncharacterised protein family (Hly-III /
  misc_feature (1)..(385): Homolog of NCBI NO: 15235657 NR Description: expressed protein; protein id: At4g37680.1, by cDNA: 262351., supported by cDNA: gi_13430521, supported by
  misc_feature (1)..(374): Homolog of NCBI NO: 15233813 NR Description: putative protein; protein id: At4g38320.1
  misc_feature (108)..(334): Homolog of NCBI NO: 20330770 NR Description: Hypothetical protein [Oryza sativa (japonica
  misc_feature (187)..(385): Homolog of NCBI NO: 15241302 NR Description: putative protein; protein id: At5g20270.1, by cDNA: 24749., supported by cDNA: gi_15982833 [Arabidopsis >gi|15982834|gb|AAL09764.1| AT5g20270/F5O24_160 [Arabidopsis
  misc_feature (9)..(97): Homolog of NCBI NO: 15241302 NR Description: putative protein; protein id: At5g20270.1, by cDNA: 24749., supported by cDNA: gi_15982833 [Arabidopsis >gi|15982834|gb|AAL09764.1| AT5g20270/F5O24_160 [Arabidopsis
  misc_feature (164)..(380): Homolog of NCBI NO: 18377749 NR Description: unknown protein [Arabidopsis thaliana]
  misc_feature (187)..(369): Homolog of NCBI NO: 13272399 NR Description: hypothetical protein [Arabidopsis thaliana]
  misc_feature (187)..(369): Homolog of NCBI NO: 18400468 NR Description: expressed protein; protein id: At2g24150.1, by cDNA: gi_13877832 [Arabidopsis thaliana] unknown protein [Arabidopsis thaliana]
  misc_feature (22)..(100): Homolog of NCBI NO: 18377749 NR Description: unknown protein [Arabidopsis thaliana]
  misc_feature (34)..(106): Homolog of NCBI NO: 13272399 NR Description: hypothetical protein [Arabidopsis thaliana]

SEQ ID NO: 74210 - protein, 366 aa, Arabidopsis thaliana; identical to SEQ ID NO: 37017
  peptide (1)..(366): Ceres Seq. ID no. 4996660
  misc_feature (54)..(355): Pfam Name: Uncharacterised protein family (Hly-III / UPF0073) Pfam Description: Uncharacterised protein family (Hly-III /
  misc_feature (1)..(366): Homolog of NCBI NO: 15235657 NR Description: expressed protein; protein id: At4g37680.1, by cDNA: 262351., supported by cDNA: gi_13430521, supported by
  misc_feature (1)..(355): Homolog of NCBI NO: 15233813 NR Description: putative protein; protein id: At4g38320.1
  misc_feature (89)..(315): Homolog of NCBI NO: 20330770 NR Description: Hypothetical protein [Oryza sativa (japonica
  misc_feature (168)..(366): Homolog of NCBI NO: 15241302 NR Description: putative protein; protein id: At5g20270.1, by cDNA: 24749., supported by cDNA: gi_15982833 [Arabidopsis >gi|15982834|gb|AAL09764.1| AT5g20270/F5O24_160 [Arabidopsis
  misc_feature (1)..(78): Homolog of NCBI NO: 15241302 NR Description: putative protein; protein id: At5g20270.1, by cDNA: 24749., supported by cDNA: gi_15982833 [Arabidopsis >gi|15982834|gb|AAL09764.1| AT5g20270/F5O24_160 [Arabidopsis
  misc_feature (145)..(361): Homolog of NCBI NO: 18377749 NR Description: unknown protein [Arabidopsis thaliana]
  misc_feature (168)..(350): Homolog of NCBI NO: 13272399 NR Description: hypothetical protein [Arabidopsis thaliana]
  misc_feature (168)..(350): Homolog of NCBI NO: 18400468 NR Description: expressed protein; protein id: At2g24150.1, by cDNA: gi_13877832 [Arabidopsis thaliana] unknown protein [Arabidopsis thaliana]
  misc_feature (3)..(81): Homolog of NCBI NO: 18377749 NR Description: unknown protein [Arabidopsis thaliana]
  misc_feature (15)..(87): Homolog of NCBI NO: 13272399 NR Description: hypothetical protein [Arabidopsis thaliana]

SEQ ID NO: 74211 - protein, 253 aa, Arabidopsis thaliana; identical to SEQ ID NO: 37018
  peptide (1)..(253): Ceres Seq. ID no. 4996661
  misc_feature (1)..(242): Pfam Name: Uncharacterised protein family (Hly-III / UPF0073) Pfam Description: Uncharacterised protein family (Hly-III /
  misc_feature (1)..(253): Homolog of NCBI NO: 15235657 NR Description: expressed protein; protein id: At4g37680.1, by cDNA: 262351., supported by cDNA: gi_13430521, supported by
  misc_feature (1)..(242): Homolog of NCBI NO: 15233813 NR Description: putative protein; protein id: At4g38320.1
  misc_feature (1)..(202): Homolog of NCBI NO: 20330770 NR Description: Hypothetical protein [Oryza sativa (japonica
  misc_feature (55)..(253): Homolog of NCBI NO: 15241302 NR Description: putative protein; protein id: At5g20270.1, by cDNA: 24749., supported by cDNA: gi_15982833 [Arabidopsis >gi|15982834|gb|AAL09764.1| AT5g20270/F5O24_160 [Arabidopsis
  misc_feature (32)..(248): Homolog of NCBI NO: 18377749 NR Description: unknown protein [Arabidopsis thaliana]
  misc_feature (55)..(237): Homolog of NCBI NO: 13272399 NR Description: hypothetical protein [Arabidopsis thaliana]
  misc_feature (55)..(237): Homolog of NCBI NO: 18400468 NR Description: expressed protein; protein id: At2g24150.1, by cDNA: gi_13877832 [Arabidopsis thaliana] unknown protein [Arabidopsis thaliana]
  misc_feature (32)..(248): Homolog of NCBI NO: 30688829 NR Description: expressed protein [Arabidopsis thaliana]
  misc_feature (71)..(248): Homolog of NCBI NO: 25407688 NR Description: hypothetical protein AT4g30850 [imported] - thaliana >gi|2980781|emb|CAA18208.1| putative protein thaliana] >gi|7269986|emb|CAB79803.1| putative protein
  misc_feature (74)..(237): Homolog of NCBI NO: 25309925 NR Description: hypothetical protein At2g24150 [imported] -

SEQ ID NO: 74212 - DNA, 1290 bp, Arabidopsis thaliana
  misc_feature (1)..(1290): Ceres Seq. ID no. 4996759
  misc_feature: MA Experiment ID: 108434 Result: Up-regulated in Transcription
  misc_feature: MA Experiment 108434 PARAMETER Experiment Name: At_Root_Tips_cDNA_P Parameter: Tissue Value: Root Tips
  misc_feature: MA Experiment ID: 20000437 Result: Down-regulated in Transcription
  misc_feature: MA Experiment 20000437 PARAMETER Experiment Name: At_Drought_P Parameter: Age (day) Value: 8
  misc_feature: MA Experiment 20000437 PARAMETER Experiment Name: At_Drought_P Parameter: Organism Value: A. thaliana
  misc_feature: MA Experiment 20000437 PARAMETER Experiment Name: At_Drought_P Parameter: Plant Line Value: WS
  misc_feature: MA Experiment 20000437 PARAMETER Experiment Name: At_Drought_P Parameter: Timepoint (hr) Value: 24
  misc_feature: MA Experiment 20000437 PARAMETER Experiment Name: At_Drought_P Parameter: Tissue Value: Whole Plant
  misc_feature: MA Experiment 20000437 PARAMETER Experiment Name: At_Drought_P Parameter: Treatment Value: Drought vs. No Drought
  misc_feature: MA Experiment ID: 20000451 Result: Up-regulated in Transcription
  misc_feature: MA Experiment 20000451 PARAMETER Experiment Name: At_CS6879_Shoots-Roots_P Parameter: Age (day) Value: 14
  misc_feature: MA Experiment 20000451 PARAMETER Experiment Name: At_CS6879_Shoots-Roots_P Parameter: Organism Value: A. thaliana
  misc_feature: MA Experiment 20000451 PARAMETER Experiment Name: At_CS6879_Shoots-Roots_P Parameter: Plant Line Value: CS6879 vs. WS
  misc_feature: MA Experiment 20000451 PARAMETER Experiment Name: At_CS6879_Shoots-Roots_P Parameter: Tissue Value: Roots
  misc_feature: MA Experiment ID: 20000573 Result: Down-regulated in Transcription
  misc_feature: MA Experiment 20000573 PARAMETER Experiment Name: At_100uM_ABA_Mutants__P Parameter: Organism Value: A. thaliana
  misc_feature: MA Experiment 20000573 PARAMETER Experiment Name: At_100uM_ABA_Mutants__P Parameter: Plant Line Value: CS22 vs. Ler wt
  misc_feature: MA Experiment 20000573 PARAMETER Experiment Name: At_100uM_ABA_Mutants__P Parameter: Timepoint (hr) Value: N/A
  misc_feature: MA Experiment 20000573 PARAMETER Experiment Name: At_100uM_ABA_Mutants__P Parameter: Tissue Value: Whole Plant
  misc_feature: MA Experiment 20000573 PARAMETER Experiment Name: At_100uM_ABA_Mutants__P Parameter: Treatment Value: None
  misc_feature: MA Experiment ID: 20000574 Result: Down-regulated in Transcription
  misc_feature: MA Experiment 20000574 PARAMETER Experiment Name: At_100uM_ABA_Mutants__P Parameter: Organism Value: A. thaliana
  misc_feature: MA Experiment 20000574 PARAMETER Experiment Name: At_100uM_ABA_Mutants__P Parameter: Plant Line Value: CS23 vs. Ler wt
  misc_feature: MA Experiment 20000574 PARAMETER Experiment Name: At_100uM_ABA_Mutants__P Parameter: Timepoint (hr) Value: N/A
  misc_feature: MA Experiment 20000574 PARAMETER Experiment Name: At_100uM_ABA_Mutants__P Parameter: Tissue Value: Whole Plant
  misc_feature: MA Experiment 20000574 PARAMETER Experiment Name: At_100uM_ABA_Mutants__P Parameter: Treatment Value: None
  misc_feature: MA Experiment ID: 20000794 Result: Down-regulated in Transcription
  misc_feature: MA Experiment 20000794 PARAMETER Experiment Name: At_Petals_P Parameter: Age (day) Value: 23-25 days
  misc_feature: MA Experiment 20000794 PARAMETER Experiment Name: At_Petals_P Parameter: Plant Line Value: WS
  misc_feature: MA Experiment 20000794 PARAMETER Experiment Name: At_Petals_P Parameter: Tissue Value: Petals vs. Whole plant
  misc_feature: MA Experiment ID: 20001558 Result: Up-regulated in Transcription
  misc_feature: MA Experiment 20001558 PARAMETER Experiment Name: At_Drought_Soil_Dry_P Parameter: Age (day) Value: 27
  misc_feature: MA Experiment 20001558 PARAMETER Experiment Name: At_Drought_Soil_Dry_P Parameter: Organism Value: A. thaliana
  misc_feature: MA Experiment 20001558 PARAMETER Experiment Name: At_Drought_Soil_Dry_P Parameter: Plant Line Value: WS
  misc_feature: MA Experiment 20001558 PARAMETER Experiment Name: At_Drought_Soil_Dry_P Parameter: Post Timepoint (hr) Value: 6
  misc_feature: MA Experiment 20001558 PARAMETER Experiment Name: At_Drought_Soil_Dry_P Parameter: Post-Treatment Value: Re-Water vs. No Drought
  misc_feature: MA Experiment 20001558 PARAMETER Experiment Name: At_Drought_Soil_Dry_P Parameter: Timepoint (day) Value: 13
  misc_feature: MA Experiment 20001558 PARAMETER Experiment Name: At_Drought_Soil_Dry_P Parameter: Treatment Value: Drought vs. No Drought
gagagagctcctgtgaagtgacgaagagacgaagaagaaagagaacattaatggcggctactccgtggtactttgtcgcagtacttctcaccattcttaccagctctcaggggattctaacaactctttctcaaagtgatggaggttataagtatgattatgctactgttccctttcttgctgaagtttttaagctgatcatttctggtttatttctctggagagagatgcggacatcttcctcaacaacttcaaggattactacggattggaagagtgtgcgattatttgttattccgtctcttatttatctgatacataacaatgtgcagtttgctacattgacttatgtggatacgtccacttatcagataatgggtaatttgaagattgtgaccactggcatactgtttaggttatttttgaaaaggaaactatctaaacttcagtggatggcaattggtcttttagctgttggaacaactaccagccaggttaagggttgtggagaagcttcttgtgattctttattcacggcaccaatacaaggttatttgctgggcatcctctcagctggtttgtccgcgctagctggaatctacacagagtttctgatgaagagaaacaatgacaccttatactggcaaaacttgcagttatatacgtttggttcacttttcaacgtagctcgacttatagcagatgatttcagacacgggtttgaaaagggtccttggtggcaacgtatctttgatgggtacagcatcaccacttggctggtagttctgaatctcggatccactggcttactggtctcgtggttaatgaagtatgcagacaacatcgtcaaggtttattctacatcaatggcgatgctacttactatggttgcatccatatacctttttagcttcaaaccgacactgcagcttttcttgggtattgtcatatgcatcatgtcactccatatgtactttgctcctccacacacgctcgtggacttgcccgtgacaaacgaagcacatgccaagaccttaaagcaagttgtcgtagaagaaaagacagattcttgaattaaattggacgaaaaggttagttgaacacatagaaaacaatttgctaagtaaatgaacacaatgatcttcttctagcttcatttctattagagaatgagaaacttggatgtgagttcttttgaagaaatgatctgatagtttgtttattcacgtaccgattcttttctttgtaaatgtacatcgaggtgcctagaaatagtaaattcgattgttg

SEQ ID NO: 74213 - protein, 356 aa, Arabidopsis thaliana
  peptide (1)..(356): Ceres Seq. ID no. 4996760
  misc_feature (77)..(315): Pfam Name: Nucleotide-sugar transporter Pfam Description: Nucleotide-sugar transporter
  misc_feature (17)..(356): Homolog of NCBI NO: 18422134 NR Description: CMP-sialic acid transporter-like protein; protein
  misc_feature (36)..(356): Homolog of NCBI NO: 10177360 NR Description: CMP-sialic acid transporter-like protein
  misc_feature (25)..(324): Homolog of NCBI NO: 34393556 NR Description: putative CMP-sialic acid transporter [Oryza
  misc_feature (38)..(356): Homolog of NCBI NO: 34907666 NR Description: putative transporter-like protein [Oryza sativa
  misc_feature (24)..(327): Homolog of NCBI NO: 26450627 NR Description: unknown protein [Arabidopsis thaliana]
  misc_feature (31)..(327): Homolog of NCBI NO: 18411150 NR Description: transporter-like protein; protein id: supported by cDNA: gi_13430657 [Arabidopsis thaliana] putative transporter protein [Arabidopsis thaliana]
  misc_feature (31)..(327): Homolog of NCBI NO: 38345234 NR Description: OSJNBa0084K20.12 [Oryza sativa (japonica
  misc_feature (23)..(327): Homolog of NCBI NO: 6755558 NR Description: solute carrier family 35 (CMP-sialic acid
  misc_feature (47)..(327): Homolog of NCBI NO: 22204205 NR Description: SI:bZ30I22.3 (novel protein similar to vertebrate
  misc_feature (14)..(328): Homolog of NCBI NO: 3218521 NR Description: /prediction=(method:''genefinder'',
ESSCEVTKRRRRKRTLMAATPWYFVAVLLTILTSSQGILTTLSQSDGGYKYDYATVPFLAEVFKLIISGLFLWREMRTSSSTTSRITTDWKSVRLFVIPSLIYLIHNNVQFATLTYVDTSTYQIMGNLKIVTTGILFRLFLKRKLSKLQWMAIGLLAVGTTTSQVKGCGEASCDSLFTAPIQGYLLGILSAGLSALAGIYTEFLMKRNNDTLYWQNLQLYTFGSLFNVARLIADDFRHGFEKGPWWQRIFDGYSITTWLVVLNLGSTGLLVSWLMKYADNIVKVYSTSMAMLLTMVASIYLFSFKPTLQLFLGIVICIMSLHMYFAPPHTLVDLPVTNEAHAKTLKQVVVEEKTDS

SEQ ID NO: 74214 - protein, 340 aa, Arabidopsis thaliana; identical to SEQ ID NO: 39084
  peptide (1)..(340): Ceres Seq. ID no. 4996761
  misc_feature (61)..(299): Pfam Name: Nucleotide-sugar transporter Pfam Description: Nucleotide-sugar transporter
  misc_feature (1)..(340): Homolog of NCBI NO: 18422134 NR Description: CMP-sialic acid transporter-like protein; protein
  misc_feature (20)..(340): Homolog of NCBI NO: 10177360 NR Description: CMP-sialic acid transporter-like protein
  misc_feature (9)..(308): Homolog of NCBI NO: 34393556 NR Description: putative CMP-sialic acid transporter [Oryza
  misc_feature (22)..(340): Homolog of NCBI NO: 34907666 NR Description: putative transporter-like protein [Oryza sativa
  misc_feature (8)..(311): Homolog of NCBI NO: 26450627 NR Description: unknown protein [Arabidopsis thaliana]
  misc_feature (15)..(311): Homolog of NCBI NO: 18411150 NR Description: transporter-like protein; protein id: supported by cDNA: gi_13430657 [Arabidopsis thaliana] putative transporter protein [Arabidopsis thaliana]
  misc_feature (15)..(311): Homolog of NCBI NO: 38345234 NR Description: OSJNBa0084K20.12 [Oryza sativa (japonica
  misc_feature (7)..(311): Homolog of NCBI NO: 6755558 NR Description: solute carrier family 35 (CMP-sialic acid
  misc_feature (31)..(311): Homolog of NCBI NO: 22204205 NR Description: SI:bZ30I22.3 (novel protein similar to vertebrate
  misc_feature (1)..(312): Homolog of NCBI NO: 3218521 NR Description: /prediction=(method:''genefinder'',

SEQ ID NO: 74215 - protein, 281 aa, Arabidopsis thaliana; identical to SEQ ID NO: 39085
  peptide (1)..(281): Ceres Seq. ID no. 4996762
  misc_feature (2)..(240): Pfam Name: Nucleotide-sugar transporter Pfam Description: Nucleotide-sugar transporter
  misc_feature (1)..(281): Homolog of NCBI NO: 18422134 NR Description: CMP-sialic acid transporter-like protein; protein
  misc_feature (1)..(281): Homolog of NCBI NO: 10177360 NR Description: CMP-sialic acid transporter-like protein
  misc_feature (1)..(249): Homolog of NCBI NO: 34393556 NR Description: putative CMP-sialic acid transporter [Oryza
  misc_feature (1)..(281): Homolog of NCBI NO: 34907666 NR Description: putative transporter-like protein [Oryza sativa
  misc_feature (1)..(252): Homolog of NCBI NO: 26450627 NR Description: unknown protein [Arabidopsis thaliana]
  misc_feature (1)..(252): Homolog of NCBI NO: 18411150 NR Description: transporter-like protein; protein id: supported by cDNA: gi_13430657 [Arabidopsis thaliana] putative transporter protein [Arabidopsis thaliana]
  misc_feature (1)..(252): Homolog of NCBI NO: 38345234 NR Description: OSJNBa0084K20.12 [Oryza sativa (japonica
  misc_feature (1)..(252): Homolog of NCBI NO: 6755558 NR Description: solute carrier family 35 (CMP-sialic acid
  misc_feature (1)..(252): Homolog of NCBI NO: 22204205 NR Description: SI:bZ30I22.3 (novel protein similar to vertebrate
  misc_feature (1)..(253): Homolog of NCBI NO: 3218521 NR Description: /prediction=(method:''genefinder'',

SEQ ID NO: 74216 - DNA, 1488 bp, Arabidopsis thaliana
  misc_feature (1)..(1488): Ceres Seq. ID no. 4997173
  misc_feature: MA Experiment ID: 20000440 Result: Up-regulated in Transcription
  misc_feature: MA Experiment 20000440 PARAMETER Experiment Name: At_Closed-Flower__Sub_P Parameter: Tissue Value: Closed Flower vs. Whole Plant
atgatagcagccgcagtgcattaccgtctgcggaggctacgtgacaccaaaatcatccctcgtctcaaatcatctcacaaacacaaaggccatgagaaactcgagagattctctcattacgtcgcaaggcaaatgggattcaaggacagaagagagtgtccaaatctctgcaagttagcagcagaatacataagtaaatctgaatgttgtgaagaagacatttacagctttttctctgaagaacctgatgctgataccctcttcattaagcttgttgaggagtttgaaagatgcattctcagctactttgcgtttcactggagccacgccgatctcatgattactcaggtactgagcgctgatgctgagccaaagaggaagctgaaacaaattgtgatggcagctacaagggagctgaggattaagagggtgactaagaacttaaaagtggcaagagtgttcaacactttggtagaggaaatgagagcaatggggctcgcgtctgtggatgactcgcagtgcacagaagttatggcaccagtggctcacaaagacagaagtccagtgctactccttatgggtggtgggatgggtgcagggaaaagcactgtgcttaaggacatactcaaagaagcattctgggcaggagcagactctgtggtgattgaagctgatgctttcaaagagtctgatgtcatttacagagccttaagctctcgtggccatgtcgatatgatccagacagctgaattggttcatcagtcatcaacagatgcagcttcatccctgctagtgacggctctgaacgaaggaagggatgtgataatggatgggacactctcttgggtaccttttgtggtgcagacaataacaatggcgaggaacgtacaccgacaccattacagaatgggagctggatacaaggttggtgatgatggagttataacagagaactattgggaacgaattggtgaaaggcaacagattcaagaggatggtcgtaggagaaaaccgtatagaatagaactagttggagttgtgtgcgatgcgtatttagcagttataagaggcattaggagagctatcatgtgcagaagagcagttagggtgagatcacagctgagatctcacaaacggtttgcggaagcatttcctacatattgcagccttgtcgacaatgctaggctctactgcactaacgcgctggaaggctctccaaagctgataggttggaaagaaaaggaaaagacattgctagtagatacagaagagatagattgtttgaagcgagtaggagggttaaacgagaacgcaggctccatttacgagctctatagacaacccaaccctgcttgtgaagcaggttcaatctggaaagacattgttctttcaccttcaaggtttagcattcaacaggaactcaaatattccattcagaaagttgaaaaaagatctaaacaacatctcatcaacaacaccaaaagctga

SEQ ID NO: 74217 - protein, 495 aa, Arabidopsis thaliana
  peptide (1)..(495): Ceres Seq. ID no. 4997174
  misc_feature (1)..(495): Homolog of NCBI NO: 15222183 NR Description: unknown protein; protein id: At1g06750.1
  misc_feature (1)..(489): Homolog of NCBI NO: 15224537 NR Description: unknown protein; protein id: At2g30630.1
  misc_feature (1)..(489): Homolog of NCBI NO: 28207050 NR Description: hypothetical protein [Arabidopsis thaliana]
  misc_feature (52)..(489): Homolog of NCBI NO: 28207052 NR Description: hypothetical protein [Arabidopsis thaliana]
  misc_feature (1)..(212): Homolog of NCBI NO: 25406934 NR Description: hypothetical protein [imported] - Arabidopsis >gi|7523704|gb|AAF63143.1|AC011001_13 Hypothetical protein
  misc_feature (389)..(495): Homolog of NCBI NO: 25406934 NR Description: hypothetical protein [imported] - Arabidopsis >gi|7523704|gb|AAF63143.1|AC011001_13 Hypothetical protein
  misc_feature (216)..(251): Homolog of NCBI NO: 25406934 NR Description: hypothetical protein [imported] - Arabidopsis >gi|7523704|gb|AAF63143.1|AC011001_13 Hypothetical protein
  misc_feature (289)..(404): Homolog of NCBI NO: 25406934 NR Description: hypothetical protein [imported] - Arabidopsis >gi|7523704|gb|AAF63143.1|AC011001_13 Hypothetical protein
  misc_feature (14)..(483): Homolog of NCBI NO: 99733 NR Description: hypothetical protein H1flk - Arabidopsis thaliana
  misc_feature (14)..(483): Homolog of NCBI NO: 15219698 NR Description: unknown protein; protein id: At1g04280.1
MIAAAVHYRLRRLRDTKIIPRLKSSHKHKGHEKLERFSHYVARQMGFKDRRECPNLCKLAAEYISKSECCEEDIYSFFSEEPDADTLFIKLVEEFERCILSYFAFHWSHADLMITQVLSADAEPKRKLKQIVMAATRELRIKRVTKNLKVARVFNTLVEEMRAMGLASVDDSQCTEVMAPVAHKDRSPVLLLMGGGMGAGKSTVLKDILKEAFWAGADSVVIEADAFKESDVIYRALSSRGHVDMIQTAELVHQSSTDAASSLLVTALNEGRDVIMDGTLSWVPFVVQTITMARNVHRHHYRMGAGYKVGDDGVITENYWERIGERQQIQEDGRRRKPYRIELVGVVCDAYLAVIRGIRRAIMCRRAVRVRSQLRSHKRFAEAFPTYCSLVDNARLYCTNALEGSPKLIGWKEKEKTLLVDTEEIDCLKRVGGLNENAGSIYELYRQPNPACEAGSIWKDIVLSPSRFSIQQELKYSIQKVEKRSKQHLINNTKS

SEQ ID NO: 74218 - protein, 451 aa, Arabidopsis thaliana
  peptide (1)..(451): Ceres Seq. ID no. 4997175
  misc_feature (1)..(451): Homolog of NCBI NO: 15222183 NR Description: unknown protein; protein id: At1g06750.1
  misc_feature (1)..(445): Homolog of NCBI NO: 15224537 NR Description: unknown protein; protein id: At2g30630.1
  misc_feature (1)..(445): Homolog of NCBI NO: 28207050 NR Description: hypothetical protein [Arabidopsis thaliana]
  misc_feature (8)..(445): Homolog of NCBI NO: 28207052 NR Description: hypothetical protein [Arabidopsis thaliana]
  misc_feature (1)..(168): Homolog of NCBI NO: 25406934 NR Description: hypothetical protein [imported] - Arabidopsis >gi|7523704|gb|AAF63143.1|AC011001_13 Hypothetical protein
  misc_feature (345)..(451): Homolog of NCBI NO: 25406934 NR Description: hypothetical protein [imported] - Arabidopsis >gi|7523704|gb|AAF63143.1|AC011001_13 Hypothetical protein
  misc_feature (172)..(207): Homolog of NCBI NO: 25406934 NR Description: hypothetical protein [imported] - Arabidopsis >gi|7523704|gb|AAF63143.1|AC011001_13 Hypothetical protein
  misc_feature (245)..(360): Homolog of NCBI NO: 25406934 NR Description: hypothetical protein [imported] - Arabidopsis >gi|7523704|gb|AAF63143.1|AC011001_13 Hypothetical protein
  misc_feature (1)..(439): Homolog of NCBI NO: 99733 NR Description: hypothetical protein H1flk - Arabidopsis thaliana
  misc_feature (1)..(439): Homolog of NCBI NO: 15219698 NR Description: unknown protein; protein id: At1g04280.1
MGFKDRRECPNLCKLAAEYISKSECCEEDIYSFFSEEPDADTLFIKLVEEFERCILSYFAFHWSHADLMITQVLSADAEPKRKLKQIVMAATRELRIKRVTKNLKVARVFNTLVEEMRAMGLASVDDSQCTEVMAPVAHKDRSPVLLLMGGGMGAGKSTVLKDILKEAFWAGADSVVIEADAFKESDVIYRALSSRGHVDMIQTAELVHQSSTDAASSLLVTALNEGRDVIMDGTLSWVPFVVQTITMARNVHRHHYRMGAGYKVGDDGVITENYWERIGERQQIQEDGRRRKPYRIELVGVVCDAYLAVIRGIRRAIMCRRAVRVRSQLRSHKRFAEAFPTYCSLVDNARLYCTNALEGSPKLIGWKEKEKTLLVDTEEIDCLKRVGGLNENAGSIYELYRQPNPACEAGSIWKDIVLSPSRFSIQQELKYSIQKVEKRSKQHLINNTKS

SEQ ID NO: 74219 - protein, 383 aa, Arabidopsis thaliana
  peptide (1)..(383): Ceres Seq. ID no. 4997176
  misc_feature (1)..(383): Homolog of NCBI NO: 15222183 NR Description: unknown protein; protein id: At1g06750.1
  misc_feature (1)..(377): Homolog of NCBI NO: 15224537 NR Description: unknown protein; protein id: At2g30630.1
  misc_feature (1)..(377): Homolog of NCBI NO: 28207050 NR Description: hypothetical protein [Arabidopsis thaliana]
  misc_feature (1)..(377): Homolog of NCBI NO: 28207052 NR Description: hypothetical protein [Arabidopsis thaliana]
  misc_feature (1)..(100): Homolog of NCBI NO: 25406934 NR Description: hypothetical protein [imported] - Arabidopsis >gi|7523704|gb|AAF63143.1|AC011001_13 Hypothetical protein
  misc_feature (277)..(383): Homolog of NCBI NO: 25406934 NR Description: hypothetical protein [imported] - Arabidopsis >gi|7523704|gb|AAF63143.1|AC011001_13 Hypothetical protein
  misc_feature (104)..(139): Homolog of NCBI NO: 25406934 NR Description: hypothetical protein [imported] - Arabidopsis >gi|7523704|gb|AAF63143.1|AC011001_13 Hypothetical protein
  misc_feature (177)..(292): Homolog of NCBI NO: 25406934 NR Description: hypothetical protein [imported] - Arabidopsis >gi|7523704|gb|AAF63143.1|AC011001_13 Hypothetical protein
  misc_feature (1)..(371): Homolog of NCBI NO: 99733 NR Description: hypothetical protein H1flk - Arabidopsis thaliana
  misc_feature (1)..(371): Homolog of NCBI NO: 15219698 NR Description: unknown protein; protein id: At1g04280.1
MITQVLSADAEPKRKLKQIVMAATRELRIKRVTKNLKVARVFNTLVEEMRAMGLASVDDSQCTEVMAPVAHKDRSPVLLLMGGGMGAGKSTVLKDILKEAFWAGADSVVIEADAFKESDVIYRALSSRGHVDMIQTAELVHQSSTDAASSLLVTALNEGRDVIMDGTLSWVPFVVQTITMARNVHRHHYRMGAGYKVGDDGVITENYWERIGERQQIQEDGRRRKPYRIELVGVVCDAYLAVIRGIRRAIMCRRAVRVRSQLRSHKRFAEAFPTYCSLVDNARLYCTNALEGSPKLIGWKEKEKTLLVDTEEIDCLKRVGGLNENAGSIYELYRQPNPACEAGSIWKDIVLSPSRFSIQQELKYSIQKVEKRSKQHLINNTKS

SEQ ID NO: 74220 - DNA, 1173 bp, Arabidopsis thaliana
  misc_feature (1)..(1173): Ceres Seq. ID no. 4997839
  misc_feature: MA Experiment ID: 20000179 Result: Up-regulated in Transcription
  misc_feature: MA Experiment 20000179 PARAMETER Experiment Name: At_Germinating_Seeds_P Parameter: Age (hr) Value: 6 vs. 0
  misc_feature: MA Experiment 20000179 PARAMETER Experiment Name: At_Germinating_Seeds_P Parameter: Tissue Value: Germinating Seeds
atgtcgagcttattacactgtagaaatgtcgtagattgtgcgtttacttcttccactgttcgtcgcattgtcaatttagggtttttagtgggtagaataagaacgttgtgttcagtgtcacaagtgaaatcagagaatctcgaaaagcaaaaaccatgtttggaatcttttacagtttcttatctcgtggattcttgtggactgtctttggaatctgctaaatcgaattccagattcgtcaaattggtttcgtccaagaaaccagactctgttcttgctctcttcaaggaccatggcttcaccaatgaccagatcaccagtgtcatcaaatcctttcctcgtgttctgtcactgagcccggaagatgtaatctcgcccaagctcatgtttttcagttctatcgggttttcgacctcggatactgcgaaaatgatctcttcttccccgaaaatgctatcatatagcttgcacaaaagattgatcccttgctatgattccctcaagagcatactcgttgaggaagaaagtgttgtcaagtgtctcaagcgtggaatcagatgtttctcattgaagattacacattgtgtgtctcttcgtgtctccatttgtagagagcttggagttcctgacaaaagcatcaagtggttggttcaagcgtctccattcacttttttctctcgtgagagaagattcaacgaggtcttaaacagagtttgcagctacggttttgacccgaaaaaggcgggttttgttcacgctatggtagcctttgattgcacgagtgaatcagcaatggagcggaaatttaagttgttccaatgttttggttggtctaaagaagatttcgtcgcagcgatcatgagattcccaaactgtgtgacggtttcagatgagaagataatgtacacattggagtaccttgtaaacaacattggtctgcaagctcgtgacattgttgcaagaccggtggtgttatctctgagcatggagaagagaatcaaaccgaggaaccaggtcatctctttgcttctctccaaaggacttgtgaagaaggaagacatcaactatttcactatactaaagctgaaaagctccgagttcatggataagtttgtgctgaaatatcaggatgagatgccacaacttgtacaaccctttacaagtaatcgatga

SEQ ID NO: 74221 - protein, 390 aa, Arabidopsis thaliana
  peptide (1)..(390): Ceres Seq. ID no. 4997840
  misc_feature (92)..(369): Pfam Name: mTERF Pfam Description: mTERF
  misc_feature (1)..(390): Homolog of NCBI NO: 15218140 NR Description: hypothetical protein; protein id: At1g21150.1
  misc_feature (1)..(390): Homolog of NCBI NO: 25511650 NR Description: T22I11.2 protein - Arabidopsis thaliana
  misc_feature (43)..(383): Homolog of NCBI NO: 18415647 NR Description: expressed protein; protein id: At5g07900.1, by cDNA: 22350., supported by cDNA: gi_13878064, supported by gi_17104654 [Arabidopsis thaliana] >gi|11281400|pir||T45615
  misc_feature (78)..(381): Homolog of NCBI NO: 15238313 NR Description: putative protein; protein id: At5g64950.1, by cDNA: 142672. [Arabidopsis thaliana] emb|CAB62602.1~gene_id:MXK3.18~similar to unknown protein
  misc_feature (78)..(381): Homolog of NCBI NO: 21553423 NR Description: unknown [Arabidopsis thaliana]
  misc_feature (51)..(388): Homolog of NCBI NO: 34394750 NR Description: unknown protein [Oryza sativa (japonica
  misc_feature (56)..(340): Homolog of NCBI NO: 15220662 NR Description: hypothetical protein; protein id: At1g61970.1
  misc_feature (55)..(340): Homolog of NCBI NO: 15220664 NR Description: hypothetical protein; protein id: At1g61980.1
  misc_feature (56)..(317): Homolog of NCBI NO: 15220713 NR Description: hypothetical protein; protein id: At1g62120.1
  misc_feature (56)..(370): Homolog of NCBI NO: 15220660 NR Description: hypothetical protein; protein id: At1g61960.1
MSSLLHCRNVVDCAFTSSTVRRIVNLGFLVGRIRTLCSVSQVKSENLEKQKPCLESFTVSYLVDSCGLSLESAKSNSRFVKLVSSKKPDSVLALFKDHGFTNDQITSVIKSFPRVLSLSPEDVISPKLMFFSSIGFSTSDTAKMISSSPKMLSYSLHKRLIPCYDSLKSILVEEESVVKCLKRGIRCFSLKITHCVSLRVSICRELGVPDKSIKWLVQASPFTFFSRERRFNEVLNRVCSYGFDPKKAGFVHAMVAFDCTSESAMERKFKLFQCFGWSKEDFVAAIMRFPNCVTVSDEKIMYTLEYLVNNIGLQARDIVARPVVLSLSMEKRIKPRNQVISLLLSKGLVKKEDINYFTILKLKSSEFMDKFVLKYQDEMPQLVQPFTSNR

SEQ ID NO: 74222 - protein, 262 aa, Arabidopsis thaliana
  peptide (1)..(262): Ceres Seq. ID no. 4997841
  misc_feature (1)..(241): Pfam Name: mTERF Pfam Description: mTERF
  misc_feature (1)..(262): Homolog of NCBI NO: 15218140 NR Description: hypothetical protein; protein id: At1g21150.1
  misc_feature (1)..(262): Homolog of NCBI NO: 25511650 NR Description: T22I11.2 protein - Arabidopsis thaliana
  misc_feature (1)..(255): Homolog of NCBI NO: 18415647 NR Description: expressed protein; protein id: At5g07900.1, by cDNA: 22350., supported by cDNA: gi_13878064, supported by gi_17104654 [Arabidopsis thaliana] >gi|11281400|pir||T45615
  misc_feature (1)..(253): Homolog of NCBI NO: 15238313 NR Description: putative protein; protein id: At5g64950.1, by cDNA: 142672. [Arabidopsis thaliana] emb|CAB62602.1~gene_id:MXK3.18~similar to unknown protein
  misc_feature (1)..(253): Homolog of NCBI NO: 21553423 NR Description: unknown [Arabidopsis thaliana]
  misc_feature (1)..(260): Homolog of NCBI NO: 34394750 NR Description: unknown protein [Oryza sativa (japonica
  misc_feature (1)..(212): Homolog of NCBI NO: 15220662 NR Description: hypothetical protein; protein id: At1g61970.1
  misc_feature (1)..(212): Homolog of NCBI NO: 15220664 NR Description: hypothetical protein; protein id: At1g61980.1
  misc_feature (1)..(189): Homolog of NCBI NO: 15220713 NR Description: hypothetical protein; protein id: At1g62120.1
  misc_feature (1)..(242): Homolog of NCBI NO: 15220660 NR Description: hypothetical protein; protein id: At1g61960.1
MFFSSIGFSTSDTAKMISSSPKMLSYSLHKRLIPCYDSLKSILVEEESVVKCLKRGIRCFSLKITHCVSLRVSICRELGVPDKSIKWLVQASPFTFFSRERRFNEVLNRVCSYGFDPKKAGFVHAMVAFDCTSESAMERKFKLFQCFGWSKEDFVAAIMRFPNCVTVSDEKIMYTLEYLVNNIGLQARDIVARPVVLSLSMEKRIKPRNQVISLLLSKGLVKKEDINYFTILKLKSSEFMDKFVLKYQDEMPQLVQPFTSNR

SEQ ID NO: 74223 - protein, 247 aa, Arabidopsis thaliana
  peptide (1)..(247): Ceres Seq. ID no. 4997842
  misc_feature (1)..(226): Pfam Name: mTERF Pfam Description: mTERF
  misc_feature (1)..(247): Homolog of NCBI NO: 15218140 NR Description: hypothetical protein; protein id: At1g21150.1
  misc_feature (1)..(247): Homolog of NCBI NO: 25511650 NR Description: T22I11.2 protein - Arabidopsis thaliana
  misc_feature (1)..(240): Homolog of NCBI NO: 18415647 NR Description: expressed protein; protein id: At5g07900.1, by cDNA: 22350., supported by cDNA: gi_13878064, supported by gi_17104654 [Arabidopsis thaliana] >gi|11281400|pir||T45615
  misc_feature (1)..(238): Homolog of NCBI NO: 15238313 NR Description: putative protein; protein id: At5g64950.1, by cDNA: 142672. [Arabidopsis thaliana] emb|CAB62602.1~gene_id:MXK3.18~similar to unknown protein
  misc_feature (1)..(238): Homolog of NCBI NO: 21553423 NR Description: unknown [Arabidopsis thaliana]
  misc_feature (1)..(245): Homolog of NCBI NO: 34394750 NR Description: unknown protein [Oryza sativa (japonica
  misc_feature (1)..(197): Homolog of NCBI NO: 15220662 NR Description: hypothetical protein; protein id: At1g61970.1
  misc_feature (1)..(197): Homolog of NCBI NO: 15220664 NR Description: hypothetical protein; protein id: At1g61980.1
  misc_feature (1)..(174): Homolog of NCBI NO: 15220713 NR Description: hypothetical protein; protein id: At1g62120.1
  misc_feature (1)..(227): Homolog of NCBI NO: 15220660 NR Description: hypothetical protein; protein id: At1g61960.1
MISSSPKMLSYSLHKRLIPCYDSLKSILVEEESVVKCLKRGIRCFSLKITHCVSLRVSICRELGVPDKSIKWLVQASPFTFFSRERRFNEVLNRVCSYGFDPKKAGFVHAMVAFDCTSESAMERKFKLFQCFGWSKEDFVAAIMRFPNCVTVSDEKIMYTLEYLVNNIGLQARDIVARPVVLSLSMEKRIKPRNQVISLLLSKGLVKKEDINYFTILKLKSSEFMDKFVLKYQDEMPQLVQPFTSNR

SEQ ID NO: 74224 - DNA, 2442 bp, Arabidopsis thaliana
  misc_feature (1)..(2442): Ceres Seq. ID no. 4998133
  misc_feature: MA Experiment ID: 20000180 Result: Up-regulated in Transcription
  misc_feature: MA Experiment 20000180 PARAMETER Experiment Name: At_Germinating_Seeds_P Parameter: Age (hr) Value: 24 vs. 0
  misc_feature: MA Experiment 20000180 PARAMETER Experiment Name: At_Germinating_Seeds_P Parameter: Tissue Value: Germinating Seeds
  misc_feature: MA Experiment ID: 20000185 Result: Up-regulated in Transcription
  misc_feature: MA Experiment 20000185 PARAMETER Experiment Name: At_Roots__P Parameter: Age (day) Value: 7 vs. 21
  misc_feature: MA Experiment 20000185 PARAMETER Experiment Name: At_Roots__P Parameter: Organism Value: A. thaliana
  misc_feature: MA Experiment 20000185 PARAMETER Experiment Name: At_Roots__P Parameter: Tissue Value: Roots vs. Whole Plant
  misc_feature: MA Experiment ID: 20000267 Result: Down-regulated in Transcription
  misc_feature: MA Experiment 20000267 PARAMETER Experiment Name: At_Drought_P Parameter: Age (day) Value: 7
  misc_feature: MA Experiment 20000267 PARAMETER Experiment Name: At_Drought_P Parameter: Organism Value: A. thaliana
  misc_feature: MA Experiment 20000267 PARAMETER Experiment Name: At_Drought_P Parameter: Plant Line Value: WS
  misc_feature: MA Experiment 20000267 PARAMETER Experiment Name: At_Drought_P Parameter: Timepoint (hr) Value: 6
  misc_feature: MA Experiment 20000267 PARAMETER Experiment Name: At_Drought_P Parameter: Tissue Value: Whole Plant
  misc_feature: MA Experiment 20000267 PARAMETER Experiment Name: At_Drought_P Parameter: Treatment Value: Drought vs. No Drought
  misc_feature: MA Experiment ID: 20000436 Result: Down-regulated in Transcription
  misc_feature: MA Experiment 20000436 PARAMETER Experiment Name: At_Drought_P Parameter: Age (day) Value: 7
  misc_feature: MA Experiment 20000436 PARAMETER Experiment Name: At_Drought_P Parameter: Organism Value: A. thaliana
  misc_feature: MA Experiment 20000436 PARAMETER Experiment Name: At_Drought_P Parameter: Plant Line Value: WS
  misc_feature: MA Experiment 20000436 PARAMETER Experiment Name: At_Drought_P Parameter: Timepoint (hr) Value: 12
  misc_feature: MA Experiment 20000436 PARAMETER Experiment Name: At_Drought_P Parameter: Tissue Value: Whole Plant
  misc_feature: MA Experiment 20000436 PARAMETER Experiment Name: At_Drought_P Parameter: Treatment Value: Drought vs. No Drought
  misc_feature: MA Experiment ID: 20000437 Result: Down-regulated in Transcription
  misc_feature: MA Experiment 20000437 PARAMETER Experiment Name: At_Drought_P Parameter: Age (day) Value: 8
  misc_feature: MA Experiment 20000437 PARAMETER Experiment Name: At_Drought_P Parameter: Organism Value: A. thaliana
  misc_feature: MA Experiment 20000437 PARAMETER Experiment Name: At_Drought_P Parameter: Plant Line Value: WS
  misc_feature: MA Experiment 20000437 PARAMETER Experiment Name: At_Drought_P Parameter: Timepoint (hr) Value: 24
  misc_feature: MA Experiment 20000437 PARAMETER Experiment Name: At_Drought_P Parameter: Tissue Value: Whole Plant
  misc_feature: MA Experiment 20000437 PARAMETER Experiment Name: At_Drought_P Parameter: Treatment Value: Drought vs. No Drought
  misc_feature: MA Experiment ID: 20000439 Result: Up-regulated in Transcription
  misc_feature: MA Experiment 20000439 PARAMETER Experiment Name: At_Roots__P Parameter: Age (day) Value: 14 vs. 21
  misc_feature: MA Experiment 20000439 PARAMETER Experiment Name: At_Roots__P Parameter: Organism Value: A. thaliana
  misc_feature: MA Experiment 20000439 PARAMETER Experiment Name: At_Roots__P Parameter: Tissue Value: Roots vs. Whole Plant
  misc_feature: MA Experiment ID: 20000794 Result: Up-regulated in Transcription
  misc_feature: MA Experiment 20000794 PARAMETER Experiment Name: At_Petals_P Parameter: Age (day) Value: 23-25 days
  misc_feature: MA Experiment 20000794 PARAMETER Experiment Name: At_Petals_P Parameter: Plant Line Value: WS
  misc_feature: MA Experiment 20000794 PARAMETER Experiment Name: At_Petals_P Parameter: Tissue Value: Petals vs. Whole plant
  misc_feature: MA Experiment ID: 20001910 Result: Up-regulated in Transcription
  misc_feature: MA Experiment 20001910 PARAMETER Experiment Name: At_Drought_Reproduction_P Parameter: Age (day) Value: 37
  misc_feature: MA Experiment 20001910 PARAMETER Experiment Name: At_Drought_Reproduction_P Parameter: Organism Value: A. thaliana
  misc_feature: MA Experiment 20001910 PARAMETER Experiment Name: At_Drought_Reproduction_P Parameter: Plant Line Value: WS
  misc_feature: MA Experiment 20001910 PARAMETER Experiment Name: At_Drought_Reproduction_P Parameter: Timepoint (day) Value: 7
  misc_feature: MA Experiment 20001910 PARAMETER Experiment Name: At_Drought_Reproduction_P Parameter: Tissue Value: Flowers
  misc_feature: MA Experiment 20001910 PARAMETER Experiment Name: At_Drought_Reproduction_P Parameter: Treatment Value: Drought vs. No Drought
atgggaggtagtagcggcggcggagtttcttatcgtagcggcggcgaatcagacgtggaattagaggattacgaggttgatgatttcagagatgggattgtagaatcgcgaggaaacagattcaatcctctcaccaatttcttagggttagacttcgccggcggtagcggtggaaagttcaccgtcattaatggaatcagagatatctccagaggctccattgttcatcccgataaccggtggtacaaggcgtggacgatgtttatattgatatgggcactttattcttccttcttcactccattggaattcggattcttcaggggattaccagagaatctgttcatcctcgatatcgctggccaaatcgctttcttagtagatattgtcttgacattcttcgttgcttatcgtgatagccgaacttatagaatgatctataaacgcagctcaattgctttacggtacttaaaatcaacttttataattgacttacttgcttgcatgccatgggatatcatctacaaggctgcaggcgaaaaagaagaagtgagatacctattgttgataaggctatatcgagttcatagagtaatcctgtttttccacaaaatggagaaagatataagaatcaattacctttttacaagaatcgtcaagcttatattcgtcgagctttattgcactcacaccgcagcttgtatcttctattacttggccacgacgcttcctgcttctcaagaagggtacacttggattggaagcttgaagttaggagattacagttactcgaagtttagagagatcgatctctggactcgatacactacttctatgtactttgcagttgttactatggcaactgttggttatggagatatacacgcggttaatatgcgggaaatgatattcgcgatggtctacatttcattcgatatgattctaggagcttacttgattggtaacatgacagctttgattgtaaaaggttcgaaaacagagagattccgggataagatggctgatatcatgcggtatatgaaccgaaacaaactcggtaggaacatccgtggtcagattaccggacatttgcggttgcagtacgaaagcagctacactgaagcagctgttcttcaagacattcctgtctctatccgtgctaagattgcgcaaactttatacttgccgtatattgagaaagttcctctctttcgcggatgctcatctgaattcattaaccagattgttataagacttcatgaagagttctttcttcctggagaagttataatggagcaaggaagcgtcgttgatcagctctactttgtttgtcacggtgtattggaggagataggtataacaaaggatggatctgaagaaatagtggcagttctacaaccagatcattcttttggagagatttcaatcctctgcaatattcctcagccttacacggttagagttgcagagctatgtcggattctaaggcttgacaagcaatctttcatgaacatactcgagatatttttccatgatggacggaggattctcaacaatctgcttgaagggaaagaatctaatgtccggattaagcaactagaatccgatataacctttcatatcagtaaacaagaggcagagctagctctgaagttgaatagtgcggctttctacggtgatctttatcagcttaagagtttgattcgagctggaggtgacccgaataagacagattatgacggaagatcgcctttgcatcttgcagcctctagaggatatgaagatattacattatatcttatacaagaatcagttgatgtaaatatcaaagataaattggggagcacacctttactagaagcaatcaagaatgggaatgatcgtgttgcggcgttgcttgttaaagaaggagctacgttgaacatagagaacgcagggactttcctttgcaccgtggttgcgaaaggagacagcgatttcttgaaacggcttcttagtaacggaattgatcctaattccaaagattatgatcacagaacacctcttcatgtagctgcctctgaaggattttatgtcttggcgatccaattggtagaagcaagtgctaatgttcttgcaaaagacagatggggaaacacacctcttgatgaagctttgggttgtgggaacaagatgttgataaagttactcgaagacgctaagaattctcaaatctcttcgtttccgagtggctccaaagagcctaaagataaagtctataagaagaaatgtacagtgtatttttcacatcctggtgattcgaaagagaaaagaaggcgcgggattgtactgtgggtacctcgaagcatcgaggagcttataagaacagcaaaggagcagctgaatgttccggaggcttcttgtgtattatctgaagatgaagccaaaattattgatatttga

SEQ ID NO: 74225 - protein, 813 aa, Arabidopsis thaliana
  peptide (1)..(813): Ceres Seq. ID no. 4998134
  misc_feature (113)..(323): Pfam Name: Ion transport protein Pfam Description: Ion transport protein
  misc_feature (65)..(813): Homolog of NCBI NO: 27651624 NR Description: shaker-like potassium channel [Vitis vinifera]
  misc_feature (20)..(813): Homolog of NCBI NO: 11414742 NR Description: guard cell outward rectifying K+ channel
  misc_feature (10)..(810): Homolog of NCBI NO: 10443349 NR Description: outwardly rectifying potassium channel [Samanea
  misc_feature (20)..(813): Homolog of NCBI NO: 30693099 NR Description: guard cell outward rectifying K+ channel (GORK)
  misc_feature (7)..(813): Homolog of NCBI NO: 9955728 NR Description: outward rectifying potassium channel [Populus
  misc_feature (22)..(734): Homolog of NCBI NO: 38344540 NR Description: OSJNBa0027P08.8 [Oryza sativa (japonica
  misc_feature (71)..(748): Homolog of NCBI NO: 99746 NR Description: potassium channel protein AKT1 - Arabidopsis
  misc_feature (71)..(748): Homolog of NCBI NO: 15225768 NR Description: K+ transporter, AKT1; protein id: At2g26650.1, by cDNA: gi_2569932 [Arabidopsis thaliana]
  misc_feature (71)..(714): Homolog of NCBI NO: 7110220 NR Description: AKT1-like potassium channel [Triticum aestivum]
  misc_feature (67)..(748): Homolog of NCBI NO: 8896127 NR Description: putative potassium channel protein Mkt1p
MGGSSGGGVSYRSGGESDVELEDYEVDDFRDGIVESRGNRFNPLTNFLGLDFAGGSGGKFTVINGIRDISRGSIVHPDNRWYKAWTMFILIWALYSSFFTPLEFGFFRGLPENLFILDIAGQIAFLVDIVLTFFVAYRDSRTYRMIYKRSSIALRYLKSTFIIDLLACMPWDIIYKAAGEKEEVRYLLLIRLYRVHRVILFFHKMEKDIRINYLFTRIVKLIFVELYCTHTAACIFYYLATTLPASQEGYTWIGSLKLGDYSYSKFREIDLWTRYTTSMYFAVVTMATVGYGDIHAVNMREMIFAMVYISFDMILGAYLIGNMTALIVKGSKTERFRDKMADIMRYMNRNKLGRNIRGQITGHLRLQYESSYTEAAVLQDIPVSIRAKIAQTLYLPYIEKVPLFRGCSSEFINQIVIRLHEEFFLPGEVIMEQGSVVDQLYFVCHGVLEEIGITKDGSEEIVAVLQPDHSFGEISILCNIPQPYTVRVAELCRILRLDKQSFMNILEIFFHDGRRILNNLLEGKESNVRIKQLESDITFHISKQEAELALKLNSAAFYGDLYQLKSLIRAGGDPNKTDYDGRSPLHLAASRGYEDITLYLIQESVDVNIKDKLGSTPLLEAIKNGNDRVAALLVKEGATLNIENAGTFLCTVVAKGDSDFLKRLLSNGIDPNSKDYDHRTPLHVAASEGFYVLAIQLVEASANVLAKDRWGNTPLDEALGCGNKMLIKLLEDAKNSQISSFPSGSKEPKDKVYKKKCTVYFSHPGDSKEKRRRGIVLWVPRSIEELIRTAKEQLNVPEASCVLSEDEAKIIDI

SEQ ID NO: 74226 - protein, 727 aa, Arabidopsis thaliana
  peptide (1)..(727): Ceres Seq. ID no. 4998135
  misc_feature (27)..(237): Pfam Name: Ion transport protein Pfam Description: Ion transport protein
  misc_feature (1)..(727): Homolog of NCBI NO: 27651624 NR Description: shaker-like potassium channel [Vitis vinifera]
  misc_feature (1)..(727): Homolog of NCBI NO: 11414742 NR Description: guard cell outward rectifying K+ channel
  misc_feature (1)..(724): Homolog of NCBI NO: 10443349 NR Description: outwardly rectifying potassium channel [Samanea
  misc_feature (1)..(727): Homolog of NCBI NO: 30693099 NR Description: guard cell outward rectifying K+ channel (GORK)
  misc_feature (1)..(727): Homolog of NCBI NO: 9955728 NR Description: outward rectifying potassium channel [Populus
  misc_feature (1)..(648): Homolog of NCBI NO: 38344540 NR Description: OSJNBa0027P08.8 [Oryza sativa (japonica
  misc_feature (1)..(662): Homolog of NCBI NO: 99746 NR Description: potassium channel protein AKT1 - Arabidopsis
  misc_feature (1)..(662): Homolog of NCBI NO: 15225768 NR Description: K+ transporter, AKT1; protein id: At2g26650.1, by cDNA: gi_2569932 [Arabidopsis thaliana]
  misc_feature (1)..(628): Homolog of NCBI NO: 7110220 NR Description: AKT1-like potassium channel [Triticum aestivum]
  misc_feature (1)..(662): Homolog of NCBI NO: 8896127 NR Description: putative potassium channel protein Mkt1p
MFILIWALYSSFFTPLEFGFFRGLPENLFILDIAGQIAFLVDIVLTFFVAYRDSRTYRMIYKRSSIALRYLKSTFIIDLLACMPWDIIYKAAGEKEEVRYLLLIRLYRVHRVILFFHKMEKDIRINYLFTRIVKLIFVELYCTHTAACIFYYLATTLPASQEGYTWIGSLKLGDYSYSKFREIDLWTRYTTSMYFAVVTMATVGYGDIHAVNMREMIFAMVYISFDMILGAYLIGNMTALIVKGSKTERFRDKMADIMRYMNRNKLGRNIRGQITGHLRLQYESSYTEAAVLQDIPVSIRAKIAQTLYLPYIEKVPLFRGCSSEFINQIVIRLHEEFFLPGEVIMEQGSVVDQLYFVCHGVLEEIGITKDGSEEIVAVLQPDHSFGEISILCNIPQPYTVRVAELCRILRLDKQSFMNILEIFFHDGRRILNNLLEGKESNVRIKQLESDITFHISKQEAELALKLNSAAFYGDLYQLKSLIRAGGDPNKTDYDGRSPLHLAASRGYEDITLYLIQESVDVNIKDKLGSTPLLEAIKNGNDRVAALLVKEGATLNIENAGTFLCTVVAKGDSDFLKRLLSNGIDPNSKDYDHRTPLHVAASEGFYVLAIQLVEASANVLAKDRWGNTPLDEALGCGNKMLIKLLEDAKNSQISSFPSGSKEPKDKVYKKKCTVYFSHPGDSKEKRRRGIVLWVPRSIEELIRTAKEQLNVPEASCVLSEDEAKIIDI

SEQ ID NO: 74227 - protein, 669 aa, Arabidopsis thaliana
  peptide (1)..(669): Ceres Seq. ID no. 4998136
  misc_feature (1)..(179): Pfam Name: Ion transport protein Pfam Description: Ion transport protein
  misc_feature (1)..(669): Homolog of NCBI NO: 27651624 NR Description: shaker-like potassium channel [Vitis vinifera]
  misc_feature (1)..(669): Homolog of NCBI NO: 11414742 NR Description: guard cell outward rectifying K+ channel
  misc_feature (1)..(666): Homolog of NCBI NO: 10443349 NR Description: outwardly rectifying potassium channel [Samanea
  misc_feature (1)..(669): Homolog of NCBI NO: 30693099 NR Description: guard cell outward rectifying K+ channel (GORK)
  misc_feature (1)..(669): Homolog of NCBI NO: 9955728 NR Description: outward rectifying potassium channel [Populus
  misc_feature (1)..(590): Homolog of NCBI NO: 38344540 NR Description: OSJNBa0027P08.8 [Oryza sativa (japonica
  misc_feature (1)..(604): Homolog of NCBI NO: 99746 NR Description: potassium channel protein AKT1 - Arabidopsis
  misc_feature (1)..(604): Homolog of NCBI NO: 15225768 NR Description: K+ transporter, AKT1; protein id: At2g26650.1, by cDNA: gi_2569932 [Arabidopsis thaliana]
  misc_feature (1)..(570): Homolog of NCBI NO: 7110220 NR Description: AKT1-like potassium channel [Triticum aestivum]
  misc_feature (1)..(604): Homolog of NCBI NO: 8896127 NR Description: putative potassium channel protein Mkt1p
MIYKRSSIALRYLKSTFIIDLLACMPWDIIYKAAGEKEEVRYLLLIRLYRVHRVILFFHKMEKDIRINYLFTRIVKLIFVELYCTHTAACIFYYLATTLPASQEGYTWIGSLKLGDYSYSKFREIDLWTRYTTSMYFAVVTMATVGYGDIHAVNMREMIFAMVYISFDMILGAYLIGNMTALIVKGSKTERFRDKMADIMRYMNRNKLGRNIRGQITGHLRLQYESSYTEAAVLQDIPVSIRAKIAQTLYLPYIEKVPLFRGCSSEFINQIVIRLHEEFFLPGEVIMEQGSVVDQLYFVCHGVLEEIGITKDGSEEIVAVLQPDHSFGEISILCNIPQPYTVRVAELCRILRLDKQSFMNILEIFFHDGRRILNNLLEGKESNVRIKQLESDITFHISKQEAELALKLNSAAFYGDLYQLKSLIRAGGDPNKTDYDGRSPLHLAASRGYEDITLYLIQESVDVNIKDKLGSTPLLEAIKNGNDRVAALLVKEGATLNIENAGTFLCTVVAKGDSDFLKRLLSNGIDPNSKDYDHRTPLHVAASEGFYVLAIQLVEASANVLAKDRWGNTPLDEALGCGNKMLIKLLEDAKNSQISSFPSGSKEPKDKVYKKKCTVYFSHPGDSKEKRRRGIVLWVPRSIEELIRTAKEQLNVPEASCVLSEDEAKIIDI

SEQ ID NO: 74228 - DNA, 972 bp, Arabidopsis thaliana
  misc_feature (1)..(972): Ceres Seq. ID no. 4998579
  misc_feature: MA Experiment ID: 20000307 Result: Up-regulated in Transcription
  misc_feature: MA Experiment 20000307 PARAMETER Experiment Name: At_Germinating_Seeds_Sub_P Parameter: Age (hr) Value: 24 vs. 0
  misc_feature: MA Experiment 20000307 PARAMETER Experiment Name: At_Germinating_Seeds_Sub_P Parameter: Organism Value: A. thaliana
  misc_feature: MA Experiment 20000307 PARAMETER Experiment Name: At_Germinating_Seeds_Sub_P Parameter: Plant Line Value: WS
  misc_feature: MA Experiment 20000307 PARAMETER Experiment Name: At_Germinating_Seeds_Sub_P Parameter: Tissue Value: Germinating Seeds
  misc_feature: MA Experiment ID: 20000314 Result: Up-regulated in Transcription
  misc_feature: MA Experiment 20000314 PARAMETER Experiment Name: At_14day_Shoots-Roots_Sub_P Parameter: Age (day) Value: 14
  misc_feature: MA Experiment 20000314 PARAMETER Experiment Name: At_14day_Shoots-Roots_Sub_P Parameter: Organism Value: A. thaliana
  misc_feature: MA Experiment 20000314 PARAMETER Experiment Name: At_14day_Shoots-Roots_Sub_P Parameter: Plant Line Value: WS
  misc_feature: MA Experiment 20000314 PARAMETER Experiment Name: At_14day_Shoots-Roots_Sub_P Parameter: Tissue Value: Roots vs. Whole Plant
  misc_feature: MA Experiment ID: 20000347 Result: Up-regulated in Transcription
  misc_feature: MA Experiment 20000347 PARAMETER Experiment Name: At_2mM_SA_Sub_P Parameter: Age (day) Value: 14
  misc_feature: MA Experiment 20000347 PARAMETER Experiment Name: At_2mM_SA_Sub_P Parameter: Organism Value: A. thaliana
  misc_feature: MA Experiment 20000347 PARAMETER Experiment Name: At_2mM_SA_Sub_P Parameter: Plant Line Value: WS
  misc_feature: MA Experiment 20000347 PARAMETER Experiment Name: At_2mM_SA_Sub_P Parameter: Timepoint (hr) Value: 6
  misc_feature: MA Experiment 20000347 PARAMETER Experiment Name: At_2mM_SA_Sub_P Parameter: Tissue Value: Aerial
  misc_feature: MA Experiment 20000347 PARAMETER Experiment Name: At_2mM_SA_Sub_P Parameter: Treatment Value: 2mM SA vs. No Treatment
atggctgagatttctgatattactactcagacacaaaccgttgtcttggacatcgaaaactatcaatccattgatgattcccggtcgtcggatttatccgctcctcttgtgtccgtatcgttcgttcaaaagttgattggagagttcgtggggacattcactatgatatttgccggttgctcagccatcgtggtaaatgagacgtatggcaaaccggtgacacttcccggtatagctttggtatggggactagtcgtaacggttatgatctactcaattggtcatgtctctggtgcacatttcaaccctgctgtttctattgcctttgcctcttctaagaagttcccttttaatcaggttccggggtacattgccgctcaacttctcggatcgaccttagcggctgcagttctacggcttgtgttccatctagacgacgatgtttgtagcctcaaaggcgatgtttatgtgggaacatatccgtcaaactcaaatacgacctcgttcgtaatggagttcatcgctactttcaatctaatgtttgttatatctgctgtcgcaaccgataaacgggccaccgggtcattcgctggaatcgctattggcgcaaccatagtactcgacatccttttctccgggccaatttcgggagcatctatgaatccagcaagaagcttagggcctgcacttatatggggatgttataaggatttatggttatacatagtttcacccgtgatcggggcattatcaggtgcatggacttatggtttgttacgatcgacaaagaaatcatatagtgagattattcgtccaaattgcaataaagtatcttcgagagatcgccaagaagcttcccaagatgagatttgtgttctacgagtggttgatccggctaatcaaaactattttatatgttcatcacctactgatatcaatggcaaatgtaatgttacatgtaagttggcgtga

SEQ ID NO: 74229 - protein, 323 aa, Arabidopsis thaliana
  peptide (1)..(323): Ceres Seq. ID no. 4998580
  misc_feature (55)..(256): Pfam Name: Major intrinsic protein Pfam Description: Major intrinsic protein
  misc_feature (55)..(323): Homolog of NCBI NO: 15222501 NR Description: major intrinsic protein, putative; protein id: [Arabidopsis thaliana] >gi|25528259|pir||B86443 probable major
  misc_feature (1)..(119): Homolog of NCBI NO: 15226447 NR Description: putative major intrinsic (channel) protein; id: At2g21020.1 [Arabidopsis thaliana] >gi|25412009|pir||B84596
  misc_feature (37)..(271): Homolog of NCBI NO: 15234059 NR Description: major intrinsic protein (MIP)- like; protein id:
  misc_feature (37)..(271): Homolog of NCBI NO: 21536953 NR Description: major intrinsic protein (MIP)- like [Arabidopsis
  misc_feature (1)..(271): Homolog of NCBI NO: 2677614 NR Description: NLM1 protein (NodLikeMip1) [Arabidopsis thaliana]
  misc_feature (1)..(271): Homolog of NCBI NO: 18415224 NR Description: nodulin-26 - like protein; protein id: supported by cDNA: 109513., supported by cDNA: gi_17380643
  misc_feature (1)..(271): Homolog of NCBI NO: 25324917 NR Description: nodulin-26-like protein [imported] - Arabidopsis
  misc_feature (44)..(271): Homolog of NCBI NO: 7449725 NR Description: nodulin-26-like protein F13C5.200 - Arabidopsis
MAEISDITTQTQTVVLDIENYQSIDDSRSSDLSAPLVSVSFVQKLIGEFVGTFTMIFAGCSAIVVNETYGKPVTLPGIALVWGLVVTVMIYSIGHVSGAHFNPAVSIAFASSKKFPFNQVPGYIAAQLLGSTLAAAVLRLVFHLDDDVCSLKGDVYVGTYPSNSNTTSFVMEFIATFNLMFVISAVATDKRATGSFAGIAIGATIVLDILFSGPISGASMNPARSLGPALIWGCYKDLWLYIVSPVIGALSGAWTYGLLRSTKKSYSEIIRPNCNKVSSRDRQEASQDEICVLRVVDPANQNYFICSSPTDINGKCNVTCKLA

SEQ ID NO: 74230 - protein, 269 aa, Arabidopsis thaliana
  peptide (1)..(269): Ceres Seq. ID no. 4998581
  misc_feature (1)..(202): Pfam Name: Major intrinsic protein Pfam Description: Major intrinsic protein
  misc_feature (1)..(269): Homolog of NCBI NO: 15222501 NR Description: major intrinsic protein, putative; protein id: [Arabidopsis thaliana] >gi|25528259|pir||B86443 probable major
  misc_feature (1)..(65): Homolog of NCBI NO: 15226447 NR Description: putative major intrinsic (channel) protein; id: At2g21020.1 [Arabidopsis thaliana] >gi|25412009|pir||B84596
  misc_feature (1)..(217): Homolog of NCBI NO: 15234059 NR Description: major intrinsic protein (MIP)- like; protein id:
  misc_feature (1)..(217): Homolog of NCBI NO: 21536953 NR Description: major intrinsic protein (MIP)- like [Arabidopsis
  misc_feature (1)..(217): Homolog of NCBI NO: 2677614 NR Description: NLM1 protein (NodLikeMip1) [Arabidopsis thaliana]
  misc_feature (1)..(217): Homolog of NCBI NO: 18415224 NR Description: nodulin-26 - like protein; protein id: supported by cDNA: 109513., supported by cDNA: gi_17380643
  misc_feature (1)..(217): Homolog of NCBI NO: 25324917 NR Description: nodulin-26-like protein [imported] - Arabidopsis
  misc_feature (1)..(217): Homolog of NCBI NO: 7449725 NR Description: nodulin-26-like protein F13C5.200 - Arabidopsis
MIFAGCSAIVVNETYGKPVTLPGIALVWGLVVTVMIYSIGHVSGAHFNPAVSIAFASSKKFPFNQVPGYIAAQLLGSTLAAAVLRLVFHLDDDVCSLKGDVYVGTYPSNSNTTSFVMEFIATFNLMFVISAVATDKRATGSFAGIAIGATIVLDILFSGPISGASMNPARSLGPALIWGCYKDLWLYIVSPVIGALSGAWTYGLLRSTKKSYSEIIRPNCNKVSSRDRQEASQDEICVLRVVDPANQNYFICSSPTDINGKCNVTCKLA

SEQ ID NO: 74231 - protein, 235 aa, Arabidopsis thaliana
  peptide (1)..(235): Ceres Seq. ID no. 4998582
  misc_feature (1)..(168): Pfam Name: Major intrinsic protein Pfam Description: Major intrinsic protein
  misc_feature (1)..(235): Homolog of NCBI NO: 15222501 NR Description: major intrinsic protein, putative; protein id: [Arabidopsis thaliana] >gi|25528259|pir||B86443 probable major
  misc_feature (1)..(31): Homolog of NCBI NO: 15226447 NR Description: putative major intrinsic (channel) protein; id: At2g21020.1 [Arabidopsis thaliana] >gi|25412009|pir||B84596
  misc_feature (1)..(183): Homolog of NCBI NO: 15234059 NR Description: major intrinsic protein (MIP)- like; protein id:
  misc_feature (1)..(183): Homolog of NCBI NO: 21536953 NR Description: major intrinsic protein (MIP)- like [Arabidopsis
  misc_feature (1)..(183): Homolog of NCBI NO: 2677614 NR Description: NLM1 protein (NodLikeMip1) [Arabidopsis thaliana]
  misc_feature (1)..(183): Homolog of NCBI NO: 18415224 NR Description: nodulin-26 - like protein; protein id: supported by cDNA: 109513., supported by cDNA: gi_17380643
  misc_feature (1)..(183): Homolog of NCBI NO: 25324917 NR Description: nodulin-26-like protein [imported] - Arabidopsis
  misc_feature (1)..(183): Homolog of NCBI NO: 7449725 NR Description: nodulin-26-like protein F13C5.200 - Arabidopsis
MIYSIGHVSGAHFNPAVSIAFASSKKFPFNQVPGYIAAQLLGSTLAAAVLRLVFHLDDDVCSLKGDVYVGTYPSNSNTTSFVMEFIATFNLMFVISAVATDKRATGSFAGIAIGATIVLDILFSGPISGASMNPARSLGPALIWGCYKDLWLYIVSPVIGALSGAWTYGLLRSTKKSYSEIIRPNCNKVSSRDRQEASQDEICVLRVVDPANQNYFICSSPTDINGKCNVTCKLA

SEQ ID NO: 74232 - DNA, 942 bp, Arabidopsis thaliana
  misc_feature (1)..(942): Ceres Seq. ID no. 4998675
  misc_feature: MA Experiment ID: 20000180 Result: Down-regulated in Transcription
  misc_feature: MA Experiment 20000180 PARAMETER Experiment Name: At_Germinating_Seeds_P Parameter: Age (hr) Value: 24 vs. 0
  misc_feature: MA Experiment 20000180 PARAMETER Experiment Name: At_Germinating_Seeds_P Parameter: Tissue Value: Germinating Seeds
  misc_feature: MA Experiment ID: 20000184 Result: Down-regulated in Transcription
  misc_feature: MA Experiment 20000184 PARAMETER Experiment Name: At_Shoots__P Parameter: Age (day) Value: 7
  misc_feature: MA Experiment 20000184 PARAMETER Experiment Name: At_Shoots__P Parameter: Tissue Value: Shoots vs. Whole Plant
  misc_feature: MA Experiment ID: 20001557 Result: Up-regulated in Transcription
  misc_feature: MA Experiment 20001557 PARAMETER Experiment Name: At_Drought_Soil_Dry_P Parameter: Age (day) Value: 27
  misc_feature: MA Experiment 20001557 PARAMETER Experiment Name: At_Drought_Soil_Dry_P Parameter: Organism Value: A. thaliana
  misc_feature: MA Experiment 20001557 PARAMETER Experiment Name: At_Drought_Soil_Dry_P Parameter: Plant Line Value: WS
  misc_feature: MA Experiment 20001557 PARAMETER Experiment Name: At_Drought_Soil_Dry_P Parameter: Post Timepoint (hr) Value: 3
  misc_feature: MA Experiment 20001557 PARAMETER Experiment Name: At_Drought_Soil_Dry_P Parameter: Post-Treatment Value: Re-Water vs. No Drought
  misc_feature: MA Experiment 20001557 PARAMETER Experiment Name: At_Drought_Soil_Dry_P Parameter: Timepoint (day) Value: 13
  misc_feature: MA Experiment 20001557 PARAMETER Experiment Name: At_Drought_Soil_Dry_P Parameter: Treatment Value: Drought vs. No Drought
  misc_feature: MA Experiment ID: 20001558 Result: Up-regulated in Transcription
  misc_feature: MA Experiment 20001558 PARAMETER Experiment Name: At_Drought_Soil_Dry_P Parameter: Age (day) Value: 27
  misc_feature: MA Experiment 20001558 PARAMETER Experiment Name: At_Drought_Soil_Dry_P Parameter: Organism Value: A. thaliana
  misc_feature: MA Experiment 20001558 PARAMETER Experiment Name: At_Drought_Soil_Dry_P Parameter: Plant Line Value: WS
  misc_feature: MA Experiment 20001558 PARAMETER Experiment Name: At_Drought_Soil_Dry_P Parameter: Post Timepoint (hr) Value: 6
  misc_feature: MA Experiment 20001558 PARAMETER Experiment Name: At_Drought_Soil_Dry_P Parameter: Post-Treatment Value: Re-Water vs. No Drought
  misc_feature: MA Experiment 20001558 PARAMETER Experiment Name: At_Drought_Soil_Dry_P Parameter: Timepoint (day) Value: 13
  misc_feature: MA Experiment 20001558 PARAMETER Experiment Name: At_Drought_Soil_Dry_P Parameter: Treatment Value: Drought vs. No Drought
atggagacacaaattcatcaacttgagcaggaagcatataccgctgttttaagggcttttaaagcgcagtctgatgcgatttcttgggaaaaagaaagcttgataaccgaattgcgtaaagaattgagagtatctgatgatgaacatcgagagcttctcagtagggtcaataaggatgatactatccagaggataagagattggagacagggaggcgcaagccaaattactagacatgcaactattcagccttttgatgttcttcctagtcccactttctcagctgcccgaaagaaacagaaaacatttccatcttataatccatcaattggtgcgactggaaataggtcattcaataatcgtctggtatccagtggcatatcaggaaatgaatctgctgaagctctgatcggaagaaaagtgtggacaaaatggcctgaagataaccacttctatgaagcaattataacccagtacaatgcagatgagggtcggcatgctttggtgtatgatatacacgcagctaatgaaacgtgggaatgggttgatctcaaggagataccaccggaagacataagatgggatggggaggagagtggggtagctttaaacattggacatggaagtgcatccttccgtggcaacagaagaggccaaatccatggtggtagagggagaggaccaagaattcatcaaccaagaagggaacttgtaccgccaccaacacaacagaatggtagtggtgggcggagaacttcctctgatgatattgagttgttcaacacagactcgcttgtgaaggaggtggagagagttttcgattctacgcatcctgatccactcgagctcgacaaggccaagaaaatgctcaaggaacatgaacaggcactcattgctgccattgcaaggcttgctgatacttcggatggcgaaatggcgtaa

SEQ ID NO: 74233 - protein, 313 aa, Arabidopsis thaliana
  peptide (1)..(313): Ceres Seq. ID no. 4998676
  misc_feature (1)..(74): Pfam Name: ENT domain Pfam Description: ENT domain
  misc_feature (1)..(312): Homolog of NCBI NO: 9294111 NR Description: emb|CAB88266.1~gene_id:T23B7.8~similar to unknown
  misc_feature (1)..(312): Homolog of NCBI NO: 15229958 NR Description: unknown protein; protein id: At3g12140.1
  misc_feature (1)..(311): Homolog of NCBI NO: 15240146 NR Description: putative protein; protein id: At5g06780.1, by cDNA: 157058., supported by cDNA: gi_16226578 [Arabidopsis >gi|9759306|dbj|BAB09812.1|
  misc_feature (1)..(311): Homolog of NCBI NO: 21553685 NR Description: unknown [Arabidopsis thaliana]
  misc_feature (109)..(311): Homolog of NCBI NO: 38637206 NR Description: unknown protein [Oryza sativa (japonica
  misc_feature (1)..(109): Homolog of NCBI NO: 38637206 NR Description: unknown protein [Oryza sativa (japonica
  misc_feature (29)..(311): Homolog of NCBI NO: 11358228 NR Description: hypothetical protein T24H18.190 - Arabidopsis >gi|7630058|emb|CAB88266.1| putative protein [Arabidopsis
  misc_feature (29)..(311): Homolog of NCBI NO: 30684221 NR Description: expressed protein [Arabidopsis thaliana]
  misc_feature (91)..(215): Homolog of NCBI NO: 15224878 NR Description: hypothetical protein; protein id: At2g44440.1
  misc_feature (1)..(66): Homolog of NCBI NO: 15224878 NR Description: hypothetical protein; protein id: At2g44440.1
METQIHQLEQEAYTAVLRAFKAQSDAISWEKESLITELRKELRVSDDEHRELLSRVNKDDTIQRIRDWRQGGASQITRHATIQPFDVLPSPTFSAARKKQKTFPSYNPSIGATGNRSFNNRLVSSGISGNESAEALIGRKVWTKWPEDNHFYEAIITQYNADEGRHALVYDIHAANETWEWVDLKEIPPEDIRWDGEESGVALNIGHGSASFRGNRRGQIHGGRGRGPRIHQPRRELVPPPTQQNGSGGRRTSSDDIELFNTDSLVKEVERVFDSTHPDPLELDKAKKMLKEHEQALIAAIARLADTSDGEMA

SEQ ID NO: 74234 - DNA, 1365 bp, Arabidopsis thaliana
  misc_feature (1)..(1365): Ceres Seq. ID no. 4998936
  misc_feature: MA Experiment ID: 20000180 Result: Down-regulated in Transcription
  misc_feature: MA Experiment 20000180 PARAMETER Experiment Name: At_Germinating_Seeds_P Parameter: Age (hr) Value: 24 vs. 0
  misc_feature: MA Experiment 20000180 PARAMETER Experiment Name: At_Germinating_Seeds_P Parameter: Tissue Value: Germinating Seeds
  misc_feature: MA Experiment ID: 20001247 Result: Down-regulated in Transcription
  misc_feature: MA Experiment 20001247 PARAMETER Experiment Name: At_Far-red-induction_P Parameter: Age (day) Value: 7
  misc_feature: MA Experiment 20001247 PARAMETER Experiment Name: At_Far-red-induction_P Parameter: Light Value: Far-red vs. White
  misc_feature: MA Experiment 20001247 PARAMETER Experiment Name: At_Far-red-induction_P Parameter: Organism Value: A. thaliana
  misc_feature: MA Experiment 20001247 PARAMETER Experiment Name: At_Far-red-induction_P Parameter: Plant Line Value: Columbia
  misc_feature: MA Experiment 20001247 PARAMETER Experiment Name: At_Far-red-induction_P Parameter: Timepoint (hr) Value: 1
  misc_feature: MA Experiment 20001247 PARAMETER Experiment Name: At_Far-red-induction_P Parameter: Tissue Value: Whole Plant
  misc_feature: MA Experiment ID: 20001555 Result: Up-regulated in Transcription
  misc_feature: MA Experiment 20001555 PARAMETER Experiment Name: At_Drought_Soil_Dry_P Parameter: Age (day) Value: 24
  misc_feature: MA Experiment 20001555 PARAMETER Experiment Name: At_Drought_Soil_Dry_P Parameter: Organism Value: A. thaliana
  misc_feature: MA Experiment 20001555 PARAMETER Experiment Name: At_Drought_Soil_Dry_P Parameter: Plant Line Value: WS
  misc_feature: MA Experiment 20001555 PARAMETER Experiment Name: At_Drought_Soil_Dry_P Parameter: Post Timepoint (hr) Value: None
  misc_feature: MA Experiment 20001555 PARAMETER Experiment Name: At_Drought_Soil_Dry_P Parameter: Post-Treatment Value: None
  misc_feature: MA Experiment 20001555 PARAMETER Experiment Name: At_Drought_Soil_Dry_P Parameter: Timepoint (day) Value: 10
  misc_feature: MA Experiment 20001555 PARAMETER Experiment Name: At_Drought_Soil_Dry_P Parameter: Treatment Value: Drought vs. No Drought
  misc_feature: MA Experiment ID: 20001556 Result: Up-regulated in Transcription
  misc_feature: MA Experiment 20001556 PARAMETER Experiment Name: At_Drought_Soil_Dry_P Parameter: Age (day) Value: 26
  misc_feature: MA Experiment 20001556 PARAMETER Experiment Name: At_Drought_Soil_Dry_P Parameter: Organism Value: A. thaliana
  misc_feature: MA Experiment 20001556 PARAMETER Experiment Name: At_Drought_Soil_Dry_P Parameter: Plant Line Value: WS
  misc_feature: MA Experiment 20001556 PARAMETER Experiment Name: At_Drought_Soil_Dry_P Parameter: Post Timepoint (hr) Value: None
  misc_feature: MA Experiment 20001556 PARAMETER Experiment Name: At_Drought_Soil_Dry_P Parameter: Post-Treatment Value: None
  misc_feature: MA Experiment 20001556 PARAMETER Experiment Name: At_Drought_Soil_Dry_P Parameter: Timepoint (day) Value: 12
  misc_feature: MA Experiment 20001556 PARAMETER Experiment Name: At_Drought_Soil_Dry_P Parameter: Treatment Value: Drought vs. No Drought
  misc_feature: MA Experiment ID: 20001558 Result: Up-regulated in Transcription
  misc_feature: MA Experiment 20001558 PARAMETER Experiment Name: At_Drought_Soil_Dry_P Parameter: Age (day) Value: 27
  misc_feature: MA Experiment 20001558 PARAMETER Experiment Name: At_Drought_Soil_Dry_P Parameter: Organism Value: A. thaliana
  misc_feature: MA Experiment 20001558 PARAMETER Experiment Name: At_Drought_Soil_Dry_P Parameter: Plant Line Value: WS
  misc_feature: MA Experiment 20001558 PARAMETER Experiment Name: At_Drought_Soil_Dry_P Parameter: Post Timepoint (hr) Value: 6
  misc_feature: MA Experiment 20001558 PARAMETER Experiment Name: At_Drought_Soil_Dry_P Parameter: Post-Treatment Value: Re-Water vs. No Drought
  misc_feature: MA Experiment 20001558 PARAMETER Experiment Name: At_Drought_Soil_Dry_P Parameter: Timepoint (day) Value: 13
  misc_feature: MA Experiment 20001558 PARAMETER Experiment Name: At_Drought_Soil_Dry_P Parameter: Treatment Value: Drought vs. No Drought
atgttcacgtttcctccagtttttaaggcttgtgggaagttttcagggatcagagaagggaaacagattcatggaattgttacgaagatgggtttttacgatgatatctatgtgcaaaactcgcttgttcatttttatggtgtgtgtggagaatcaaggaatgcatgtaaagtgttcggtgaaatgcctgtgagagatgttgtttcgtggactgggattataactggtttcacgaggactgggttgtataaggaagctttggatacgttttcaaagatggatgttgagcctaatttggctacgtatgtttgtgtattggtctcaagtgggcgggtagggtgtttaagtttagggaaaggaatccatgggttgatcttaaaaagggcatctttgatcagcttagagactggtaatgctcttatagatatgtatgtgaaatgtgagcaattgtctgatgcgatgagagtttttggtgagttggaaaagaaagataaagtttcttggaatagtatgattagtgggttggttcactgtgaaagatctaaggaggcgattgacttgttttctctgatgcaaacgtcttctggtataaagccagatgggcatatacttacaagtgttctctctgcgtgtgctagcttaggagctgtggatcacggaagatgggttcatgagtatattttaaccgctggaatcaaatgggatacgcatattggaactgccattgttgatatgtatgcaaaatgtggctacatcgaaacagctttggagattttcaacggaattagaagtaagaatgtgtttacttggaatgctctgttaggtggtttagctatccatgggcatggacttgaatcccttagatactttgaagaaatggttaagctaggttttaagccgaacctggtaacttttctcgcggctctaaatgcttgttgccacacaggtttagtcgatgaagggagaagatatttccataaaatgaaaagcagagaatacaatctatttcctaagctagaacattatggatgcatgattgatttgctttgtagagctggattgttagatgaagcattggaactcgtcaaagcaatgccggttaaaccggatgtacgtatatgtggagctattcttagtgcttgtaagaatagagggacattaatggagcttcctaaagagatattagatagttttttagatattgagtttgaagatagtggtgtttatgtgttgctgtctaatatttttgctgctaatagaagatgggatgatgttgcgagaatcaggaggttgatgaaggtaaaaggtatctcgaaggttccaggatcaagttatatagagaagtttatgactttagaccaatga

SEQ ID NO: 74235 - protein, 454 aa, Arabidopsis thaliana; identical to SEQ ID NO: 69633
  peptide (1)..(454): Ceres Seq. ID no. 4998937
  misc_feature (303)..(337): Pfam Name: PPR repeat Pfam Description: PPR repeat
  misc_feature (1)..(454): Homolog of NCBI NO: 15233645 NR Description: putative protein; protein id: At4g38010.1
  misc_feature (2)..(447): Homolog of NCBI NO: 38344239 NR Description: OJ991113_30.16 [Oryza sativa (japonica
  misc_feature (2)..(447): Homolog of NCBI NO: 15227623 NR Description: unknown protein; protein id: At2g03380.1
  misc_feature (35)..(447): Homolog of NCBI NO: 15223099 NR Description: unknown protein; protein id: At1g08070.1 thaliana] >gi|8778839|gb|AAF79838.1|AC026875_18 T6D22.15
  misc_feature (2)..(447): Homolog of NCBI NO: 15226301 NR Description: hypothetical protein; protein id: At2g34400.1
  misc_feature (3)..(447): Homolog of NCBI NO: 34911728 NR Description: P0707D10.28 [Oryza sativa (japonica
  misc_feature (3)..(447): Homolog of NCBI NO: 34897884 NR Description: Similar to Arabidopsis thaliana DNA chromosome 4,
  misc_feature (3)..(447): Homolog of NCBI NO: 15228257 NR Description: unknown protein; protein id: At3g16610.1
  misc_feature (136)..(447): Homolog of NCBI NO: 34899952 NR Description: putative selenium-binding protein [Oryza sativa
  misc_feature (20)..(100): Homolog of NCBI NO: 34899952 NR Description: putative selenium-binding protein [Oryza sativa

SEQ ID NO: 74236 - protein, 425 aa, Arabidopsis thaliana; identical to SEQ ID NO: 69634
  peptide (1)..(425): Ceres Seq. ID no. 4998938
  misc_feature (274)..(308): Pfam Name: PPR repeat Pfam Description: PPR repeat
  misc_feature (1)..(425): Homolog of NCBI NO: 15233645 NR Description: putative protein; protein id: At4g38010.1
  misc_feature (1)..(418): Homolog of NCBI NO: 38344239 NR Description: OJ991113_30.16 [Oryza sativa (japonica
  misc_feature (1)..(418): Homolog of NCBI NO: 15227623 NR Description: unknown protein; protein id: At2g03380.1
  misc_feature (6)..(418): Homolog of NCBI NO: 15223099 NR Description: unknown protein; protein id: At1g08070.1 thaliana] >gi|8778839|gb|AAF79838.1|AC026875_18 T6D22.15
  misc_feature (1)..(418): Homolog of NCBI NO: 15226301 NR Description: hypothetical protein; protein id: At2g34400.1
  misc_feature (1)..(418): Homolog of NCBI NO: 34911728 NR Description: P0707D10.28 [Oryza sativa (japonica
  misc_feature (1)..(418): Homolog of NCBI NO: 34897884 NR Description: Similar to Arabidopsis thaliana DNA chromosome 4,
  misc_feature (1)..(418): Homolog of NCBI NO: 15228257 NR Description: unknown protein; protein id: At3g16610.1
  misc_feature (107)..(418): Homolog of NCBI NO: 34899952 NR Description: putative selenium-binding protein [Oryza sativa
  misc_feature (1)..(71): Homolog of NCBI NO: 34899952 NR Description: putative selenium-binding protein [Oryza sativa

SEQ ID NO: 74237 - protein, 393 aa, Arabidopsis thaliana
  peptide (1)..(393): Ceres Seq. ID no. 4998939
  misc_feature (242)..(276): Pfam Name: PPR repeat Pfam Description: PPR repeat
  misc_feature (1)..(393): Homolog of NCBI NO: 15233645 NR Description: putative protein; protein id: At4g38010.1
  misc_feature (1)..(386): Homolog of NCBI NO: 38344239 NR Description: OJ991113_30.16 [Oryza sativa (japonica
  misc_feature (1)..(386): Homolog of NCBI NO: 15227623 NR Description: unknown protein; protein id: At2g03380.1
  misc_feature (1)..(386): Homolog of NCBI NO: 15223099 NR Description: unknown protein; protein id: At1g08070.1 thaliana] >gi|8778839|gb|AAF79838.1|AC026875_18 T6D22.15
  misc_feature (1)..(386): Homolog of NCBI NO: 15226301 NR Description: hypothetical protein; protein id: At2g34400.1
  misc_feature (1)..(386): Homolog of NCBI NO: 34911728 NR Description: P0707D10.28 [Oryza sativa (japonica
  misc_feature (1)..(386): Homolog of NCBI NO: 34897884 NR Description: Similar to Arabidopsis thaliana DNA chromosome 4,
  misc_feature (1)..(386): Homolog of NCBI NO: 15228257 NR Description: unknown protein; protein id: At3g16610.1
  misc_feature (75)..(386): Homolog of NCBI NO: 34899952 NR Description: putative selenium-binding protein [Oryza sativa
  misc_feature (1)..(39): Homolog of NCBI NO: 34899952 NR Description: putative selenium-binding protein [Oryza sativa
MPVRDVVSWTGIITGFTRTGLYKEALDTFSKMDVEPNLATYVCVLVSSGRVGCLSLGKGIHGLILKRASLISLETGNALIDMYVKCEQLSDAMRVFGELEKKDKVSWNSMISGLVHCERSKEAIDLFSLMQTSSGIKPDGHILTSVLSACASLGAVDHGRWVHEYILTAGIKWDTHIGTAIVDMYAKCGYIETALEIFNGIRSKNVFTWNALLGGLAIHGHGLESLRYFEEMVKLGFKPNLVTFLAALNACCHTGLVDEGRRYFHKMKSREYNLFPKLEHYGCMIDLLCRAGLLDEALELVKAMPVKPDVRICGAILSACKNRGTLMELPKEILDSFLDIEFEDSGVYVLLSNIFAANRRWDDVARIRRLMKVKGISKVPGSSYIEKFMTLDQ

SEQ ID NO: 74238 - DNA, 1074 bp, Arabidopsis thaliana
  misc_feature (1)..(1074): Ceres Seq. ID no. 4999492
  misc_feature: MA Experiment ID: 20000307 Result: Up-regulated in Transcription
  misc_feature: MA Experiment 20000307 PARAMETER Experiment Name: At_Germinating_Seeds_Sub_P Parameter: Age (hr) Value: 24 vs. 0
  misc_feature: MA Experiment 20000307 PARAMETER Experiment Name: At_Germinating_Seeds_Sub_P Parameter: Organism Value: A. thaliana
  misc_feature: MA Experiment 20000307 PARAMETER Experiment Name: At_Germinating_Seeds_Sub_P Parameter: Plant Line Value: WS
  misc_feature: MA Experiment 20000307 PARAMETER Experiment Name: At_Germinating_Seeds_Sub_P Parameter: Tissue Value: Germinating Seeds
  misc_feature: MA Experiment ID: 20000327 Result: Down-regulated in Transcription
  misc_feature: MA Experiment 20000327 PARAMETER Experiment Name: At_42deg_Heat_Sub_P Parameter: Age (day) Value: 14
  misc_feature: MA Experiment 20000327 PARAMETER Experiment Name: At_42deg_Heat_Sub_P Parameter: Organism Value: A. thaliana
  misc_feature: MA Experiment 20000327 PARAMETER Experiment Name: At_42deg_Heat_Sub_P Parameter: Plant Line Value: WS
  misc_feature: MA Experiment 20000327 PARAMETER Experiment Name: At_42deg_Heat_Sub_P Parameter: Temperature (deg C) Value: 42 vs. 22
  misc_feature: MA Experiment 20000327 PARAMETER Experiment Name: At_42deg_Heat_Sub_P Parameter: Timepoint (hr) Value: 1
  misc_feature: MA Experiment 20000327 PARAMETER Experiment Name: At_42deg_Heat_Sub_P Parameter: Tissue Value: Aerial
  misc_feature: MA Experiment ID: 20000328 Result: Down-regulated in Transcription
  misc_feature: MA Experiment 20000328 PARAMETER Experiment Name: At_42deg_Heat_Sub_P Parameter: Age (day) Value: 14
  misc_feature: MA Experiment 20000328 PARAMETER Experiment Name: At_42deg_Heat_Sub_P Parameter: Organism Value: A. thaliana
  misc_feature: MA Experiment 20000328 PARAMETER Experiment Name: At_42deg_Heat_Sub_P Parameter: Plant Line Value: WS
  misc_feature: MA Experiment 20000328 PARAMETER Experiment Name: At_42deg_Heat_Sub_P Parameter: Temperature (deg C) Value: 42 vs. 22
  misc_feature: MA Experiment 20000328 PARAMETER Experiment Name: At_42deg_Heat_Sub_P Parameter: Timepoint (hr) Value: 6
  misc_feature: MA Experiment 20000328 PARAMETER Experiment Name: At_42deg_Heat_Sub_P Parameter: Tissue Value: Aerial
  misc_feature: MA Experiment ID: 20000347 Result: Down-regulated in Transcription
  misc_feature: MA Experiment 20000347 PARAMETER Experiment Name: At_2mM_SA_Sub_P Parameter: Age (day) Value: 14
  misc_feature: MA Experiment 20000347 PARAMETER Experiment Name: At_2mM_SA_Sub_P Parameter: Organism Value: A. thaliana
  misc_feature: MA Experiment 20000347 PARAMETER Experiment Name: At_2mM_SA_Sub_P Parameter: Plant Line Value: WS
  misc_feature: MA Experiment 20000347 PARAMETER Experiment Name: At_2mM_SA_Sub_P Parameter: Timepoint (hr) Value: 6
  misc_feature: MA Experiment 20000347 PARAMETER Experiment Name: At_2mM_SA_Sub_P Parameter: Tissue Value: Aerial
  misc_feature: MA Experiment 20000347 PARAMETER Experiment Name: At_2mM_SA_Sub_P Parameter: Treatment Value: 2mM SA vs. No Treatment
  misc_feature: MA Experiment ID: 20000355 Result: Up-regulated in Transcription
  misc_feature: MA Experiment 20000355 PARAMETER Experiment Name: At_Siliques_Sub_P Parameter: Age (day) Value: 21
  misc_feature: MA Experiment 20000355 PARAMETER Experiment Name: At_Siliques_Sub_P Parameter: Organism Value: A. thaliana
  misc_feature: MA Experiment 20000355 PARAMETER Experiment Name: At_Siliques_Sub_P Parameter: Plant Line Value: WS
  misc_feature: MA Experiment 20000355 PARAMETER Experiment Name: At_Siliques_Sub_P Parameter: Tissue Value: Less Than 5mm Siliques vs. Whole Plant
  misc_feature: MA Experiment ID: 20000440 Result: Up-regulated in Transcription
  misc_feature: MA Experiment 20000440 PARAMETER Experiment Name: At_Closed-Flower__Sub_P Parameter: Tissue Value: Closed Flower vs. Whole Plant
atggccggaaccgcaagtccttggcggagagaggccgtgttcttgacggcaatgctggtggtcgaaaccagcgtcgtcggaataagtactttgtttaaatttgcaacttcaaagggactcaacatttatcctttcctcggctattcttatcttcttgcttctcttcttcttcttccttctcttttcttcactaacaggtcaagttcacttcctccactaagtgtctcaatactttcaaaaattggacttcttggatttctaggatcaatgtatgtgatcacaggatacataggcatcgaatacagcagcccaaccttagcctccgccataaacaatatcactcctgctcttaccttcatcctcgccattatcttcagaatggaaaaagtatctttcaaagagaggagtagtctagccaaattgatggggacgatattgtcactgataggtgcacttgtggtgattttctaccacggtccacgtgtcttcctcgcatcttctccgccctatgtaaacttccgtcagttttctccaccgttgtcatcttcaaactccgattggctcatcggtggagctcttctaaccatgcaaggcatattcgtttctgtttctttcattcttcaggcacatataatgagtgtatatccagcagcattcagagtctcctttctttacactgtatgtgtttcaatcgtgacctcgacgattggactagtagttgaaaagaacaacccaagcgtttggatcattcatttcgatattactttgattacaattgttaccatggcaatagtaacttcagtatactatgtgattcattcatggacagtacgacataaaggacctctgtacttagccatatttaaacctttgtccattttaatagcagtggttatgggggccatttttctcaatgattctctctatctcggatgtttgatcggaggaattttgataacattaggcttttacgctgtgatgtggggcaaagcaaacgaagagaaggatcagttatcattttcagaaaaagagaaaacgcctcttctattaaaccgcaaaaacgaccaagtttaa

SEQ ID NO: 74239 - protein, 357 aa, Arabidopsis thaliana
  peptide (1)..(357): Ceres Seq. ID no. 4999493
  misc_feature (23)..(156): Pfam Name: Integral membrane protein DUF6 Pfam Description: Integral membrane protein DUF6
  misc_feature (1)..(357): Homolog of NCBI NO: 22331380 NR Description: unknown protein; protein id: At3g28070.1, by cDNA: gi_17529267 [Arabidopsis thaliana] unknown protein [Arabidopsis thaliana]
  misc_feature (1)..(357): Homolog of NCBI NO: 21618226 NR Description: contains similarity to integral membrane protein
  misc_feature (1)..(351): Homolog of NCBI NO: 11994130 NR Description: contains similarity to integral membrane protein
  misc_feature (1)..(357): Homolog of NCBI NO: 18405642 NR Description: expressed protein; protein id: At3g28080.1,
  misc_feature (1)..(262): Homolog of NCBI NO: 11994127 NR Description: contains similarity to nodulin~gene_id:MMG15.11
  misc_feature (1)..(357): Homolog of NCBI NO: 30689045 NR Description: nodulin MtN21 family protein [Arabidopsis >gi|17381140|gb|AAL36382.1| unknown protein [Arabidopsis >gi|21436253|gb|AAM51265.1| unknown protein [Arabidopsis
  misc_feature (90)..(357): Homolog of NCBI NO: 11994129 NR Description: contains similarity to nodulin~gene_id:MMG15.13
  misc_feature (127)..(351): Homolog of NCBI NO: 15232901 NR Description: unknown protein; protein id: At3g28100.1
  misc_feature (127)..(357): Homolog of NCBI NO: 11994131 NR Description: nodulin-like protein [Arabidopsis thaliana]
  misc_feature (9)..(88): Homolog of NCBI NO: 11994131 NR Description: nodulin-like protein [Arabidopsis thaliana]
MAGTASPWRREAVFLTAMLVVETSVVGISTLFKFATSKGLNIYPFLGYSYLLASLLLLPSLFFTNRSSSLPPLSVSILSKIGLLGFLGSMYVITGYIGIEYSSPTLASAINNITPALTFILAIIFRMEKVSFKERSSLAKLMGTILSLIGALVVIFYHGPRVFLASSPPYVNFRQFSPPLSSSNSDWLIGGALLTMQGIFVSVSFILQAHIMSVYPAAFRVSFLYTVCVSIVTSTIGLVVEKNNPSVWIIHFDITLITIVTMAIVTSVYYVIHSWTVRHKGPLYLAIFKPLSILIAVVMGAIFLNDSLYLGCLIGGILITLGFYAVMWGKANEEKDQLSFSEKEKTPLLLNRKNDQV

SEQ ID NO: 74240 - protein, 340 aa, Arabidopsis thaliana
  peptide (1)..(340): Ceres Seq. ID no. 4999494
  misc_feature (6)..(139): Pfam Name: Integral membrane protein DUF6 Pfam Description: Integral membrane protein DUF6
  misc_feature (1)..(340): Homolog of NCBI NO: 22331380 NR Description: unknown protein; protein id: At3g28070.1, by cDNA: gi_17529267 [Arabidopsis thaliana] unknown protein [Arabidopsis thaliana]
  misc_feature (1)..(340): Homolog of NCBI NO: 21618226 NR Description: contains similarity to integral membrane protein
  misc_feature (1)..(334): Homolog of NCBI NO: 11994130 NR Description: contains similarity to integral membrane protein
  misc_feature (1)..(340): Homolog of NCBI NO: 18405642 NR Description: expressed protein; protein id: At3g28080.1,
  misc_feature (1)..(245): Homolog of NCBI NO: 11994127 NR Description: contains similarity to nodulin~gene_id:MMG15.11
  misc_feature (1)..(340): Homolog of NCBI NO: 30689045 NR Description: nodulin MtN21 family protein [Arabidopsis >gi|17381140|gb|AAL36382.1| unknown protein [Arabidopsis >gi|21436253|gb|AAM51265.1| unknown protein [Arabidopsis
  misc_feature (73)..(340): Homolog of NCBI NO: 11994129 NR Description: contains similarity to nodulin~gene_id:MMG15.13
  misc_feature (110)..(334): Homolog of NCBI NO: 15232901 NR Description: unknown protein; protein id: At3g28100.1
  misc_feature (110)..(340): Homolog of NCBI NO: 11994131 NR Description: nodulin-like protein [Arabidopsis thaliana]
  misc_feature (1)..(71): Homolog of NCBI NO: 11994131 NR Description: nodulin-like protein [Arabidopsis thaliana]
MLVVETSVVGISTLFKFATSKGLNIYPFLGYSYLLASLLLLPSLFFTNRSSSLPPLSVSILSKIGLLGFLGSMYVITGYIGIEYSSPTLASAINNITPALTFILAIIFRMEKVSFKERSSLAKLMGTILSLIGALVVIFYHGPRVFLASSPPYVNFRQFSPPLSSSNSDWLIGGALLTMQGIFVSVSFILQAHIMSVYPAAFRVSFLYTVCVSIVTSTIGLVVEKNNPSVWIIHFDITLITIVTMAIVTSVYYVIHSWTVRHKGPLYLAIFKPLSILIAVVMGAIFLNDSLYLGCLIGGILITLGFYAVMWGKANEEKDQLSFSEKEKTPLLLNRKNDQV

SEQ ID NO: 74241 - protein, 268 aa, Arabidopsis thaliana
  peptide (1)..(268): Ceres Seq. ID no. 4999495
  misc_feature (1)..(67): Pfam Name: Integral membrane protein DUF6 Pfam Description: Integral membrane protein DUF6
  misc_feature (1)..(268): Homolog of NCBI NO: 22331380 NR Description: unknown protein; protein id: At3g28070.1, by cDNA: gi_17529267 [Arabidopsis thaliana] unknown protein [Arabidopsis thaliana]
  misc_feature (1)..(268): Homolog of NCBI NO: 21618226 NR Description: contains similarity to integral membrane protein
  misc_feature (1)..(262): Homolog of NCBI NO: 11994130 NR Description: contains similarity to integral membrane protein
  misc_feature (1)..(268): Homolog of NCBI NO: 18405642 NR Description: expressed protein; protein id: At3g28080.1,
  misc_feature (1)..(173): Homolog of NCBI NO: 11994127 NR Description: contains similarity to nodulin~gene_id:MMG15.11
  misc_feature (1)..(268): Homolog of NCBI NO: 30689045 NR Description: nodulin MtN21 family protein [Arabidopsis >gi|17381140|gb|AAL36382.1| unknown protein [Arabidopsis >gi|21436253|gb|AAM51265.1| unknown protein [Arabidopsis
  misc_feature (1)..(268): Homolog of NCBI NO: 11994129 NR Description: contains similarity to nodulin~gene_id:MMG15.13
  misc_feature (38)..(262): Homolog of NCBI NO: 15232901 NR Description: unknown protein; protein id: At3g28100.1
  misc_feature (38)..(268): Homolog of NCBI NO: 11994131 NR Description: nodulin-like protein [Arabidopsis thaliana]
  misc_feature (89)..(265): Homolog of NCBI NO: 18421959 NR Description: putative protein; protein id: At5g40210.1, by cDNA: gi_15724297 [Arabidopsis thaliana] AT5g40210/MSN9_110 [Arabidopsis thaliana]
MYVITGYIGIEYSSPTLASAINNITPALTFILAIIFRMEKVSFKERSSLAKLMGTILSLIGALVVIFYHGPRVFLASSPPYVNFRQFSPPLSSSNSDWLIGGALLTMQGIFVSVSFILQAHIMSVYPAAFRVSFLYTVCVSIVTSTIGLVVEKNNPSVWIIHFDITLITIVTMAIVTSVYYVIHSWTVRHKGPLYLAIFKPLSILIAVVMGAIFLNDSLYLGCLIGGILITLGFYAVMWGKANEEKDQLSFSEKEKTPLLLNRKNDQV

SEQ ID NO: 74242 - DNA, 2916 bp, Arabidopsis thaliana
  misc_feature (1)..(2916): Ceres Seq. ID no. 5000092
  misc_feature: MA Experiment ID: 20000173 Result: Down-regulated in Transcription
  misc_feature: MA Experiment 20000173 PARAMETER Experiment Name: At_42deg_Heat_P Parameter: Age (day) Value: 14
  misc_feature: MA Experiment 20000173 PARAMETER Experiment Name: At_42deg_Heat_P Parameter: Organism Value: A. thaliana
  misc_feature: MA Experiment 20000173 PARAMETER Experiment Name: At_42deg_Heat_P Parameter: Plant Line Value: WS
  misc_feature: MA Experiment 20000173 PARAMETER Experiment Name: At_42deg_Heat_P Parameter: Temperature (deg C) Value: 42 vs. 22
  misc_feature: MA Experiment 20000173 PARAMETER Experiment Name: At_42deg_Heat_P Parameter: Timepoint (hr) Value: 6
  misc_feature: MA Experiment 20000173 PARAMETER Experiment Name: At_42deg_Heat_P Parameter: Tissue Value: Aerial
  misc_feature: MA Experiment ID: 20000227 Result: Up-regulated in Transcription
  misc_feature: MA Experiment 20000227 PARAMETER Experiment Name: At_Root-Tips-vs-Tops_P Parameter: Tissue Value: Root Tips vs. Root Tops
  misc_feature: MA Experiment ID: 20000437 Result: Up-regulated in Transcription
  misc_feature: MA Experiment 20000437 PARAMETER Experiment Name: At_Drought_P Parameter: Age (day) Value: 8
  misc_feature: MA Experiment 20000437 PARAMETER Experiment Name: At_Drought_P Parameter: Organism Value: A. thaliana
  misc_feature: MA Experiment 20000437 PARAMETER Experiment Name: At_Drought_P Parameter: Plant Line Value: WS
  misc_feature: MA Experiment 20000437 PARAMETER Experiment Name: At_Drought_P Parameter: Timepoint (hr) Value: 24
  misc_feature: MA Experiment 20000437 PARAMETER Experiment Name: At_Drought_P Parameter: Tissue Value: Whole Plant
  misc_feature: MA Experiment 20000437 PARAMETER Experiment Name: At_Drought_P Parameter: Treatment Value: Drought vs. No Drought
  misc_feature: MA Experiment ID: 20001247 Result: Down-regulated in Transcription
  misc_feature: MA Experiment 20001247 PARAMETER Experiment Name: At_Far-red-induction_P Parameter: Age (day) Value: 7
  misc_feature: MA Experiment 20001247 PARAMETER Experiment Name: At_Far-red-induction_P Parameter: Light Value: Far-red vs. White
  misc_feature: MA Experiment 20001247 PARAMETER Experiment Name: At_Far-red-induction_P Parameter: Organism Value: A. thaliana
  misc_feature: MA Experiment 20001247 PARAMETER Experiment Name: At_Far-red-induction_P Parameter: Plant Line Value: Columbia
  misc_feature: MA Experiment 20001247 PARAMETER Experiment Name: At_Far-red-induction_P Parameter: Timepoint (hr) Value: 1
  misc_feature: MA Experiment 20001247 PARAMETER Experiment Name: At_Far-red-induction_P Parameter: Tissue Value: Whole Plant
  misc_feature: MA Experiment ID: 20001248 Result: Up-regulated in Transcription
  misc_feature: MA Experiment 20001248 PARAMETER Experiment Name: At_Far-red-induction_P Parameter: Age (day) Value: 7
  misc_feature: MA Experiment 20001248 PARAMETER Experiment Name: At_Far-red-induction_P Parameter: Light Value: Far-red vs. White
  misc_feature: MA Experiment 20001248 PARAMETER Experiment Name: At_Far-red-induction_P Parameter: Organism Value: A. thaliana
  misc_feature: MA Experiment 20001248 PARAMETER Experiment Name: At_Far-red-induction_P Parameter: Plant Line Value: Columbia
  misc_feature: MA Experiment 20001248 PARAMETER Experiment Name: At_Far-red-induction_P Parameter: Timepoint (hr) Value: 4
  misc_feature: MA Experiment 20001248 PARAMETER Experiment Name: At_Far-red-induction_P Parameter: Tissue Value: Whole Plant
  misc_feature: MA Experiment ID: 20001451 Result: Down-regulated in Transcription
  misc_feature: MA Experiment 20001451 PARAMETER Experiment Name: At_Far-red-induction_P Parameter: Age (day) Value: 7
  misc_feature: MA Experiment 20001451 PARAMETER Experiment Name: At_Far-red-induction_P Parameter: Light Value: Far-red vs. White
  misc_feature: MA Experiment 20001451 PARAMETER Experiment Name: At_Far-red-induction_P Parameter: Organism Value: A. thaliana
  misc_feature: MA Experiment 20001451 PARAMETER Experiment Name: At_Far-red-induction_P Parameter: Plant Line Value: Columbia
  misc_feature: MA Experiment 20001451 PARAMETER Experiment Name: At_Far-red-induction_P Parameter: Timepoint (hr) Value: 24
  misc_feature: MA Experiment 20001451 PARAMETER Experiment Name: At_Far-red-induction_P Parameter: Tissue Value: Whole Plant
atgctccatctcttcctcttctcctccgccgcctccaccaccaccgccgtagaagacaattccaccaccatgcccccttcttctagatccgccgctaatcaaaactcctcctcttctctccatctctgcaaacattcaccgtcggcgactctcgacctcttaatcctaatcctcgtcctcttctccggcacattcctcctctcctcttacttctcataccttatccactccttatctctcctctcctctcatttcccttcaatcaccatctccctctcctctctcctccctcctctaatcatcttcttctcctccgatcacagcaccgaagatgaagatcatcatcatccctcaggaaaaatccctcctccggcttcgttcttcttcgcattcgcagtttttttcgcggcttcaattgcgtttctcgacctgtgttgtggttcaagatcaaggaaatgtcgtaaccctaagtgtaaaggaatgaagaaagctatggagtttgatttgcagttacagacagaggaatgtgttaaatccggttcggttaaagagattgatcggttaccgtggaaaggaggtagtgagagtaatcctgattatgagtgtttgagagctgagctgaggaagatggctccggttaatggtcgagctgttttgattttccgatcaaaatgtggttgccctattgctaagcttgaaggttggggacctaagagaagtcggcgtcataaaaaatggaacttggtgactagtgaatttgtaggttctgtttatcctgttcttgcgacgtatttattgccattgatcattttgagaccagtttgtagtgaagatttatgtttatgtaatcctcctcactggctatggattttagacaagtctttaggctttgatactcgtttcttatcgataatggcgagatgcttctctgctccgagtcggacccacttcgatttctccggcgaaagctccgatactgaacgagctctcgtctctgctcttggatcgtgcgcttccagtaatgacgtcacttgtggtagacagattcattgccgtgtcttgaaatccggtcttgattctaatggatacatatgtaatagcgttcttaacatgtacgctaaatgccgtctcttggctgatgcggaatctgttttcagggatcacgcgaagcttgattctgcttcgttcaatattatggttgatgggtatgttagatctcgtagactttgggatgcgcttaagttgttcgacgtaatgcctgagagaagctgtgtctcgtatactactttgataaagggttatgctcaaaacaatcagtggagtgaagctatggagctttttagggagatgagaaatttgggaattatgctaaatgaagttactttagccactgttatatctgcttgctcacatttgggtgggatttgggattgtaggatgttgcagagtttggctattaaactcaagcttgaaggtcgtgtttttgtttcgacgaatttgctgcatatgtactgtctttgtttgtgtttgaaggatgctcggaagttgtttgatgaaatgcctgagagaaatttagttacttggaacgtgatgttaaatgggtactcaaaagctggacttattgaacaggctgaggaattgtttgatcagattactgagaaagatattgtctcgtggggtacaatgattgatgggtgtctccgaaagaatcagcttgacgaagctcttgtttactacaccgagatgctgcgctgtggaatgaagcctagtgaagttatgatggtggaccttctctcggcttcagctcgatcagttggtagctccaagggtttgcaacttcatggtaccattgtgaaaaggggttttgattgttatgatttcttacaagcaacgatcatacatttctacgctgtctctaatgacataaaactcgctcttcagcagtttgaagcgagtgttaaggaccacattgcgtcgagaaacgcgttgattgcaggatttgtgaagaatggaatggttgagcaggcaagagaagtatttgatcagactcatgataaagacatcttttcatggaacgctatgatatcgggttacgcgcaaagtctatcgcctcagttagctctacatctattccgcgaaatgatcagtagtagccaagtaaaaccagatgcaatcacaatggttagtgttttttctgcaatttcttctctaggatcgttggaagaagggaagagagcacatgattatctaaactttagcacgattcctcccaacgacaatctaaccgctgctataatcgacatgtacgccaaatgtggaagcatcgaaactgctctaaacattttccaccaaacaaagaacatttcttcttctacaatctctccctggaacgccatcatttgcggctcagcgacacatggccatgcaaaactagcgcttgatctctactccgatctccaatctctccccatcaaaccgaacagcatcacttttgtcggtgtcttgagcgcatgctgccatgcagggctagtggagttaggtaaaacgtatttcgaaagcatgaagagcgatcacgggatcgagccagacatcaaacattatggatgtatggttgatttattggggaaagctgggagattagaggaagctaaagaaatgatcaagaagatgcctgtaaaggctgatgtaatgatctgggggatgttattatcagcttcacgaactcacgggaacgtcgagatcgccgaacttgcggctactgagctagcagcgattgatccatctcatggaggatgcaaagttatgctttcgaacgtttatgcagacgcagggagatgggaagatgtagctttggttagagaagagatgcgaacgagagatgttgagtggtcacgtgccttcagtggtgttgtgtga

SEQ ID NO: 74243 - protein, 971 aa, Arabidopsis thaliana
  peptide (1)..(971): Ceres Seq. ID no. 5000093
  misc_feature (865)..(899): Pfam Name: PPR repeat Pfam Description: PPR repeat
  misc_feature (1)..(884): Homolog of NCBI NO: 15239636 NR Description: putative protein; protein id: At5g19020.1
  misc_feature (330)..(971): Homolog of NCBI NO: 34905570 NR Description: hypothetical protein~similar to Arabidopsis
  misc_feature (336)..(970): Homolog of NCBI NO: 15227144 NR Description: hypothetical protein; protein id: At2g22070.1
  misc_feature (337)..(968): Homolog of NCBI NO: 34896896 NR Description: hypothetical protein [Oryza sativa (japonica group)] >gi|24899461|gb|AAN65031.1| hypothetical protein [Oryza
  misc_feature (424)..(970): Homolog of NCBI NO: 15226463 NR Description: unknown protein; protein id: At2g21090.1
  misc_feature (529)..(957): Homolog of NCBI NO: 15232885 NR Description: hypothetical protein; protein id: At3g02330.1
  misc_feature (337)..(551): Homolog of NCBI NO: 15232885 NR Description: hypothetical protein; protein id: At3g02330.1
  misc_feature (649)..(970): Homolog of NCBI NO: 15235115 NR Description: putative protein; protein id: At4g39530.1
  misc_feature (313)..(539): Homolog of NCBI NO: 15235115 NR Description: putative protein; protein id: At4g39530.1
  misc_feature (529)..(962): Homolog of NCBI NO: 37534112 NR Description: putative selenium-binding protein-like [Oryza
MLHLFLFSSAASTTTAVEDNSTTMPPSSRSAANQNSSSSLHLCKHSPSATLDLLILILVLFSGTFLLSSYFSYLIHSLSLLSSHFPSITISLSSLLPPLIIFFSSDHSTEDEDHHHPSGKIPPPASFFFAFAVFFAASIAFLDLCCGSRSRKCRNPKCKGMKKAMEFDLQLQTEECVKSGSVKEIDRLPWKGGSESNPDYECLRAELRKMAPVNGRAVLIFRSKCGCPIAKLEGWGPKRSRRHKKWNLVTSEFVGSVYPVLATYLLPLIILRPVCSEDLCLCNPPHWLWILDKSLGFDTRFLSIMARCFSAPSRTHFDFSGESSDTERALVSALGSCASSNDVTCGRQIHCRVLKSGLDSNGYICNSVLNMYAKCRLLADAESVFRDHAKLDSASFNIMVDGYVRSRRLWDALKLFDVMPERSCVSYTTLIKGYAQNNQWSEAMELFREMRNLGIMLNEVTLATVISACSHLGGIWDCRMLQSLAIKLKLEGRVFVSTNLLHMYCLCLCLKDARKLFDEMPERNLVTWNVMLNGYSKAGLIEQAEELFDQITEKDIVSWGTMIDGCLRKNQLDEALVYYTEMLRCGMKPSEVMMVDLLSASARSVGSSKGLQLHGTIVKRGFDCYDFLQATIIHFYAVSNDIKLALQQFEASVKDHIASRNALIAGFVKNGMVEQAREVFDQTHDKDIFSWNAMISGYAQSLSPQLALHLFREMISSSQVKPDAITMVSVFSAISSLGSLEEGKRAHDYLNFSTIPPNDNLTAAIIDMYAKCGSIETALNIFHQTKNISSSTISPWNAIICGSATHGHAKLALDLYSDLQSLPIKPNSITFVGVLSACCHAGLVELGKTYFESMKSDHGIEPDIKHYGCMVDLLGKAGRLEEAKEMIKKMPVKADVMIWGMLLSASRTHGNVEIAELAATELAAIDPSHGGCKVMLSNVYADAGRWEDVALVREEMRTRDVEWSRAFSGVV

SEQ ID NO: 74244 - protein, 948 aa, Arabidopsis thaliana
  peptide (1)..(948): Ceres Seq. ID no. 5000094
  misc_feature (842)..(876): Pfam Name: PPR repeat Pfam Description: PPR repeat
  misc_feature (1)..(861): Homolog of NCBI NO: 15239636 NR Description: putative protein; protein id: At5g19020.1
  misc_feature (307)..(948): Homolog of NCBI NO: 34905570 NR Description: hypothetical protein~similar to Arabidopsis
  misc_feature (313)..(947): Homolog of NCBI NO: 15227144 NR Description: hypothetical protein; protein id: At2g22070.1
  misc_feature (314)..(945): Homolog of NCBI NO: 34896896 NR Description: hypothetical protein [Oryza sativa (japonica group)] >gi|24899461|gb|AAN65031.1| hypothetical protein [Oryza
  misc_feature (401)..(947): Homolog of NCBI NO: 15226463 NR Description: unknown protein; protein id: At2g21090.1
  misc_feature (506)..(934): Homolog of NCBI NO: 15232885 NR Description: hypothetical protein; protein id: At3g02330.1
  misc_feature (314)..(528): Homolog of NCBI NO: 15232885 NR Description: hypothetical protein; protein id: At3g02330.1
  misc_feature (626)..(947): Homolog of NCBI NO: 15235115 NR Description: putative protein; protein id: At4g39530.1
  misc_feature (290)..(516): Homolog of NCBI NO: 15235115 NR Description: putative protein; protein id: At4g39530.1
  misc_feature (506)..(939): Homolog of NCBI NO: 37534112 NR Description: putative selenium-binding protein-like [Oryza
MPPSSRSAANQNSSSSLHLCKHSPSATLDLLILILVLFSGTFLLSSYFSYLIHSLSLLSSHFPSITISLSSLLPPLIIFFSSDHSTEDEDHHHPSGKIPPPASFFFAFAVFFAASIAFLDLCCGSRSRKCRNPKCKGMKKAMEFDLQLQTEECVKSGSVKEIDRLPWKGGSESNPDYECLRAELRKMAPVNGRAVLIFRSKCGCPIAKLEGWGPKRSRRHKKWNLVTSEFVGSVYPVLATYLLPLIILRPVCSEDLCLCNPPHWLWILDKSLGFDTRFLSIMARCFSAPSRTHFDFSGESSDTERALVSALGSCASSNDVTCGRQIHCRVLKSGLDSNGYICNSVLNMYAKCRLLADAESVFRDHAKLDSASFNIMVDGYVRSRRLWDALKLFDVMPERSCVSYTTLIKGYAQNNQWSEAMELFREMRNLGIMLNEVTLATVISACSHLGGIWDCRMLQSLAIKLKLEGRVFVSTNLLHMYCLCLCLKDARKLFDEMPERNLVTWNVMLNGYSKAGLIEQAEELFDQITEKDIVSWGTMIDGCLRKNQLDEALVYYTEMLRCGMKPSEVMMVDLLSASARSVGSSKGLQLHGTIVKRGFDCYDFLQATIIHFYAVSNDIKLALQQFEASVKDHIASRNALIAGFVKNGMVEQAREVFDQTHDKDIFSWNAMISGYAQSLSPQLALHLFREMISSSQVKPDAITMVSVFSAISSLGSLEEGKRAHDYLNFSTIPPNDNLTAAIIDMYAKCGSIETALNIFHQTKNISSSTISPWNAIICGSATHGHAKLALDLYSDLQSLPIKPNSITFVGVLSACCHAGLVELGKTYFESMKSDHGIEPDIKHYGCMVDLLGKAGRLEEAKEMIKKMPVKADVMIWGMLLSASRTHGNVEIAELAATELAAIDPSHGGCKVMLSNVYADAGRWEDVALVREEMRTRDVEWSRAFSGVV

SEQ ID NO: 74245 - protein, 811 aa, Arabidopsis thaliana
  peptide (1)..(811): Ceres Seq. ID no. 5000095
  misc_feature (705)..(739): Pfam Name: PPR repeat Pfam Description: PPR repeat
  misc_feature (1)..(724): Homolog of NCBI NO: 15239636 NR Description: putative protein; protein id: At5g19020.1
  misc_feature (170)..(811): Homolog of NCBI NO: 34905570 NR Description: hypothetical protein~similar to Arabidopsis
  misc_feature (176)..(810): Homolog of NCBI NO: 15227144 NR Description: hypothetical protein; protein id: At2g22070.1
  misc_feature (177)..(808): Homolog of NCBI NO: 34896896 NR Description: hypothetical protein [Oryza sativa (japonica group)] >gi|24899461|gb|AAN65031.1| hypothetical protein [Oryza
  misc_feature (264)..(810): Homolog of NCBI NO: 15226463 NR Description: unknown protein; protein id: At2g21090.1
  misc_feature (369)..(797): Homolog of NCBI NO: 15232885 NR Description: hypothetical protein; protein id: At3g02330.1
  misc_feature (177)..(391): Homolog of NCBI NO: 15232885 NR Description: hypothetical protein; protein id: At3g02330.1
  misc_feature (489)..(810): Homolog of NCBI NO: 15235115 NR Description: putative protein; protein id: At4g39530.1
  misc_feature (153)..(379): Homolog of NCBI NO: 15235115 NR Description: putative protein; protein id: At4g39530.1
  misc_feature (369)..(802): Homolog of NCBI NO: 37534112 NR Description: putative selenium-binding protein-like [Oryza
MKKAMEFDLQLQTEECVKSGSVKEIDRLPWKGGSESNPDYECLRAELRKMAPVNGRAVLIFRSKCGCPIAKLEGWGPKRSRRHKKWNLVTSEFVGSVYPVLATYLLPLIILRPVCSEDLCLCNPPHWLWILDKSLGFDTRFLSIMARCFSAPSRTHFDFSGESSDTERALVSALGSCASSNDVTCGRQIHCRVLKSGLDSNGYICNSVLNMYAKCRLLADAESVFRDHAKLDSASFNIMVDGYVRSRRLWDALKLFDVMPERSCVSYTTLIKGYAQNNQWSEAMELFREMRNLGIMLNEVTLATVISACSHLGGIWDCRMLQSLAIKLKLEGRVFVSTNLLHMYCLCLCLKDARKLFDEMPERNLVTWNVMLNGYSKAGLIEQAEELFDQITEKDIVSWGTMIDGCLRKNQLDEALVYYTEMLRCGMKPSEVMMVDLLSASARSVGSSKGLQLHGTIVKRGFDCYDFLQATIIHFYAVSNDIKLALQQFEASVKDHIASRNALIAGFVKNGMVEQAREVFDQTHDKDIFSWNAMISGYAQSLSPQLALHLFREMISSSQVKPDAITMVSVFSAISSLGSLEEGKRAHDYLNFSTIPPNDNLTAAIIDMYAKCGSIETALNIFHQTKNISSSTISPWNAIICGSATHGHAKLALDLYSDLQSLPIKPNSITFVGVLSACCHAGLVELGKTYFESMKSDHGIEPDIKHYGCMVDLLGKAGRLEEAKEMIKKMPVKADVMIWGMLLSASRTHGNVEIAELAATELAAIDPSHGGCKVMLSNVYADAGRWEDVALVREEMRTRDVEWSRAFSGVV

SEQ ID NO: 74246 - DNA, 1416 bp, Arabidopsis thaliana
  misc_feature (1)..(1416): Ceres Seq. ID no. 5000617
  misc_feature: MA Experiment ID: 20000307 Result: Up-regulated in Transcription
  misc_feature: MA Experiment 20000307 PARAMETER Experiment Name: At_Germinating_Seeds_Sub_P Parameter: Age (hr) Value: 24 vs. 0
  misc_feature: MA Experiment 20000307 PARAMETER Experiment Name: At_Germinating_Seeds_Sub_P Parameter: Organism Value: A. thaliana
  misc_feature: MA Experiment 20000307 PARAMETER Experiment Name: At_Germinating_Seeds_Sub_P Parameter: Plant Line Value: WS
  misc_feature: MA Experiment 20000307 PARAMETER Experiment Name: At_Germinating_Seeds_Sub_P Parameter: Tissue Value: Germinating Seeds
  misc_feature: MA Experiment ID: 20000328 Result: Down-regulated in Transcription
  misc_feature: MA Experiment 20000328 PARAMETER Experiment Name: At_42deg_Heat_Sub_P Parameter: Age (day) Value: 14
  misc_feature: MA Experiment 20000328 PARAMETER Experiment Name: At_42deg_Heat_Sub_P Parameter: Organism Value: A. thaliana
  misc_feature: MA Experiment 20000328 PARAMETER Experiment Name: At_42deg_Heat_Sub_P Parameter: Plant Line Value: WS
  misc_feature: MA Experiment 20000328 PARAMETER Experiment Name: At_42deg_Heat_Sub_P Parameter: Temperature (deg C) Value: 42 vs. 22
  misc_feature: MA Experiment 20000328 PARAMETER Experiment Name: At_42deg_Heat_Sub_P Parameter: Timepoint (hr) Value: 6
  misc_feature: MA Experiment 20000328 PARAMETER Experiment Name: At_42deg_Heat_Sub_P Parameter: Tissue Value: Aerial
  misc_feature: MA Experiment ID: 20000348 Result: Down-regulated in Transcription
  misc_feature: MA Experiment 20000348 PARAMETER Experiment Name: At_100uM_ABA_Sub_P Parameter: Age (day) Value: 14
  misc_feature: MA Experiment 20000348 PARAMETER Experiment Name: At_100uM_ABA_Sub_P Parameter: Organism Value: A. thaliana
  misc_feature: MA Experiment 20000348 PARAMETER Experiment Name: At_100uM_ABA_Sub_P Parameter: Plant Line Value: WS
  misc_feature: MA Experiment 20000348 PARAMETER Experiment Name: At_100uM_ABA_Sub_P Parameter: Timepoint (hr) Value: 1
  misc_feature: MA Experiment 20000348 PARAMETER Experiment Name: At_100uM_ABA_Sub_P Parameter: Tissue Value: Aerial
  misc_feature: MA Experiment 20000348 PARAMETER Experiment Name: At_100uM_ABA_Sub_P Parameter: Treatment Value: 100uM ABA vs. No Treatment
atgaaacagaggaagaacagtaatctctcaatcttcgtcgtagtcttctctgttttcctcttcgggatcttcatgtacaatgaagacgtcaagtccatcgcagagtttcctttctccacctcaaaacctcacgacgtccacgacgaagcgacaccgatcacagagatcacaacactaccggttcaagagtcgatcaagaactcagacccaattcaggaatcgatcaaaaacgcagactcagttcaagattcagttaaagacgtagcagaaccagttcaagaggaggtatcgaaaacagaggaagttaaaaagattgagcttttcgctgcgacggaggatgaagaagacgtggaattgccgccggaggaatgcgatttgttcaccggagaatgggtttttgataacgagacgcatccattgtataaagaggatcaatgtgagttcttgacggcgcaagtcacttgcatgagaaatggaagaagagattctctgtatcagaactggagatggcaacctagagattgttctttaccaaagttcaaagcgaaattgctgttggagaagctaaggaacaagagaatgatgttcgttggagattccctaaaccggaaccaatgggaatcaatggtttgtttggttcaatcagtggttcctcccggtcgaaaaagcttgaacaaaaccggttctctctccgtcttccgagtcgaggattataatgcgacggtggagttttattgggcaccatttttggtggaatcgaattcagatgatccaaatatgcatagtatacttaaccgtataataatgcctgagtccattgaaaagcatggagtcaactggaaaggcgttgactttcttgttttcaacacttacatttggtggatgaacacattcgctatgaaagtcctacgaggatcgttcgataaaggagacaccgagtatgaggagatcgaacggccagtagcgtataggagagtgatgaggacttggggagattgggtggaacgaaatattgatcctctacgtaccactgtcttctttgctagcatgtctcctcttcacatcaagagcttggattgggagaatccagatgggatcaagtgtgcattagagacgacaccaatcctaaacatgtcaatgccattcagcgtaggaacagactacagactgttttcagtagcggaaaacgtcacgcattctcttaatgttccggtttactttctcaacattaccaaactctccgaataccggaaagatgctcacacttcggttcacacaatccgacaaggcaaaatgctgacgccggagcaacaagccgatcccaacacttacgccgattgtatccattggtgtcttcccggtttacctgacacgtggaatgagttcctttacacacgtatcatttcccgttcgtga

SEQ ID NO: 74247 - protein, 471 aa, Arabidopsis thaliana
  peptide (1)..(471): Ceres Seq. ID no. 5000618
  misc_feature (294)..(467): Pfam Name: Arabidopsis proteins of unknown function Pfam Description: Arabidopsis proteins of unknown function
  misc_feature (1)..(471): Homolog of NCBI NO: 15228789 NR Description: putative protein; protein id: At3g55990.1
  misc_feature (1)..(471): Homolog of NCBI NO: 26452343 NR Description: unknown protein [Arabidopsis thaliana]
  misc_feature (117)..(470): Homolog of NCBI NO: 18405283 NR Description: expressed protein; protein id: At2g40150.1, by cDNA: gi_13877598 [Arabidopsis thaliana] Unknown protein [Arabidopsis thaliana]
  misc_feature (117)..(470): Homolog of NCBI NO: 25366731 NR Description: hypothetical protein At2g40150 [imported] -
  misc_feature (1)..(41): Homolog of NCBI NO: 18405283 NR Description: expressed protein; protein id: At2g40150.1, by cDNA: gi_13877598 [Arabidopsis thaliana] Unknown protein [Arabidopsis thaliana]
  misc_feature (1)..(41): Homolog of NCBI NO: 25366731 NR Description: hypothetical protein At2g40150 [imported] -
  misc_feature (59)..(470): Homolog of NCBI NO: 34907966 NR Description: P0446G04.14 [Oryza sativa (japonica
  misc_feature (100)..(468): Homolog of NCBI NO: 18405285 NR Description: expressed protein; protein id: At2g40160.1, by cDNA: gi_15983770 [Arabidopsis thaliana]
  misc_feature (105)..(471): Homolog of NCBI NO: 34898234 NR Description: P0034A04.28 [Oryza sativa (japonica
  misc_feature (86)..(467): Homolog of NCBI NO: 18412850 NR Description: putative protein; protein id: At5g01360.1, by cDNA: 153592. [Arabidopsis thaliana]
MKQRKNSNLSIFVVVFSVFLFGIFMYNEDVKSIAEFPFSTSKPHDVHDEATPITEITTLPVQESIKNSDPIQESIKNADSVQDSVKDVAEPVQEEVSKTEEVKKIELFAATEDEEDVELPPEECDLFTGEWVFDNETHPLYKEDQCEFLTAQVTCMRNGRRDSLYQNWRWQPRDCSLPKFKAKLLLEKLRNKRMMFVGDSLNRNQWESMVCLVQSVVPPGRKSLNKTGSLSVFRVEDYNATVEFYWAPFLVESNSDDPNMHSILNRIIMPESIEKHGVNWKGVDFLVFNTYIWWMNTFAMKVLRGSFDKGDTEYEEIERPVAYRRVMRTWGDWVERNIDPLRTTVFFASMSPLHIKSLDWENPDGIKCALETTPILNMSMPFSVGTDYRLFSVAENVTHSLNVPVYFLNITKLSEYRKDAHTSVHTIRQGKMLTPEQQADPNTYADCIHWCLPGLPDTWNEFLYTRIISRS

SEQ ID NO: 74248 - protein, 447 aa, Arabidopsis thaliana
  peptide (1)..(447): Ceres Seq. ID no. 5000619
  misc_feature (270)..(443): Pfam Name: Arabidopsis proteins of unknown function Pfam Description: Arabidopsis proteins of unknown function
  misc_feature (1)..(447): Homolog of NCBI NO: 15228789 NR Description: putative protein; protein id: At3g55990.1
  misc_feature (1)..(447): Homolog of NCBI NO: 26452343 NR Description: unknown protein [Arabidopsis thaliana]
  misc_feature (93)..(446): Homolog of NCBI NO: 18405283 NR Description: expressed protein; protein id: At2g40150.1, by cDNA: gi_13877598 [Arabidopsis thaliana] Unknown protein [Arabidopsis thaliana]
  misc_feature (93)..(446): Homolog of NCBI NO: 25366731 NR Description: hypothetical protein At2g40150 [imported] -
  misc_feature (1)..(17): Homolog of NCBI NO: 18405283 NR Description: expressed protein; protein id: At2g40150.1, by cDNA: gi_13877598 [Arabidopsis thaliana] Unknown protein [Arabidopsis thaliana]
  misc_feature (1)..(17): Homolog of NCBI NO: 25366731 NR Description: hypothetical protein At2g40150 [imported] -
  misc_feature (35)..(446): Homolog of NCBI NO: 34907966 NR Description: P0446G04.14 [Oryza sativa (japonica
  misc_feature (76)..(444): Homolog of NCBI NO: 18405285 NR Description: expressed protein; protein id: At2g40160.1, by cDNA: gi_15983770 [Arabidopsis thaliana]
  misc_feature (81)..(447): Homolog of NCBI NO: 34898234 NR Description: P0034A04.28 [Oryza sativa (japonica
  misc_feature (62)..(443): Homolog of NCBI NO: 18412850 NR Description: putative protein; protein id: At5g01360.1, by cDNA: 153592. [Arabidopsis thaliana]
MYNEDVKSIAEFPFSTSKPHDVHDEATPITEITTLPVQESIKNSDPIQESIKNADSVQDSVKDVAEPVQEEVSKTEEVKKIELFAATEDEEDVELPPEECDLFTGEWVFDNETHPLYKEDQCEFLTAQVTCMRNGRRDSLYQNWRWQPRDCSLPKFKAKLLLEKLRNKRMMFVGDSLNRNQWESMVCLVQSVVPPGRKSLNKTGSLSVFRVEDYNATVEFYWAPFLVESNSDDPNMHSILNRIIMPESIEKHGVNWKGVDFLVFNTYIWWMNTFAMKVLRGSFDKGDTEYEEIERPVAYRRVMRTWGDWVERNIDPLRTTVFFASMSPLHIKSLDWENPDGIKCALETTPILNMSMPFSVGTDYRLFSVAENVTHSLNVPVYFLNITKLSEYRKDAHTSVHTIRQGKMLTPEQQADPNTYADCIHWCLPGLPDTWNEFLYTRIISRS

SEQ ID NO: 74249 - protein, 316 aa, Arabidopsis thaliana
  peptide (1)..(316): Ceres Seq. ID no. 5000620
  misc_feature (139)..(312): Pfam Name: Arabidopsis proteins of unknown function Pfam Description: Arabidopsis proteins of unknown function
  misc_feature (1)..(316): Homolog of NCBI NO: 15228789 NR Description: putative protein; protein id: At3g55990.1
  misc_feature (1)..(316): Homolog of NCBI NO: 26452343 NR Description: unknown protein [Arabidopsis thaliana]
  misc_feature (1)..(315): Homolog of NCBI NO: 18405283 NR Description: expressed protein; protein id: At2g40150.1, by cDNA: gi_13877598 [Arabidopsis thaliana] Unknown protein [Arabidopsis thaliana]
  misc_feature (1)..(315): Homolog of NCBI NO: 25366731 NR Description: hypothetical protein At2g40150 [imported] -
  misc_feature (1)..(315): Homolog of NCBI NO: 34907966 NR Description: P0446G04.14 [Oryza sativa (japonica
  misc_feature (1)..(313): Homolog of NCBI NO: 18405285 NR Description: expressed protein; protein id: At2g40160.1, by cDNA: gi_15983770 [Arabidopsis thaliana]
  misc_feature (1)..(316): Homolog of NCBI NO: 34898234 NR Description: P0034A04.28 [Oryza sativa (japonica
  misc_feature (1)..(312): Homolog of NCBI NO: 18412850 NR Description: putative protein; protein id: At5g01360.1, by cDNA: 153592. [Arabidopsis thaliana]
  misc_feature (1)..(312): Homolog of NCBI NO: 15228429 NR Description: unknown protein; protein id: At3g11030.1 thaliana] >gi|6016691|gb|AAF01518.1|AC009991_14 unknown protein thaliana] >gi|27754560|gb|AAO22727.1| unknown protein
  misc_feature (1)..(312): Homolog of NCBI NO: 28876013 NR Description: unknown protein [Oryza sativa (japonica
MRNGRRDSLYQNWRWQPRDCSLPKFKAKLLLEKLRNKRMMFVGDSLNRNQWESMVCLVQSVVPPGRKSLNKTGSLSVFRVEDYNATVEFYWAPFLVESNSDDPNMHSILNRIIMPESIEKHGVNWKGVDFLVFNTYIWWMNTFAMKVLRGSFDKGDTEYEEIERPVAYRRVMRTWGDWVERNIDPLRTTVFFASMSPLHIKSLDWENPDGIKCALETTPILNMSMPFSVGTDYRLFSVAENVTHSLNVPVYFLNITKLSEYRKDAHTSVHTIRQGKMLTPEQQADPNTYADCIHWCLPGLPDTWNEFLYTRIISRS

SEQ ID NO: 74250 - DNA, 1008 bp, Arabidopsis thaliana
  misc_feature (1)..(1008): Ceres Seq. ID no. 5000639
  misc_feature: MA Experiment ID: 20000179 Result: Up-regulated in Transcription
  misc_feature: MA Experiment 20000179 PARAMETER Experiment Name: At_Germinating_Seeds_P Parameter: Age (hr) Value: 6 vs. 0
  misc_feature: MA Experiment 20000179 PARAMETER Experiment Name: At_Germinating_Seeds_P Parameter: Tissue Value: Germinating Seeds
  misc_feature: MA Experiment ID: 20000180 Result: Up-regulated in Transcription
  misc_feature: MA Experiment 20000180 PARAMETER Experiment Name: At_Germinating_Seeds_P Parameter: Age (hr) Value: 24 vs. 0
  misc_feature: MA Experiment 20000180 PARAMETER Experiment Name: At_Germinating_Seeds_P Parameter: Tissue Value: Germinating Seeds
  misc_feature: MA Experiment ID: 20001451 Result: Down-regulated in Transcription
  misc_feature: MA Experiment 20001451 PARAMETER Experiment Name: At_Far-red-induction_P Parameter: Age (day) Value: 7
  misc_feature: MA Experiment 20001451 PARAMETER Experiment Name: At_Far-red-induction_P Parameter: Light Value: Far-red vs. White
  misc_feature: MA Experiment 20001451 PARAMETER Experiment Name: At_Far-red-induction_P Parameter: Organism Value: A. thaliana
  misc_feature: MA Experiment 20001451 PARAMETER Experiment Name: At_Far-red-induction_P Parameter: Plant Line Value: Columbia
  misc_feature: MA Experiment 20001451 PARAMETER Experiment Name: At_Far-red-induction_P Parameter: Timepoint (hr) Value: 24
  misc_feature: MA Experiment 20001451 PARAMETER Experiment Name: At_Far-red-induction_P Parameter: Tissue Value: Whole Plant
atggtgaattcgtacgttcctcttcgtttcaccattttcatctccttctccatcgcagcagcttcatccttcaaactccactccgcttctcattctccgtcgtcatttccgaaagccaccggcgacgatctactctccgttctcggacctccctccgccgcgtcgtgcctcaacccaatcgtctctcgagagatcaaatcgtgtcttaaattcctcgtcccattcaaatcggataaacctaaacccgaatttggacgatgctcgcctcgtactggactctgttccggaaaaattgacgccgttgagagacggagcaagtttgaagaggagaattctctaatctggtggccaccggaatcggttctagagcttgctcgtctcgctgttgactccggtggtgatcccggttcaattcagcgaactctcaatccgaaaatgatcccggttcctgatgttgaacgatcaagaaaagataaatgtcaacttactagaactccttatggtcgtcattttatagcagaggaagtgaactcatatttcgagttcttgtttcatctaattgaatctaggggacctagtgttggattgaatgtttcattgagtagatatgatttgttccatggccatttattccttgcctcagaatctggacgccttggaatattgtttcatgctaaagagtatccagcctatgacaagaaagtgtttccttacaacatgggatattgccagagaggatctgacgtgaaatacaatgattcaatgaacttgaggaatatcctttggcttgcaccattacctagcaactcttctccagattgggttgctccaggtgtacttgtggttcttgatgcgcatccggatggaatcatataccgagatctcatccctgactatgttaagtttgtaagaacaatatacgaagatgatttgggaacaaccgcagttgatgtcaattacttgaatgtcggagctcacgaacctgactatcagcttttcatgtgctga

SEQ ID NO: 74251 - protein, 335 aa, Arabidopsis thaliana
  peptide (1)..(335): Ceres Seq. ID no. 5000640
  misc_feature (1)..(335): Homolog of NCBI NO: 40823291 NR Description: At5g27710 [Arabidopsis thaliana]
  misc_feature (1)..(222): Homolog of NCBI NO: 15241027 NR Description: putative protein; protein id: At5g27710.1
  misc_feature (223)..(335): Homolog of NCBI NO: 15241027 NR Description: putative protein; protein id: At5g27710.1
  misc_feature (65)..(335): Homolog of NCBI NO: 33146851 NR Description: unknown protein [Oryza sativa (japonica
MVNSYVPLRFTIFISFSIAAASSFKLHSASHSPSSFPKATGDDLLSVLGPPSAASCLNPIVSREIKSCLKFLVPFKSDKPKPEFGRCSPRTGLCSGKIDAVERRSKFEEENSLIWWPPESVLELARLAVDSGGDPGSIQRTLNPKMIPVPDVERSRKDKCQLTRTPYGRHFIAEEVNSYFEFLFHLIESRGPSVGLNVSLSRYDLFHGHLFLASESGRLGILFHAKEYPAYDKKVFPYNMGYCQRGSDVKYNDSMNLRNILWLAPLPSNSSPDWVAPGVLVVLDAHPDGIIYRDLIPDYVKFVRTIYEDDLGTTAVDVNYLNVGAHEPDYQLFMC

SEQ ID NO: 74252 - protein, 190 aa, Arabidopsis thaliana
  peptide (1)..(190): Ceres Seq. ID no. 5000641
  misc_feature (1)..(190): Homolog of NCBI NO: 40823291 NR Description: At5g27710 [Arabidopsis thaliana]
  misc_feature (1)..(77): Homolog of NCBI NO: 15241027 NR Description: putative protein; protein id: At5g27710.1
  misc_feature (78)..(190): Homolog of NCBI NO: 15241027 NR Description: putative protein; protein id: At5g27710.1
  misc_feature (1)..(190): Homolog of NCBI NO: 33146851 NR Description: unknown protein [Oryza sativa (japonica
MIPVPDVERSRKDKCQLTRTPYGRHFIAEEVNSYFEFLFHLIESRGPSVGLNVSLSRYDLFHGHLFLASESGRLGILFHAKEYPAYDKKVFPYNMGYCQRGSDVKYNDSMNLRNILWLAPLPSNSSPDWVAPGVLVVLDAHPDGIIYRDLIPDYVKFVRTIYEDDLGTTAVDVNYLNVGAHEPDYQLFMC

SEQ ID NO: 74253 - DNA, 1284 bp, Arabidopsis thaliana
  misc_feature (1)..(1284): Ceres Seq. ID no. 5000819
  misc_feature: MA Experiment ID: 20000307 Result: Up-regulated in Transcription
  misc_feature: MA Experiment 20000307 PARAMETER Experiment Name: At_Germinating_Seeds_Sub_P Parameter: Age (hr) Value: 24 vs. 0
  misc_feature: MA Experiment 20000307 PARAMETER Experiment Name: At_Germinating_Seeds_Sub_P Parameter: Organism Value: A. thaliana
  misc_feature: MA Experiment 20000307 PARAMETER Experiment Name: At_Germinating_Seeds_Sub_P Parameter: Plant Line Value: WS
  misc_feature: MA Experiment 20000307 PARAMETER Experiment Name: At_Germinating_Seeds_Sub_P Parameter: Tissue Value: Germinating Seeds
  misc_feature: MA Experiment ID: 20000355 Result: Up-regulated in Transcription
  misc_feature: MA Experiment 20000355 PARAMETER Experiment Name: At_Siliques_Sub_P Parameter: Age (day) Value: 21
  misc_feature: MA Experiment 20000355 PARAMETER Experiment Name: At_Siliques_Sub_P Parameter: Organism Value: A. thaliana
  misc_feature: MA Experiment 20000355 PARAMETER Experiment Name: At_Siliques_Sub_P Parameter: Plant Line Value: WS
  misc_feature: MA Experiment 20000355 PARAMETER Experiment Name: At_Siliques_Sub_P Parameter: Tissue Value: Less Than 5mm Siliques vs. Whole Plant
atgtcgcatcttgatgatattccttcgacgcctggcaagttcaagccctacttccaccgtacgcggtggcaatcctccgtcgccaagctcgccttttggtctctcgtcttcgttggtttgatcttcatcttcttctaccgatctcccgtttcctccaatcccgccgatccttctcgccgttctcttcgtacctactcctggggtggacccgcttgggagaaacgggtcagatcctccgcccgtctccgtacccgccgcggtttctctgttctcgtcaccggagccgccggtttcgtcggtacccatgtctccgccgctctcaaacgccgcggagatggcgttctggggcttgacaacttcaacgattactacgatccatcgctcaagagagcaaggcaagcccttttggagagaagcggagtgtttgttgttgaaggagacatcaatgacgctgctctcttgaagaagctctttgaagttgttccctttacccacgttatgcatttggctgctcaagctggtgtcaggtacgccatggaaaatcctagctcttatgttcacagtaacatcgctggcttcgtcaatctccttgaggtttgcaaatctgccaatccccaacccgccattgtctgggcttcctctagctctgtctacgggctcaacactaaggtccccttctccgagaaagacagaactgaccaaccagctagtctctatgctgctactaagaaggctggtgaagagattgctcacacttacaatcacatctatggactctctcttactggcttgaggtttttcaccgtctatggtccttggggaaggcctgacatggcctatttcttcttcaccagagacattctcaaagggaaagccatttcaatctttgagggggtcaaccatggaaccgtggctagggacttcacttacattgatgacattgtcaaggggtgtttaggggctttggacacggctgagaagagcactggtagtggtggtaagaagcgcggtgcggctcagttacgggttttcaatctcggcaacacttcgcccgttccagtgactgatcttgtcaccattcttgagagacttctcaaagtcaaggccaagaggaacattatgaagttgccgaggaacggggatgtgcagttcactcatgctaatatcagttctgcgcagagagagctcggctacaaacccaccaccgatcttcagacgggtctcaagaagtttgcgagatggtatttgggttactacaatggcggaaagaaagctgcaagctga

SEQ ID NO: 74254 - protein, 427 aa, Arabidopsis thaliana; identical to SEQ ID NO: 48569
  peptide (1)..(427): Ceres Seq. ID no. 5000820
  misc_feature (90)..(419): Pfam Name: NAD dependent epimerase/dehydratase family Pfam Description: NAD dependent epimerase/dehydratase family
  misc_feature (1)..(427): Homolog of NCBI NO: 15236712 NR Description: putative nucleotide sugar epimerase; protein id:
  misc_feature (1)..(427): Homolog of NCBI NO: 15217591 NR Description: nucleotide sugar epimerase, putative; protein id: supported by cDNA: 116833., supported by cDNA: gi_12248040
  misc_feature (16)..(427): Homolog of NCBI NO: 21536982 NR Description: nucleotide sugar epimerase, putative [Arabidopsis
  misc_feature (1)..(427): Homolog of NCBI NO: 15225451 NR Description: putative nucleotide sugar epimerase; protein id: [Arabidopsis thaliana] >gi|25408944|pir||A84889 probable
  misc_feature (1)..(427): Homolog of NCBI NO: 15234486 NR Description: nucleotide sugar epimerase -like protein; protein At4g12250.1, supported by cDNA: gi_15293118 [Arabidopsis
  misc_feature (1)..(427): Homolog of NCBI NO: 15293119 NR Description: putative nucleotide sugar epimerase [Arabidopsis
  misc_feature (1)..(425): Homolog of NCBI NO: 15234745 NR Description: nucleotide sugar epimerase-like protein; protein At4g30440.1, supported by cDNA: 154741., supported by cDNA:
  misc_feature (66)..(419): Homolog of NCBI NO: 15229524 NR Description: NAD dependent epimerase, putative; protein id: supported by cDNA: gi_13877894, supported by cDNA: gi_15810204, by cDNA: gi_17065097 [Arabidopsis thaliana] [Arabidopsis
  misc_feature (66)..(419): Homolog of NCBI NO: 24417280 NR Description: unknown [Arabidopsis thaliana]
  misc_feature (66)..(419): Homolog of NCBI NO: 29647497 NR Description: OJ1191_A10.21 [Oryza sativa (japonica

SEQ ID NO: 74255 - protein, 261 aa, Arabidopsis thaliana
  peptide (1)..(261): Ceres Seq. ID no. 5000821
  misc_feature (1)..(253): Pfam Name: NAD dependent epimerase/dehydratase family Pfam Description: NAD dependent epimerase/dehydratase family
  misc_feature (1)..(261): Homolog of NCBI NO: 15236712 NR Description: putative nucleotide sugar epimerase; protein id:
  misc_feature (1)..(261): Homolog of NCBI NO: 15217591 NR Description: nucleotide sugar epimerase, putative; protein id: supported by cDNA: 116833., supported by cDNA: gi_12248040
  misc_feature (1)..(261): Homolog of NCBI NO: 21536982 NR Description: nucleotide sugar epimerase, putative [Arabidopsis
  misc_feature (1)..(261): Homolog of NCBI NO: 15225451 NR Description: putative nucleotide sugar epimerase; protein id: [Arabidopsis thaliana] >gi|25408944|pir||A84889 probable
  misc_feature (1)..(261): Homolog of NCBI NO: 15234486 NR Description: nucleotide sugar epimerase -like protein; protein At4g12250.1, supported by cDNA: gi_15293118 [Arabidopsis
  misc_feature (1)..(261): Homolog of NCBI NO: 15293119 NR Description: putative nucleotide sugar epimerase [Arabidopsis
  misc_feature (1)..(259): Homolog of NCBI NO: 15234745 NR Description: nucleotide sugar epimerase-like protein; protein At4g30440.1, supported by cDNA: 154741., supported by cDNA:
  misc_feature (1)..(253): Homolog of NCBI NO: 15229524 NR Description: NAD dependent epimerase, putative; protein id: supported by cDNA: gi_13877894, supported by cDNA: gi_15810204, by cDNA: gi_17065097 [Arabidopsis thaliana] [Arabidopsis
  misc_feature (1)..(253): Homolog of NCBI NO: 24417280 NR Description: unknown [Arabidopsis thaliana]
  misc_feature (1)..(253): Homolog of NCBI NO: 29647497 NR Description: OJ1191_A10.21 [Oryza sativa (japonica
MHLAAQAGVRYAMENPSSYVHSNIAGFVNLLEVCKSANPQPAIVWASSSSVYGLNTKVPFSEKDRTDQPASLYAATKKAGEEIAHTYNHIYGLSLTGLRFFTVYGPWGRPDMAYFFFTRDILKGKAISIFEGVNHGTVARDFTYIDDIVKGCLGALDTAEKSTGSGGKKRGAAQLRVFNLGNTSPVPVTDLVTILERLLKVKAKRNIMKLPRNGDVQFTHANISSAQRELGYKPTTDLQTGLKKFARWYLGYYNGGKKAAS

SEQ ID NO: 74256 - protein, 249 aa, Arabidopsis thaliana
  peptide (1)..(249): Ceres Seq. ID no. 5000822
  misc_feature (1)..(241): Pfam Name: NAD dependent epimerase/dehydratase family Pfam Description: NAD dependent epimerase/dehydratase family
  misc_feature (1)..(249): Homolog of NCBI NO: 15236712 NR Description: putative nucleotide sugar epimerase; protein id:
  misc_feature (1)..(249): Homolog of NCBI NO: 15217591 NR Description: nucleotide sugar epimerase, putative; protein id: supported by cDNA: 116833., supported by cDNA: gi_12248040
  misc_feature (1)..(249): Homolog of NCBI NO: 21536982 NR Description: nucleotide sugar epimerase, putative [Arabidopsis
  misc_feature (1)..(249): Homolog of NCBI NO: 15225451 NR Description: putative nucleotide sugar epimerase; protein id: [Arabidopsis thaliana] >gi|25408944|pir||A84889 probable
  misc_feature (1)..(249): Homolog of NCBI NO: 15234486 NR Description: nucleotide sugar epimerase -like protein; protein At4g12250.1, supported by cDNA: gi_15293118 [Arabidopsis
  misc_feature (1)..(249): Homolog of NCBI NO: 15293119 NR Description: putative nucleotide sugar epimerase [Arabidopsis
  misc_feature (1)..(247): Homolog of NCBI NO: 15234745 NR Description: nucleotide sugar epimerase-like protein; protein At4g30440.1, supported by cDNA: 154741., supported by cDNA:
  misc_feature (1)..(241): Homolog of NCBI NO: 15229524 NR Description: NAD dependent epimerase, putative; protein id: supported by cDNA: gi_13877894, supported by cDNA: gi_15810204, by cDNA: gi_17065097 [Arabidopsis thaliana] [Arabidopsis
  misc_feature (1)..(241): Homolog of NCBI NO: 24417280 NR Description: unknown [Arabidopsis thaliana]
  misc_feature (1)..(241): Homolog of NCBI NO: 29647497 NR Description: OJ1191_A10.21 [Oryza sativa (japonica
MENPSSYVHSNIAGFVNLLEVCKSANPQPAIVWASSSSVYGLNTKVPFSEKDRTDQPASLYAATKKAGEEIAHTYNHIYGLSLTGLRFFTVYGPWGRPDMAYFFFTRDILKGKAISIFEGVNHGTVARDFTYIDDIVKGCLGALDTAEKSTGSGGKKRGAAQLRVFNLGNTSPVPVTDLVTILERLLKVKAKRNIMKLPRNGDVQFTHANISSAQRELGYKPTTDLQTGLKKFARWYLGYYNGGKKAAS

SEQ ID NO: 74257 - DNA, 2022 bp, Arabidopsis thaliana
  misc_feature (1)..(2022): Ceres Seq. ID no. 5001156
  misc_feature: MA Experiment ID: 20001558 Result: Up-regulated in Transcription
  misc_feature: MA Experiment 20001558 PARAMETER Experiment Name: At_Drought_Soil_Dry_P Parameter: Age (day) Value: 27
  misc_feature: MA Experiment 20001558 PARAMETER Experiment Name: At_Drought_Soil_Dry_P Parameter: Organism Value: A. thaliana
  misc_feature: MA Experiment 20001558 PARAMETER Experiment Name: At_Drought_Soil_Dry_P Parameter: Plant Line Value: WS
  misc_feature: MA Experiment 20001558 PARAMETER Experiment Name: At_Drought_Soil_Dry_P Parameter: Post Timepoint (hr) Value: 6
  misc_feature: MA Experiment 20001558 PARAMETER Experiment Name: At_Drought_Soil_Dry_P Parameter: Post-Treatment Value: Re-Water vs. No Drought
  misc_feature: MA Experiment 20001558 PARAMETER Experiment Name: At_Drought_Soil_Dry_P Parameter: Timepoint (day) Value: 13
  misc_feature: MA Experiment 20001558 PARAMETER Experiment Name: At_Drought_Soil_Dry_P Parameter: Treatment Value: Drought vs. No Drought
atgagtgtgacagagtacaatgcaatgattggtgtttacttagagcatgctgagaaaagcaatgatctagattatgctcttggccatattgagaaggcttttgagcttttgaaatctatgagagatcgtggatttttgattgaagaaagagtttatggtcctcttcttggttatttgattggtatggatatggtagatgagtttcatagtttcaaggatgtgattagggaggctagtcccggttccgttgagagacttggttactatgaaatgcttctttggatccatcttggtgatggagagaagattgaggaactttgcagtacaattgatggtgataacggtgaaagcttatcagtcttgcaagaaaattatctgcttgcactatgtaaaaaagaccaaaagtaccatcttgagaggctcttagagattgtagacataacaaaagttcgttcgtcggacctattggcaaacatatttgaatatcttgggaggttttcattggattctgttgcgagtagattcctttgggagctaagagaaagtgatgaaggagtgaagaacgtttctgatctcatctctatctattctacttgcaccccaaatccaacggttgaggatacaatcttaaaatttaacaagatgcatgaagaacttgatgttatgccttcatctacatcgtacgaaaagcttgttaagtatagctgtgactcgaatgaggtagtcactgctcttgatgtagttgaaaaaatgggtgaagcaggtttgatgatatccgcagatatcctacattcattgttacatgccattgatgaagttcttgagtttgatttggtgcgaagaatccattcaattatgtgcacaaagagtgtgaaacctaatactgagaacttccggagcattatacgtttgtgcacaagaatcaaagattttgaaggtgcatataatatgcttggtaatttaaagaacttcaatttggaaccaaactctagcatgttcaattgtatattggctggatattttagggagaaaaatgtgagtagtgcgttaatggtcgtcaagcaaatgaaggaagctggcgttaaacctgattccataacttttggttatctaataaacaactgtacccaggaggacgctattactaagtactatgaggagatgaagcaagcaggagttcaagctactaagcgaatttacatgtccctgatagatgcatatgcagcatctgggaagtttgagaaggcgaaacaggtgctcgtagatccagatgttccggctataaaccaaaatgaactgaaaagtgtgcttatttcggctcttgcatcacgtggaaaatgggcagatgccttacatatatatgaagaaatgaggaaagccgaatgccacgtagacccgaaatcgattatatctcttatagaatactctgattcaaagggagagttaagtacgctagttcaactggctgatgacctacaagatgatactagttggatcgacggtttcttcagaatgattttgttcgctgtccgcaataaaaagtcaagcgatattgttgatctgctgaaacggaacaaggtccggttgttaaagaaaggcatacctgtggaagctcattttgacgaggtgttttgggcaatcgcagagacagagccatccaaagtgcatctaggaatggatttgctaagatttatgaaagatgagctcgggtttgttccttcaagaaaatgtctagattttctcttacatgcatgtgttaatgccaaggacctggagcacggtctattggtgtggaaagagtaccaatctgcagcattcccttgcaacgtcctgagctttctgaggatgtatcaggttctactagctgcaggggattcagaaggtgccaaggcattggtgtcaaaaattccaaaagatgataaagatgtacaacatatcatcgaagaaagtcagtctgcattttctcaagcacccaacaagaagaaaccaaaaaagaaaatgattgttttatcaacaaagtag

SEQ ID NO: 74258 - protein, 673 aa, Arabidopsis thaliana
  peptide (1)..(673): Ceres Seq. ID no. 5001157
  misc_feature (432)..(466): Pfam Name: PPR repeat Pfam Description: PPR repeat
  misc_feature (183)..(673): Homolog of NCBI NO: 4115946 NR Description: contains similarity to Ipomoea nil leaf protein
  misc_feature (311)..(673): Homolog of NCBI NO: 25407292 NR Description: hypothetical protein AT4g04790 [imported] - thaliana >gi|7267237|emb|CAB80844.1| hypothetical protein
  misc_feature (311)..(673): Homolog of NCBI NO: 30679877 NR Description: pentatricopeptide (PPR) repeat-containing protein
  misc_feature (311)..(615): Homolog of NCBI NO: 7487835 NR Description: hypothetical protein T8O5.90 - Arabidopsis >gi|2894566|emb|CAA17155.1| putative protein [Arabidopsis >gi|7269033|emb|CAB79143.1| putative protein [Arabidopsis
  misc_feature (311)..(615): Homolog of NCBI NO: 30685606 NR Description: pentatricopeptide (PPR) repeat-containing protein
  misc_feature (5)..(163): Homolog of NCBI NO: 7487835 NR Description: hypothetical protein T8O5.90 - Arabidopsis >gi|2894566|emb|CAA17155.1| putative protein [Arabidopsis >gi|7269033|emb|CAB79143.1| putative protein [Arabidopsis
  misc_feature (5)..(163): Homolog of NCBI NO: 30685606 NR Description: pentatricopeptide (PPR) repeat-containing protein
  misc_feature (184)..(569): Homolog of NCBI NO: 30685606 NR Description: pentatricopeptide (PPR) repeat-containing protein
  misc_feature (184)..(569): Homolog of NCBI NO: 7487835 NR Description: hypothetical protein T8O5.90 - Arabidopsis >gi|2894566|emb|CAA17155.1| putative protein [Arabidopsis >gi|7269033|emb|CAB79143.1| putative protein [Arabidopsis
  misc_feature (1)..(422): Homolog of NCBI NO: 4115946 NR Description: contains similarity to Ipomoea nil leaf protein
MSVTEYNAMIGVYLEHAEKSNDLDYALGHIEKAFELLKSMRDRGFLIEERVYGPLLGYLIGMDMVDEFHSFKDVIREASPGSVERLGYYEMLLWIHLGDGEKIEELCSTIDGDNGESLSVLQENYLLALCKKDQKYHLERLLEIVDITKVRSSDLLANIFEYLGRFSLDSVASRFLWELRESDEGVKNVSDLISIYSTCTPNPTVEDTILKFNKMHEELDVMPSSTSYEKLVKYSCDSNEVVTALDVVEKMGEAGLMISADILHSLLHAIDEVLEFDLVRRIHSIMCTKSVKPNTENFRSIIRLCTRIKDFEGAYNMLGNLKNFNLEPNSSMFNCILAGYFREKNVSSALMVVKQMKEAGVKPDSITFGYLINNCTQEDAITKYYEEMKQAGVQATKRIYMSLIDAYAASGKFEKAKQVLVDPDVPAINQNELKSVLISALASRGKWADALHIYEEMRKAECHVDPKSIISLIEYSDSKGELSTLVQLADDLQDDTSWIDGFFRMILFAVRNKKSSDIVDLLKRNKVRLLKKGIPVEAHFDEVFWAIAETEPSKVHLGMDLLRFMKDELGFVPSRKCLDFLLHACVNAKDLEHGLLVWKEYQSAAFPCNVLSFLRMYQVLLAAGDSEGAKALVSKIPKDDKDVQHIIEESQSAFSQAPNKKKPKKKMIVLSTK

SEQ ID NO: 74259 - protein, 665 aa, Arabidopsis thaliana
  peptide (1)..(665): Ceres Seq. ID no. 5001158
  misc_feature (424)..(458): Pfam Name: PPR repeat Pfam Description: PPR repeat
  misc_feature (175)..(665): Homolog of NCBI NO: 4115946 NR Description: contains similarity to Ipomoea nil leaf protein
  misc_feature (303)..(665): Homolog of NCBI NO: 25407292 NR Description: hypothetical protein AT4g04790 [imported] - thaliana >gi|7267237|emb|CAB80844.1| hypothetical protein
  misc_feature (303)..(665): Homolog of NCBI NO: 30679877 NR Description: pentatricopeptide (PPR) repeat-containing protein
  misc_feature (303)..(607): Homolog of NCBI NO: 7487835 NR Description: hypothetical protein T8O5.90 - Arabidopsis >gi|2894566|emb|CAA17155.1| putative protein [Arabidopsis >gi|7269033|emb|CAB79143.1| putative protein [Arabidopsis
  misc_feature (303)..(607): Homolog of NCBI NO: 30685606 NR Description: pentatricopeptide (PPR) repeat-containing protein
  misc_feature (1)..(155): Homolog of NCBI NO: 7487835 NR Description: hypothetical protein T8O5.90 - Arabidopsis >gi|2894566|emb|CAA17155.1| putative protein [Arabidopsis >gi|7269033|emb|CAB79143.1| putative protein [Arabidopsis
  misc_feature (1)..(155): Homolog of NCBI NO: 30685606 NR Description: pentatricopeptide (PPR) repeat-containing protein
  misc_feature (176)..(561): Homolog of NCBI NO: 30685606 NR Description: pentatricopeptide (PPR) repeat-containing protein
  misc_feature (176)..(561): Homolog of NCBI NO: 7487835 NR Description: hypothetical protein T8O5.90 - Arabidopsis >gi|2894566|emb|CAA17155.1| putative protein [Arabidopsis >gi|7269033|emb|CAB79143.1| putative protein [Arabidopsis
  misc_feature (1)..(414): Homolog of NCBI NO: 4115946 NR Description: contains similarity to Ipomoea nil leaf protein
MIGVYLEHAEKSNDLDYALGHIEKAFELLKSMRDRGFLIEERVYGPLLGYLIGMDMVDEFHSFKDVIREASPGSVERLGYYEMLLWIHLGDGEKIEELCSTIDGDNGESLSVLQENYLLALCKKDQKYHLERLLEIVDITKVRSSDLLANIFEYLGRFSLDSVASRFLWELRESDEGVKNVSDLISIYSTCTPNPTVEDTILKFNKMHEELDVMPSSTSYEKLVKYSCDSNEVVTALDVVEKMGEAGLMISADILHSLLHAIDEVLEFDLVRRIHSIMCTKSVKPNTENFRSIIRLCTRIKDFEGAYNMLGNLKNFNLEPNSSMFNCILAGYFREKNVSSALMVVKQMKEAGVKPDSITFGYLINNCTQEDAITKYYEEMKQAGVQATKRIYMSLIDAYAASGKFEKAKQVLVDPDVPAINQNELKSVLISALASRGKWADALHIYEEMRKAECHVDPKSIISLIEYSDSKGELSTLVQLADDLQDDTSWIDGFFRMILFAVRNKKSSDIVDLLKRNKVRLLKKGIPVEAHFDEVFWAIAETEPSKVHLGMDLLRFMKDELGFVPSRKCLDFLLHACVNAKDLEHGLLVWKEYQSAAFPCNVLSFLRMYQVLLAAGDSEGAKALVSKIPKDDKDVQHIIEESQSAFSQAPNKKKPKKKMIVLSTK

SEQ ID NO: 74260 - protein, 634 aa, Arabidopsis thaliana
  peptide (1)..(634): Ceres Seq. ID no. 5001159
  misc_feature (393)..(427): Pfam Name: PPR repeat Pfam Description: PPR repeat
  misc_feature (144)..(634): Homolog of NCBI NO: 4115946 NR Description: contains similarity to Ipomoea nil leaf protein
  misc_feature (272)..(634): Homolog of NCBI NO: 25407292 NR Description: hypothetical protein AT4g04790 [imported] - thaliana >gi|7267237|emb|CAB80844.1| hypothetical protein
  misc_feature (272)..(634): Homolog of NCBI NO: 30679877 NR Description: pentatricopeptide (PPR) repeat-containing protein
  misc_feature (272)..(576): Homolog of NCBI NO: 7487835 NR Description: hypothetical protein T8O5.90 - Arabidopsis >gi|2894566|emb|CAA17155.1| putative protein [Arabidopsis >gi|7269033|emb|CAB79143.1| putative protein [Arabidopsis
  misc_feature (272)..(576): Homolog of NCBI NO: 30685606 NR Description: pentatricopeptide (PPR) repeat-containing protein
  misc_feature (1)..(124): Homolog of NCBI NO: 7487835 NR Description: hypothetical protein T8O5.90 - Arabidopsis >gi|2894566|emb|CAA17155.1| putative protein [Arabidopsis >gi|7269033|emb|CAB79143.1| putative protein [Arabidopsis
  misc_feature (1)..(124): Homolog of NCBI NO: 30685606 NR Description: pentatricopeptide (PPR) repeat-containing protein
  misc_feature (145)..(530): Homolog of NCBI NO: 30685606 NR Description: pentatricopeptide (PPR) repeat-containing protein
  misc_feature (145)..(530): Homolog of NCBI NO: 7487835 NR Description: hypothetical protein T8O5.90 - Arabidopsis >gi|2894566|emb|CAA17155.1| putative protein [Arabidopsis >gi|7269033|emb|CAB79143.1| putative protein [Arabidopsis
  misc_feature (1)..(383): Homolog of NCBI NO: 4115946 NR Description: contains similarity to Ipomoea nil leaf protein
MRDRGFLIEERVYGPLLGYLIGMDMVDEFHSFKDVIREASPGSVERLGYYEMLLWIHLGDGEKIEELCSTIDGDNGESLSVLQENYLLALCKKDQKYHLERLLEIVDITKVRSSDLLANIFEYLGRFSLDSVASRFLWELRESDEGVKNVSDLISIYSTCTPNPTVEDTILKFNKMHEELDVMPSSTSYEKLVKYSCDSNEVVTALDVVEKMGEAGLMISADILHSLLHAIDEVLEFDLVRRIHSIMCTKSVKPNTENFRSIIRLCTRIKDFEGAYNMLGNLKNFNLEPNSSMFNCILAGYFREKNVSSALMVVKQMKEAGVKPDSITFGYLINNCTQEDAITKYYEEMKQAGVQATKRIYMSLIDAYAASGKFEKAKQVLVDPDVPAINQNELKSVLISALASRGKWADALHIYEEMRKAECHVDPKSIISLIEYSDSKGELSTLVQLADDLQDDTSWIDGFFRMILFAVRNKKSSDIVDLLKRNKVRLLKKGIPVEAHFDEVFWAIAETEPSKVHLGMDLLRFMKDELGFVPSRKCLDFLLHACVNAKDLEHGLLVWKEYQSAAFPCNVLSFLRMYQVLLAAGDSEGAKALVSKIPKDDKDVQHIIEESQSAFSQAPNKKKPKKKMIVLSTK

SEQ ID NO: 74261 - DNA, 1839 bp, Arabidopsis thaliana
  misc_feature (1)..(1839): Ceres Seq. ID no. 5001411
  misc_feature: MA Experiment ID: 20000307 Result: Down-regulated in Transcription
  misc_feature: MA Experiment 20000307 PARAMETER Experiment Name: At_Germinating_Seeds_Sub_P Parameter: Age (hr) Value: 24 vs. 0
  misc_feature: MA Experiment 20000307 PARAMETER Experiment Name: At_Germinating_Seeds_Sub_P Parameter: Organism Value: A. thaliana
  misc_feature: MA Experiment 20000307 PARAMETER Experiment Name: At_Germinating_Seeds_Sub_P Parameter: Plant Line Value: WS
  misc_feature: MA Experiment 20000307 PARAMETER Experiment Name: At_Germinating_Seeds_Sub_P Parameter: Tissue Value: Germinating Seeds
  misc_feature: MA Experiment ID: 20000328 Result: Down-regulated in Transcription
  misc_feature: MA Experiment 20000328 PARAMETER Experiment Name: At_42deg_Heat_Sub_P Parameter: Age (day) Value: 14
  misc_feature: MA Experiment 20000328 PARAMETER Experiment Name: At_42deg_Heat_Sub_P Parameter: Organism Value: A. thaliana
  misc_feature: MA Experiment 20000328 PARAMETER Experiment Name: At_42deg_Heat_Sub_P Parameter: Plant Line Value: WS
  misc_feature: MA Experiment 20000328 PARAMETER Experiment Name: At_42deg_Heat_Sub_P Parameter: Temperature (deg C) Value: 42 vs. 22
  misc_feature: MA Experiment 20000328 PARAMETER Experiment Name: At_42deg_Heat_Sub_P Parameter: Timepoint (hr) Value: 6
  misc_feature: MA Experiment 20000328 PARAMETER Experiment Name: At_42deg_Heat_Sub_P Parameter: Tissue Value: Aerial
  misc_feature: MA Experiment ID: 20000355 Result: Up-regulated in Transcription
  misc_feature: MA Experiment 20000355 PARAMETER Experiment Name: At_Siliques_Sub_P Parameter: Age (day) Value: 21
  misc_feature: MA Experiment 20000355 PARAMETER Experiment Name: At_Siliques_Sub_P Parameter: Organism Value: A. thaliana
  misc_feature: MA Experiment 20000355 PARAMETER Experiment Name: At_Siliques_Sub_P Parameter: Plant Line Value: WS
  misc_feature: MA Experiment 20000355 PARAMETER Experiment Name: At_Siliques_Sub_P Parameter: Tissue Value: Less Than 5mm Siliques vs. Whole Plant
  misc_feature: MA Experiment ID: 20000440 Result: Up-regulated in Transcription
  misc_feature: MA Experiment 20000440 PARAMETER Experiment Name: At_Closed-Flower__Sub_P Parameter: Tissue Value: Closed Flower vs. Whole Plant
atgagtagaatcgggaaacatccggctatcgctctgttggattccggcattacgtttaaagaagtccggcaaatccatgccaaactctatgtcgacgggacactcaaggatgaccatctcgtgggtcactttgtaaaggcagtggctttgagtgaccacaagtacttagattatgcgaatcagattcttgataggtctgaaaagcctacattgtttgctctcaattctatgattagagcacattgcaagagccctgttccagaaaaaagctttgatttttataggaggatactctcttcgggaaatgatcttaaaccggataattacactgtcaacttcttggttcaggcgtgtacggggttaaggatgcgtgagacagggcttcaagttcatggtatgactatcagacgtggttttgacaatgacccgcatgtccagactgggttgatttctttgtatgcggagcttggctgtctggattcttgtcataaggtttttaattctattccgtgcccggattttgtgtgtcggacagcgatggtcactgcctgtgcgagatgtggggatgtcgtttttgcgcggaagttgtttgaggggatgccggaaagagacccgattgcctggaacgcgatgatctctggctatgctcaggttggtgagtcaagagaagctctaaacgtgtttcacttgatgcagttggaaggtgtgaaagtcaatggggttgctatgatttctgttttatcggcttgcactcaattgggtgctttagaccaagggagatgggctcattcttacatagagagaaacaaaatcaaaatcactgtgaggcttgctactacgttggtcgacttgtatgcaaaatgtggtgacatggaaaaggctatggaagttttctggggtatggaagagaagaatgtgtatacatggagtagcgccctgaatgggttagccatgaatgggttcggggagaaatgtctcgagcttttctctcttatgaaacaagatggtgttactccaaacgctgtcacattcgtctctgttctcagaggttgtagtgtggttggttttgtagatgaagggcaaagacattttgattcgatgaggaatgagttcgggatagaacctcagctcgagcactatggctgcttggttgatttgtatgctcgtgcaggccgcttagaagacgcagtaagtatcatccagcaaatgcccatgaagcctcatgctgctgtttggagttctctgctccacgcatccagaatgtacaagaaccttgagcttggcgtgcttgcatctaaaaaaatgctcgagctagagaccgcaaatcacggagcttatgtcctcttatcaaacatatatgcagattcaaacgattgggacaatgttagtcacgttagacagtcaatgaaatctaaaggagtcagaaagcaaccagggtgcagtgtaatggaggtcaatggagaagtccatgaattctttgtaggagacaaatctcacccaaagtatacacaaatcgacgcggtttggaaggatatctcgagaaggctgagactcgctggttataaggcggacacaaccccggttatgttcgatatagatgaagaagagaaagaggatgcattgtgtttgcatagcgaaaaggcagcgattgcatttggtataatgagtttgaaagaagatgttccgattcggatcgtgaagaaccttcgggtttgtggagattgtcatcaggtttctatgatgatctccaagatttttaacagagagatcattgtcagagacagaaacaggttccaccatttcaaagatggtcactgttcttgtaatggcttttggtga

SEQ ID NO: 74262 - protein, 612 aa, Arabidopsis thaliana
  peptide (1)..(612): Ceres Seq. ID no. 5001412
  misc_feature (378)..(412): Pfam Name: PPR repeat Pfam Description: PPR repeat
  misc_feature (20)..(612): Homolog of NCBI NO: 34910594 NR Description: putative selenium-binding protein [Oryza sativa
  misc_feature (20)..(612): Homolog of NCBI NO: 15239979 NR Description: selenium-binding protein-like; protein id:
  misc_feature (6)..(612): Homolog of NCBI NO: 15240085 NR Description: selenium-binding protein-like; protein id:
  misc_feature (12)..(612): Homolog of NCBI NO: 34915288 NR Description: similar to selenium-binding protein [Oryza sativa
  misc_feature (56)..(612): Homolog of NCBI NO: 15227619 NR Description: hypothetical protein; protein id: At2g29760.1
  misc_feature (12)..(612): Homolog of NCBI NO: 15235537 NR Description: putative protein; protein id: At4g37380.1
  misc_feature (127)..(612): Homolog of NCBI NO: 34910298 NR Description: P0013F10.8 [Oryza sativa (japonica
  misc_feature (53)..(612): Homolog of NCBI NO: 15239745 NR Description: selenium-binding protein-like; protein id:
  misc_feature (56)..(611): Homolog of NCBI NO: 15228829 NR Description: hypothetical protein; protein id: At3g22690.1
  misc_feature (136)..(612): Homolog of NCBI NO: 34899166 NR Description: similar to selenium-binding protein [Oryza sativa
MSRIGKHPAIALLDSGITFKEVRQIHAKLYVDGTLKDDHLVGHFVKAVALSDHKYLDYANQILDRSEKPTLFALNSMIRAHCKSPVPEKSFDFYRRILSSGNDLKPDNYTVNFLVQACTGLRMRETGLQVHGMTIRRGFDNDPHVQTGLISLYAELGCLDSCHKVFNSIPCPDFVCRTAMVTACARCGDVVFARKLFEGMPERDPIAWNAMISGYAQVGESREALNVFHLMQLEGVKVNGVAMISVLSACTQLGALDQGRWAHSYIERNKIKITVRLATTLVDLYAKCGDMEKAMEVFWGMEEKNVYTWSSALNGLAMNGFGEKCLELFSLMKQDGVTPNAVTFVSVLRGCSVVGFVDEGQRHFDSMRNEFGIEPQLEHYGCLVDLYARAGRLEDAVSIIQQMPMKPHAAVWSSLLHASRMYKNLELGVLASKKMLELETANHGAYVLLSNIYADSNDWDNVSHVRQSMKSKGVRKQPGCSVMEVNGEVHEFFVGDKSHPKYTQIDAVWKDISRRLRLAGYKADTTPVMFDIDEEEKEDALCLHSEKAAIAFGIMSLKEDVPIRIVKNLRVCGDCHQVSMMISKIFNREIIVRDRNRFHHFKDGHCSCNGFW

SEQ ID NO: 74263 - protein, 536 aa, Arabidopsis thaliana
  peptide (1)..(536): Ceres Seq. ID no. 5001413
  misc_feature (302)..(336): Pfam Name: PPR repeat Pfam Description: PPR repeat
  misc_feature (1)..(536): Homolog of NCBI NO: 34910594 NR Description: putative selenium-binding protein [Oryza sativa
  misc_feature (1)..(536): Homolog of NCBI NO: 15239979 NR Description: selenium-binding protein-like; protein id:
  misc_feature (1)..(536): Homolog of NCBI NO: 15240085 NR Description: selenium-binding protein-like; protein id:
  misc_feature (1)..(536): Homolog of NCBI NO: 34915288 NR Description: similar to selenium-binding protein [Oryza sativa
  misc_feature (1)..(536): Homolog of NCBI NO: 15227619 NR Description: hypothetical protein; protein id: At2g29760.1
  misc_feature (1)..(536): Homolog of NCBI NO: 15235537 NR Description: putative protein; protein id: At4g37380.1
  misc_feature (51)..(536): Homolog of NCBI NO: 34910298 NR Description: P0013F10.8 [Oryza sativa (japonica
  misc_feature (1)..(536): Homolog of NCBI NO: 15239745 NR Description: selenium-binding protein-like; protein id:
  misc_feature (1)..(535): Homolog of NCBI NO: 15228829 NR Description: hypothetical protein; protein id: At3g22690.1
  misc_feature (60)..(536): Homolog of NCBI NO: 34899166 NR Description: similar to selenium-binding protein [Oryza sativa
MIRAHCKSPVPEKSFDFYRRILSSGNDLKPDNYTVNFLVQACTGLRMRETGLQVHGMTIRRGFDNDPHVQTGLISLYAELGCLDSCHKVFNSIPCPDFVCRTAMVTACARCGDVVFARKLFEGMPERDPIAWNAMISGYAQVGESREALNVFHLMQLEGVKVNGVAMISVLSACTQLGALDQGRWAHSYIERNKIKITVRLATTLVDLYAKCGDMEKAMEVFWGMEEKNVYTWSSALNGLAMNGFGEKCLELFSLMKQDGVTPNAVTFVSVLRGCSVVGFVDEGQRHFDSMRNEFGIEPQLEHYGCLVDLYARAGRLEDAVSIIQQMPMKPHAAVWSSLLHASRMYKNLELGVLASKKMLELETANHGAYVLLSNIYADSNDWDNVSHVRQSMKSKGVRKQPGCSVMEVNGEVHEFFVGDKSHPKYTQIDAVWKDISRRLRLAGYKADTTPVMFDIDEEEKEDALCLHSEKAAIAFGIMSLKEDVPIRIVKNLRVCGDCHQVSMMISKIFNREIIVRDRNRFHHFKDGHCSCNGFW

SEQ ID NO: 74264 - protein, 490 aa, Arabidopsis thaliana
  peptide (1)..(490): Ceres Seq. ID no. 5001414
  misc_feature (256)..(290): Pfam Name: PPR repeat Pfam Description: PPR repeat
  misc_feature (1)..(490): Homolog of NCBI NO: 34910594 NR Description: putative selenium-binding protein [Oryza sativa
  misc_feature (1)..(490): Homolog of NCBI NO: 15239979 NR Description: selenium-binding protein-like; protein id:
  misc_feature (1)..(490): Homolog of NCBI NO: 15240085 NR Description: selenium-binding protein-like; protein id:
  misc_feature (1)..(490): Homolog of NCBI NO: 34915288 NR Description: similar to selenium-binding protein [Oryza sativa
  misc_feature (1)..(490): Homolog of NCBI NO: 15227619 NR Description: hypothetical protein; protein id: At2g29760.1
  misc_feature (1)..(490): Homolog of NCBI NO: 15235537 NR Description: putative protein; protein id: At4g37380.1
  misc_feature (5)..(490): Homolog of NCBI NO: 34910298 NR Description: P0013F10.8 [Oryza sativa (japonica
  misc_feature (1)..(490): Homolog of NCBI NO: 15239745 NR Description: selenium-binding protein-like; protein id:
  misc_feature (1)..(489): Homolog of NCBI NO: 15228829 NR Description: hypothetical protein; protein id: At3g22690.1
  misc_feature (14)..(490): Homolog of NCBI NO: 34899166 NR Description: similar to selenium-binding protein [Oryza sativa
MRETGLQVHGMTIRRGFDNDPHVQTGLISLYAELGCLDSCHKVFNSIPCPDFVCRTAMVTACARCGDVVFARKLFEGMPERDPIAWNAMISGYAQVGESREALNVFHLMQLEGVKVNGVAMISVLSACTQLGALDQGRWAHSYIERNKIKITVRLATTLVDLYAKCGDMEKAMEVFWGMEEKNVYTWSSALNGLAMNGFGEKCLELFSLMKQDGVTPNAVTFVSVLRGCSVVGFVDEGQRHFDSMRNEFGIEPQLEHYGCLVDLYARAGRLEDAVSIIQQMPMKPHAAVWSSLLHASRMYKNLELGVLASKKMLELETANHGAYVLLSNIYADSNDWDNVSHVRQSMKSKGVRKQPGCSVMEVNGEVHEFFVGDKSHPKYTQIDAVWKDISRRLRLAGYKADTTPVMFDIDEEEKEDALCLHSEKAAIAFGIMSLKEDVPIRIVKNLRVCGDCHQVSMMISKIFNREIIVRDRNRFHHFKDGHCSCNGFW

SEQ ID NO: 74265 - DNA, 1902 bp, Arabidopsis thaliana
  misc_feature (1)..(1902): Ceres Seq. ID no. 5001700
  misc_feature: MA Experiment ID: 20000171 Result: Down-regulated in Transcription
  misc_feature: MA Experiment 20000171 PARAMETER Experiment Name: At_42deg_Heat_P Parameter: Age (day) Value: 14
  misc_feature: MA Experiment 20000171 PARAMETER Experiment Name: At_42deg_Heat_P Parameter: Organism Value: A. thaliana
  misc_feature: MA Experiment 20000171 PARAMETER Experiment Name: At_42deg_Heat_P Parameter: Plant Line Value: WS
  misc_feature: MA Experiment 20000171 PARAMETER Experiment Name: At_42deg_Heat_P Parameter: Temperature (deg C) Value: 42 vs. 22
  misc_feature: MA Experiment 20000171 PARAMETER Experiment Name: At_42deg_Heat_P Parameter: Timepoint (hr) Value: 1
  misc_feature: MA Experiment 20000171 PARAMETER Experiment Name: At_42deg_Heat_P Parameter: Tissue Value: Aerial
  misc_feature: MA Experiment ID: 20000173 Result: Down-regulated in Transcription
  misc_feature: MA Experiment 20000173 PARAMETER Experiment Name: At_42deg_Heat_P Parameter: Age (day) Value: 14
  misc_feature: MA Experiment 20000173 PARAMETER Experiment Name: At_42deg_Heat_P Parameter: Organism Value: A. thaliana
  misc_feature: MA Experiment 20000173 PARAMETER Experiment Name: At_42deg_Heat_P Parameter: Plant Line Value: WS
  misc_feature: MA Experiment 20000173 PARAMETER Experiment Name: At_42deg_Heat_P Parameter: Temperature (deg C) Value: 42 vs. 22
  misc_feature: MA Experiment 20000173 PARAMETER Experiment Name: At_42deg_Heat_P Parameter: Timepoint (hr) Value: 6
  misc_feature: MA Experiment 20000173 PARAMETER Experiment Name: At_42deg_Heat_P Parameter: Tissue Value: Aerial
  misc_feature: MA Experiment ID: 20000184 Result: Down-regulated in Transcription
  misc_feature: MA Experiment 20000184 PARAMETER Experiment Name: At_Shoots__P Parameter: Age (day) Value: 7
  misc_feature: MA Experiment 20000184 PARAMETER Experiment Name: At_Shoots__P Parameter: Tissue Value: Shoots vs. Whole Plant
  misc_feature: MA Experiment ID: 20000286 Result: Up-regulated in Transcription
  misc_feature: MA Experiment 20000286 PARAMETER Experiment Name: At_Open_Flower_P Parameter: Age (day) Value: 21
  misc_feature: MA Experiment 20000286 PARAMETER Experiment Name: At_Open_Flower_P Parameter: Plant Line Value: WS
  misc_feature: MA Experiment 20000286 PARAMETER Experiment Name: At_Open_Flower_P Parameter: Tissue Value: Half Open vs. Whole Plant
  misc_feature: MA Experiment ID: 20000439 Result: Up-regulated in Transcription
  misc_feature: MA Experiment 20000439 PARAMETER Experiment Name: At_Roots__P Parameter: Age (day) Value: 14 vs. 21
  misc_feature: MA Experiment 20000439 PARAMETER Experiment Name: At_Roots__P Parameter: Organism Value: A. thaliana
  misc_feature: MA Experiment 20000439 PARAMETER Experiment Name: At_Roots__P Parameter: Tissue Value: Roots vs. Whole Plant
atgtcaggtccacttgatcgatttgcaagaccatgttttgagggattcttgagcagtgatgagaaaaaggaaagaaagtcagattttgagaattcagaggatgagaggagaacaagaatcggttccttgaaaaagaaagccattaatgcctctactaagttcaagcattctcttaagaaaaagagcggaagaagaaaaagtgatggtcgagtgagttctgtatccattgaggatgtgagggatgtcgaggagctacaagctgttgatgcgtttcgacagtcgttgttaatggacgagttgcttcctgatagacacgatgattatcatatgatgttgaggttcttgaaagcgaggaaatttgatgttgagaaagctaaacaaatgtgggctgatatgattcaatggaggaaagagtttggtactgacactattattcaggattttgatttcgaagagattaatgaagttttgaaacattacccacaatgttatcacggtgttgacaaagaaggtagacctatttacattgaaaggctagggaaagttgatcctaacagactcatgcaagttacaagcatggatcgatatgtaagatatcatgtaaaggagtttgagaggagctttatgatcaagtttccttcctgcactatttctgcaaagaggcatattgattcaagtacaactattcttgatgttcaaggagtgggattgaaaaactttaacaagtctgctcgagatcttatcacacgattacaaaagattgatggagacaattatcctgagactctccaccaaatgtttattatcaatgcagggcctggatttaggctactctggaacactgtcaagagctttcttgaccctaagacatctgctaaaattcatgtactcggatacaagtatctaagcaaattgcttgaagtcattgatgtcaacgagttgcctgagttcttgggaggtgcatgtacttgcgcagatcaaggcggttgcatgctttctgacaagggaccttggaaaaacccggaaattgtgaagatggtgcttcatggaggagcacatcgagcgaggcaggtggtgaaagtgttgaacagcgaagggaaagtcattgcttatgcaaaaccttcatatacatggataaagggaagtgacacatccactgcagagtcaggatctgacgctgaagatatcggttctccgaaggctataaagagtttctctcatctccgcttgacacctgttcgtgaggaggcaaagatagctggtgaaacaagcttggctggtagttttccgggttatgacgagtatgtacctatggtggacaaagccgttgacgccacctggaaggtgaaacccgccatccagagagttgcctcaagaggagctttaatgtctcccaccgttccaaaagatcatgaaggcatcaaggctcgagtcctagtaatgttcatggcattcttgatggcggttttcacattcttccgcactgtaacaaagaaacttccagcgactactacttcttccccagcagaaacccaaggaaacgcaatagaacttggttctaacggtgaaggagttaaagaggagtgtcgtcctccttctcctgtaccagacctcacggaaactgatctactaaactgtgtgacgaagaaactgacagagctggaaggtaaaatcggaacgctccaatcaaagccaaatgagatgccatacgagaaagaagaactgttaaacgcagccgtctgcagagtagacgcacttgaagcagagctcatagctactaaaaaggccctttacgaagctttgatgagacaggaagagttacttgcttacattgatcgtcaagaagaagctcagttccagaagatgaagaagaagaagaagaaacatctcttttgcttctga

SEQ ID NO: 74266 - protein, 633 aa, Arabidopsis thaliana
  peptide (1)..(633): Ceres Seq. ID no. 5001701
  misc_feature (161)..(347): Pfam Name: CRAL/TRIO domain Pfam Description: CRAL/TRIO domain
  misc_feature (97)..(633): Homolog of NCBI NO: 15226574 NR Description: putative phosphatidylinositol/phosphatidylcholine protein; protein id: At2g21520.1 [Arabidopsis thaliana]
  misc_feature (1)..(631): Homolog of NCBI NO: 18420392 NR Description: SEC14 - like protein; protein id: At4g39170.1,
  misc_feature (1)..(633): Homolog of NCBI NO: 7487350 NR Description: hypothetical protein T22F8.70 - Arabidopsis
  misc_feature (1)..(599): Homolog of NCBI NO: 14335006 NR Description: AT4g39170/T22F8_70 [Arabidopsis thaliana]
  misc_feature (1)..(633): Homolog of NCBI NO: 14486705 NR Description: phosphatidylinositol transfer-like protein III
  misc_feature (1)..(623): Homolog of NCBI NO: 18394768 NR Description: sec14 cytosolic factor, putative; protein id:
  misc_feature (1)..(623): Homolog of NCBI NO: 15810425 NR Description: putative sec14 cytosolic factor [Arabidopsis
  misc_feature (1)..(511): Homolog of NCBI NO: 30699093 NR Description: sec14 cytosolic factor -related [Arabidopsis >gi|26451650|dbj|BAC42922.1| putative sec14 cytosolic factor
  misc_feature (24)..(349): Homolog of NCBI NO: 15236152 NR Description: putative protein; protein id: At4g34580.1
  misc_feature (432)..(629): Homolog of NCBI NO: 15236152 NR Description: putative protein; protein id: At4g34580.1
MSGPLDRFARPCFEGFLSSDEKKERKSDFENSEDERRTRIGSLKKKAINASTKFKHSLKKKSGRRKSDGRVSSVSIEDVRDVEELQAVDAFRQSLLMDELLPDRHDDYHMMLRFLKARKFDVEKAKQMWADMIQWRKEFGTDTIIQDFDFEEINEVLKHYPQCYHGVDKEGRPIYIERLGKVDPNRLMQVTSMDRYVRYHVKEFERSFMIKFPSCTISAKRHIDSSTTILDVQGVGLKNFNKSARDLITRLQKIDGDNYPETLHQMFIINAGPGFRLLWNTVKSFLDPKTSAKIHVLGYKYLSKLLEVIDVNELPEFLGGACTCADQGGCMLSDKGPWKNPEIVKMVLHGGAHRARQVVKVLNSEGKVIAYAKPSYTWIKGSDTSTAESGSDAEDIGSPKAIKSFSHLRLTPVREEAKIAGETSLAGSFPGYDEYVPMVDKAVDATWKVKPAIQRVASRGALMSPTVPKDHEGIKARVLVMFMAFLMAVFTFFRTVTKKLPATTTSSPAETQGNAIELGSNGEGVKEECRPPSPVPDLTETDLLNCVTKKLTELEGKIGTLQSKPNEMPYEKEELLNAAVCRVDALEAELIATKKALYEALMRQEELLAYIDRQEEAQFQKMKKKKKKHLFCF

SEQ ID NO: 74267 - protein, 537 aa, Arabidopsis thaliana
  peptide (1)..(537): Ceres Seq. ID no. 5001702
  misc_feature (65)..(251): Pfam Name: CRAL/TRIO domain Pfam Description: CRAL/TRIO domain
  misc_feature (1)..(537): Homolog of NCBI NO: 15226574 NR Description: putative phosphatidylinositol/phosphatidylcholine protein; protein id: At2g21520.1 [Arabidopsis thaliana]
  misc_feature (1)..(535): Homolog of NCBI NO: 18420392 NR Description: SEC14 - like protein; protein id: At4g39170.1,
  misc_feature (1)..(537): Homolog of NCBI NO: 7487350 NR Description: hypothetical protein T22F8.70 - Arabidopsis
  misc_feature (1)..(503): Homolog of NCBI NO: 14335006 NR Description: AT4g39170/T22F8_70 [Arabidopsis thaliana]
  misc_feature (1)..(537): Homolog of NCBI NO: 14486705 NR Description: phosphatidylinositol transfer-like protein III
  misc_feature (1)..(527): Homolog of NCBI NO: 18394768 NR Description: sec14 cytosolic factor, putative; protein id:
  misc_feature (1)..(527): Homolog of NCBI NO: 15810425 NR Description: putative sec14 cytosolic factor [Arabidopsis
  misc_feature (1)..(415): Homolog of NCBI NO: 30699093 NR Description: sec14 cytosolic factor -related [Arabidopsis >gi|26451650|dbj|BAC42922.1| putative sec14 cytosolic factor
  misc_feature (1)..(253): Homolog of NCBI NO: 15236152 NR Description: putative protein; protein id: At4g34580.1
  misc_feature (336)..(533): Homolog of NCBI NO: 15236152 NR Description: putative protein; protein id: At4g34580.1
MDELLPDRHDDYHMMLRFLKARKFDVEKAKQMWADMIQWRKEFGTDTIIQDFDFEEINEVLKHYPQCYHGVDKEGRPIYIERLGKVDPNRLMQVTSMDRYVRYHVKEFERSFMIKFPSCTISAKRHIDSSTTILDVQGVGLKNFNKSARDLITRLQKIDGDNYPETLHQMFIINAGPGFRLLWNTVKSFLDPKTSAKIHVLGYKYLSKLLEVIDVNELPEFLGGACTCADQGGCMLSDKGPWKNPEIVKMVLHGGAHRARQVVKVLNSEGKVIAYAKPSYTWIKGSDTSTAESGSDAEDIGSPKAIKSFSHLRLTPVREEAKIAGETSLAGSFPGYDEYVPMVDKAVDATWKVKPAIQRVASRGALMSPTVPKDHEGIKARVLVMFMAFLMAVFTFFRTVTKKLPATTTSSPAETQGNAIELGSNGEGVKEECRPPSPVPDLTETDLLNCVTKKLTELEGKIGTLQSKPNEMPYEKEELLNAAVCRVDALEAELIATKKALYEALMRQEELLAYIDRQEEAQFQKMKKKKKKHLFCF

SEQ ID NO: 74268 - protein, 524 aa, Arabidopsis thaliana
  peptide (1)..(524): Ceres Seq. ID no. 5001703
  misc_feature (52)..(238): Pfam Name: CRAL/TRIO domain Pfam Description: CRAL/TRIO domain
  misc_feature (1)..(524): Homolog of NCBI NO: 15226574 NR Description: putative phosphatidylinositol/phosphatidylcholine protein; protein id: At2g21520.1 [Arabidopsis thaliana]
  misc_feature (1)..(522): Homolog of NCBI NO: 18420392 NR Description: SEC14 - like protein; protein id: At4g39170.1,
  misc_feature (1)..(524): Homolog of NCBI NO: 7487350 NR Description: hypothetical protein T22F8.70 - Arabidopsis
  misc_feature (1)..(490): Homolog of NCBI NO: 14335006 NR Description: AT4g39170/T22F8_70 [Arabidopsis thaliana]
  misc_feature (1)..(524): Homolog of NCBI NO: 14486705 NR Description: phosphatidylinositol transfer-like protein III
  misc_feature (1)..(514): Homolog of NCBI NO: 18394768 NR Description: sec14 cytosolic factor, putative; protein id:
  misc_feature (1)..(514): Homolog of NCBI NO: 15810425 NR Description: putative sec14 cytosolic factor [Arabidopsis
  misc_feature (1)..(402): Homolog of NCBI NO: 30699093 NR Description: sec14 cytosolic factor -related [Arabidopsis >gi|26451650|dbj|BAC42922.1| putative sec14 cytosolic factor
  misc_feature (1)..(240): Homolog of NCBI NO: 15236152 NR Description: putative protein; protein id: At4g34580.1
  misc_feature (323)..(520): Homolog of NCBI NO: 15236152 NR Description: putative protein; protein id: At4g34580.1
MMLRFLKARKFDVEKAKQMWADMIQWRKEFGTDTIIQDFDFEEINEVLKHYPQCYHGVDKEGRPIYIERLGKVDPNRLMQVTSMDRYVRYHVKEFERSFMIKFPSCTISAKRHIDSSTTILDVQGVGLKNFNKSARDLITRLQKIDGDNYPETLHQMFIINAGPGFRLLWNTVKSFLDPKTSAKIHVLGYKYLSKLLEVIDVNELPEFLGGACTCADQGGCMLSDKGPWKNPEIVKMVLHGGAHRARQVVKVLNSEGKVIAYAKPSYTWIKGSDTSTAESGSDAEDIGSPKAIKSFSHLRLTPVREEAKIAGETSLAGSFPGYDEYVPMVDKAVDATWKVKPAIQRVASRGALMSPTVPKDHEGIKARVLVMFMAFLMAVFTFFRTVTKKLPATTTSSPAETQGNAIELGSNGEGVKEECRPPSPVPDLTETDLLNCVTKKLTELEGKIGTLQSKPNEMPYEKEELLNAAVCRVDALEAELIATKKALYEALMRQEELLAYIDRQEEAQFQKMKKKKKKHLFCF

SEQ ID NO: 74269 - DNA, 1107 bp, Arabidopsis thaliana
  misc_feature (1)..(1107): Ceres Seq. ID no. 5001829
  misc_feature: MA Experiment ID: 20000184 Result: Down-regulated in Transcription
  misc_feature: MA Experiment 20000184 PARAMETER Experiment Name: At_Shoots__P Parameter: Age (day) Value: 7
  misc_feature: MA Experiment 20000184 PARAMETER Experiment Name: At_Shoots__P Parameter: Tissue Value: Shoots vs. Whole Plant
  misc_feature: MA Experiment ID: 20000264 Result: Up-regulated in Transcription
  misc_feature: MA Experiment 20000264 PARAMETER Experiment Name: At_Open_Flower_P Parameter: Age (day) Value: 21
  misc_feature: MA Experiment 20000264 PARAMETER Experiment Name: At_Open_Flower_P Parameter: Plant Line Value: WS
  misc_feature: MA Experiment 20000264 PARAMETER Experiment Name: At_Open_Flower_P Parameter: Tissue Value: Open Flower vs. Whole Plant
  misc_feature: MA Experiment ID: 20000794 Result: Up-regulated in Transcription
  misc_feature: MA Experiment 20000794 PARAMETER Experiment Name: At_Petals_P Parameter: Age (day) Value: 23-25 days
  misc_feature: MA Experiment 20000794 PARAMETER Experiment Name: At_Petals_P Parameter: Plant Line Value: WS
  misc_feature: MA Experiment 20000794 PARAMETER Experiment Name: At_Petals_P Parameter: Tissue Value: Petals vs. Whole plant
atgaaaaatctctcctttttctcccgatatgggtacgcgactgttgcgccggcggcagctgatcctccgtcgcagaaggatttccccagtaaatctccgctgttaatgcgtagttgttgtgaatgtttaggtctcactatagtattcgaacctaagctcaatttgattctctctgtttctagtttcatcgaatgcgggactaaaataaacttggataagatgttttggtcaaagccatgttcattggctctgcctaaagactctcctctcagaattgatgaaccagactatgtagggattcgtcgtttcatactaaagatgatgatgttctatagcaaacagagcatgtctatccgtggggctaacgtgatctacaagcggatcattgcacaagttgataaacctgcaatatatgatgtattcaacttggagaaaacattcaaaataacgtattcgctgcttgtccttcatatgtggcttgttttacgccgcttgaaggaagatggacaggaaggtgttgaccttggtcaatacgtctatgagatctacaatcatgatgttgaactcagggtatctaaagccggggttaacttgctgctagccaagtggatgaaggagttggagagaatattttatggaaatgttgttgcctatgatgctgcgctacttccggaagctaaaccaaatgacctacaaatcaaattatggaggaacgtattttctgatgatggaacaacaacacctgataacacagatttaaaaacagcacaggcaatggcaagatatgtccggagagaacttggttctctttctttaacaggtacctatgacgctatagttggaatgcctcattatgttactcgcatttgcatttcgaatagacatgccttttcttatatggttcttttttgtcatacacagataaagagtccatattctccggcaatttctccttcacccctttggagaacaagcccctgtgatttgaatgaaattagaagaagctgtggtgctttgcgaatcaatctttcatttgtttctctgtttcatttgatttacttatatcaaaccaaagaaacctacacaagggaatgtgctagctgttag

SEQ ID NO: 74270 - protein, 368 aa, Arabidopsis thaliana; identical to SEQ ID NO: 74166
  peptide (1)..(368): Ceres Seq. ID no. 5001830
  misc_feature (139)..(294): Pfam Name: Ubiquinol-cytochrome C chaperone Pfam Description: Ubiquinol-cytochrome C chaperone
  misc_feature (1)..(368): Homolog of NCBI NO: 8843859 NR Description: contains similarity to unknown
  misc_feature (69)..(273): Homolog of NCBI NO: 30696021 NR Description: expressed protein [Arabidopsis thaliana]
  misc_feature (1)..(34): Homolog of NCBI NO: 30696021 NR Description: expressed protein [Arabidopsis thaliana]
  misc_feature (68)..(273): Homolog of NCBI NO: 33146996 NR Description: unknown protein [Oryza sativa (japonica
  misc_feature (119)..(270): Homolog of NCBI NO: 22964668 NR Description: hypothetical protein [Rhodopseudomonas palustris]
  misc_feature (124)..(274): Homolog of NCBI NO: 27380134 NR Description: bll5023 [Bradyrhizobium japonicum]
  misc_feature (122)..(245): Homolog of NCBI NO: 13476949 NR Description: unknown protein [Mesorhizobium loti]
  misc_feature (66)..(274): Homolog of NCBI NO: 31542261 NR Description: chromosome 20 open reading frame 44; likely of mouse basic FGF repressed, Zic binding protein [Homo sapiens]
  misc_feature (111)..(274): Homolog of NCBI NO: 28558076 NR Description: Basic FGF-repressed Zic binding protein homolog binding protein) >gi|4559310|gb|AAD22979.1|AF129131_1 putative
  misc_feature (66)..(274): Homolog of NCBI NO: 28558072 NR Description: Basic FGF-repressed Zic binding protein (bFZb)

SEQ ID NO: 74271 - protein, 333 aa, Arabidopsis thaliana; identical to SEQ ID NO: 74167
  peptide (1)..(333): Ceres Seq. ID no. 5001831
  misc_feature (104)..(259): Pfam Name: Ubiquinol-cytochrome C chaperone Pfam Description: Ubiquinol-cytochrome C chaperone
  misc_feature (1)..(333): Homolog of NCBI NO: 8843859 NR Description: contains similarity to unknown
  misc_feature (34)..(238): Homolog of NCBI NO: 30696021 NR Description: expressed protein [Arabidopsis thaliana]
  misc_feature (33)..(238): Homolog of NCBI NO: 33146996 NR Description: unknown protein [Oryza sativa (japonica
  misc_feature (84)..(235): Homolog of NCBI NO: 22964668 NR Description: hypothetical protein [Rhodopseudomonas palustris]
  misc_feature (89)..(239): Homolog of NCBI NO: 27380134 NR Description: bll5023 [Bradyrhizobium japonicum]
  misc_feature (87)..(210): Homolog of NCBI NO: 13476949 NR Description: unknown protein [Mesorhizobium loti]
  misc_feature (31)..(239): Homolog of NCBI NO: 31542261 NR Description: chromosome 20 open reading frame 44; likely of mouse basic FGF repressed, Zic binding protein [Homo sapiens]
  misc_feature (76)..(239): Homolog of NCBI NO: 28558076 NR Description: Basic FGF-repressed Zic binding protein homolog binding protein) >gi|4559310|gb|AAD22979.1|AF129131_1 putative
  misc_feature (31)..(239): Homolog of NCBI NO: 28558072 NR Description: Basic FGF-repressed Zic binding protein (bFZb)
  misc_feature (76)..(239): Homolog of NCBI NO: 9256564 NR Description: basic FGF repressed, Zic binding protein [Mus >gi|7595966|gb|AAF64519.1|AF253516_1 unknown protein [Mus >gi|12847091|dbj|BAB27433.1| unnamed protein product [Mus

SEQ ID NO: 74272 - protein, 295 aa, Arabidopsis thaliana
  peptide (1)..(295): Ceres Seq. ID no. 5001832
  misc_feature (66)..(221): Pfam Name: Ubiquinol-cytochrome C chaperone Pfam Description: Ubiquinol-cytochrome C chaperone
  misc_feature (1)..(295): Homolog of NCBI NO: 8843859 NR Description: contains similarity to unknown
  misc_feature (1)..(200): Homolog of NCBI NO: 30696021 NR Description: expressed protein [Arabidopsis thaliana]
  misc_feature (1)..(200): Homolog of NCBI NO: 33146996 NR Description: unknown protein [Oryza sativa (japonica
  misc_feature (46)..(197): Homolog of NCBI NO: 22964668 NR Description: hypothetical protein [Rhodopseudomonas palustris]
  misc_feature (51)..(201): Homolog of NCBI NO: 27380134 NR Description: bll5023 [Bradyrhizobium japonicum]
  misc_feature (49)..(172): Homolog of NCBI NO: 13476949 NR Description: unknown protein [Mesorhizobium loti]
  misc_feature (1)..(201): Homolog of NCBI NO: 31542261 NR Description: chromosome 20 open reading frame 44; likely of mouse basic FGF repressed, Zic binding protein [Homo sapiens]
  misc_feature (38)..(201): Homolog of NCBI NO: 28558076 NR Description: Basic FGF-repressed Zic binding protein homolog binding protein) >gi|4559310|gb|AAD22979.1|AF129131_1 putative
  misc_feature (1)..(201): Homolog of NCBI NO: 28558072 NR Description: Basic FGF-repressed Zic binding protein (bFZb)
  misc_feature (38)..(201): Homolog of NCBI NO: 9256564 NR Description: basic FGF repressed, Zic binding protein [Mus >gi|7595966|gb|AAF64519.1|AF253516_1 unknown protein [Mus >gi|12847091|dbj|BAB27433.1| unnamed protein product [Mus
MFWSKPCSLALPKDSPLRIDEPDYVGIRRFILKMMMFYSKQSMSIRGANVIYKRIIAQVDKPAIYDVFNLEKTFKITYSLLVLHMWLVLRRLKEDGQEGVDLGQYVYEIYNHDVELRVSKAGVNLLLAKWMKELERIFYGNVVAYDAALLPEAKPNDLQIKLWRNVFSDDGTTTPDNTDLKTAQAMARYVRRELGSLSLTGTYDAIVGMPHYVTRICISNRHAFSYMVLFCHTQIKSPYSPAISPSPLWRTSPCDLNEIRRSCGALRINLSFVSLFHLIYLYQTKETYTRECASC

SEQ ID NO: 74273 - DNA, 1020 bp, Arabidopsis thaliana
  misc_feature (1)..(1020): Ceres Seq. ID no. 5001841
  misc_feature: MA Experiment ID: 20000171 Result: Down-regulated in Transcription
  misc_feature: MA Experiment 20000171 PARAMETER Experiment Name: At_42deg_Heat_P Parameter: Age (day) Value: 14
  misc_feature: MA Experiment 20000171 PARAMETER Experiment Name: At_42deg_Heat_P Parameter: Organism Value: A. thaliana
  misc_feature: MA Experiment 20000171 PARAMETER Experiment Name: At_42deg_Heat_P Parameter: Plant Line Value: WS
  misc_feature: MA Experiment 20000171 PARAMETER Experiment Name: At_42deg_Heat_P Parameter: Temperature (deg C) Value: 42 vs. 22
  misc_feature: MA Experiment 20000171 PARAMETER Experiment Name: At_42deg_Heat_P Parameter: Timepoint (hr) Value: 1
  misc_feature: MA Experiment 20000171 PARAMETER Experiment Name: At_42deg_Heat_P Parameter: Tissue Value: Aerial
  misc_feature: MA Experiment ID: 20000173 Result: Down-regulated in Transcription
  misc_feature: MA Experiment 20000173 PARAMETER Experiment Name: At_42deg_Heat_P Parameter: Age (day) Value: 14
  misc_feature: MA Experiment 20000173 PARAMETER Experiment Name: At_42deg_Heat_P Parameter: Organism Value: A. thaliana
  misc_feature: MA Experiment 20000173 PARAMETER Experiment Name: At_42deg_Heat_P Parameter: Plant Line Value: WS
  misc_feature: MA Experiment 20000173 PARAMETER Experiment Name: At_42deg_Heat_P Parameter: Temperature (deg C) Value: 42 vs. 22
  misc_feature: MA Experiment 20000173 PARAMETER Experiment Name: At_42deg_Heat_P Parameter: Timepoint (hr) Value: 6
  misc_feature: MA Experiment 20000173 PARAMETER Experiment Name: At_42deg_Heat_P Parameter: Tissue Value: Aerial
  misc_feature: MA Experiment ID: 20000179 Result: Up-regulated in Transcription
  misc_feature: MA Experiment 20000179 PARAMETER Experiment Name: At_Germinating_Seeds_P Parameter: Age (hr) Value: 6 vs. 0
  misc_feature: MA Experiment 20000179 PARAMETER Experiment Name: At_Germinating_Seeds_P Parameter: Tissue Value: Germinating Seeds
  misc_feature: MA Experiment ID: 20000180 Result: Up-regulated in Transcription
  misc_feature: MA Experiment 20000180 PARAMETER Experiment Name: At_Germinating_Seeds_P Parameter: Age (hr) Value: 24 vs. 0
  misc_feature: MA Experiment 20000180 PARAMETER Experiment Name: At_Germinating_Seeds_P Parameter: Tissue Value: Germinating Seeds
  misc_feature: MA Experiment ID: 20000439 Result: Up-regulated in Transcription
  misc_feature: MA Experiment 20000439 PARAMETER Experiment Name: At_Roots__P Parameter: Age (day) Value: 14 vs. 21
  misc_feature: MA Experiment 20000439 PARAMETER Experiment Name: At_Roots__P Parameter: Organism Value: A. thaliana
  misc_feature: MA Experiment 20000439 PARAMETER Experiment Name: At_Roots__P Parameter: Tissue Value: Roots vs. Whole Plant
  misc_feature: MA Experiment ID: 20001247 Result: Up-regulated in Transcription
  misc_feature: MA Experiment 20001247 PARAMETER Experiment Name: At_Far-red-induction_P Parameter: Age (day) Value: 7
  misc_feature: MA Experiment 20001247 PARAMETER Experiment Name: At_Far-red-induction_P Parameter: Light Value: Far-red vs. White
  misc_feature: MA Experiment 20001247 PARAMETER Experiment Name: At_Far-red-induction_P Parameter: Organism Value: A. thaliana
  misc_feature: MA Experiment 20001247 PARAMETER Experiment Name: At_Far-red-induction_P Parameter: Plant Line Value: Columbia
  misc_feature: MA Experiment 20001247 PARAMETER Experiment Name: At_Far-red-induction_P Parameter: Timepoint (hr) Value: 1
  misc_feature: MA Experiment 20001247 PARAMETER Experiment Name: At_Far-red-induction_P Parameter: Tissue Value: Whole Plant
  misc_feature: MA Experiment ID: 20001248 Result: Down-regulated in Transcription
  misc_feature: MA Experiment 20001248 PARAMETER Experiment Name: At_Far-red-induction_P Parameter: Age (day) Value: 7
  misc_feature: MA Experiment 20001248 PARAMETER Experiment Name: At_Far-red-induction_P Parameter: Light Value: Far-red vs. White
  misc_feature: MA Experiment 20001248 PARAMETER Experiment Name: At_Far-red-induction_P Parameter: Organism Value: A. thaliana
  misc_feature: MA Experiment 20001248 PARAMETER Experiment Name: At_Far-red-induction_P Parameter: Plant Line Value: Columbia
  misc_feature: MA Experiment 20001248 PARAMETER Experiment Name: At_Far-red-induction_P Parameter: Timepoint (hr) Value: 4
  misc_feature: MA Experiment 20001248 PARAMETER Experiment Name: At_Far-red-induction_P Parameter: Tissue Value: Whole Plant
  misc_feature: MA Experiment ID: 20001911 Result: Down-regulated in Transcription
  misc_feature: MA Experiment 20001911 PARAMETER Experiment Name: At_Drought_Reproduction_P Parameter: Age (day) Value: 40
  misc_feature: MA Experiment 20001911 PARAMETER Experiment Name: At_Drought_Reproduction_P Parameter: Organism Value: A. thaliana
  misc_feature: MA Experiment 20001911 PARAMETER Experiment Name: At_Drought_Reproduction_P Parameter: Plant Line Value: WS
  misc_feature: MA Experiment 20001911 PARAMETER Experiment Name: At_Drought_Reproduction_P Parameter: Timepoint (day) Value: 10
  misc_feature: MA Experiment 20001911 PARAMETER Experiment Name: At_Drought_Reproduction_P Parameter: Tissue Value: Flowers
  misc_feature: MA Experiment 20001911 PARAMETER Experiment Name: At_Drought_Reproduction_P Parameter: Treatment Value: Drought vs. No Drought
atgatgagaaacaaaccgacaaatcttccgacggcgggtatgactaatggcggtagaggttccggcggcggtggtggtggcggcggcagggagtcaggcggtcgtgatttggaaattagacctggtggtatgttggttcagaaacgtaacccggatttggatcctgtcggacctccaccaccaccgatgatcagagttagaatcaagtacggtgccgtctaccatgagatcaatattagtcctcaagcttcttttggggagctaaagaagatgttgactggaccaacgggtattcatcatcaagatcagaagctaatgtataaagataaagagagggattcgaaggcgttcctcgatgtttcgggagtgaaagataaatctaagatggtgcttatagaagacccgcttagccaagagaaacggtttttggagatgaggaagattgctaaaaccgaaaaggcgtctaaagcgatatcggatattagccttgaagttgataggctcggcggacgagtttcggcttttgagatggtaactaaaaaaggagggaagattgcggagaaagatcttgtaacggttatcgaattgctgatgaatgagttgattaagttggatgcgattgtagctgaaggagatgtcaagttacaaagaaagatgcaggtgaagagagtgcagaattatgtggaaacactcgatgccttgaaggtgaaaaactccatggctaatgggcaacagaaacagtcaagtactgctcagagacttgcaccgattcaagaacataacaatgaagagagacaagaacagaaaccgatacaatcgctcatggacatgccgatacaatacaaagagaagaagcaagagattgaagaggagcctaggaattcaggggaaggaccatttgtgttagattcttctgctaaatgggaaacattcgatcatcatcccgtgacgccattgagctcgactactgcgaaaaataacgcgatcccgcccaggtttaattgggaattctttgattga

SEQ ID NO: 74274 - protein, 339 aa, Arabidopsis thaliana
  peptide (1)..(339): Ceres Seq. ID no. 5001842
  misc_feature (157)..(235): Pfam Name: BAG domain Pfam Description: BAG domain
  misc_feature (14)..(339): Homolog of NCBI NO: 15242267 NR Description: putative protein; protein id: At5g52060.1 thaliana] >gi|10177741|dbj|BAB11054.1| contains similarity to
  misc_feature (27)..(312): Homolog of NCBI NO: 21537107 NR Description: unknown [Arabidopsis thaliana]
  misc_feature (27)..(312): Homolog of NCBI NO: 15240726 NR Description: putative protein; protein id: At5g07220.1, by cDNA: 12022., supported by cDNA: gi_16226482 [Arabidopsis
  misc_feature (28)..(312): Homolog of NCBI NO: 30697630 NR Description: BAG domain containing protein [Arabidopsis
  misc_feature (28)..(312): Homolog of NCBI NO: 21553443 NR Description: unknown [Arabidopsis thaliana]
  misc_feature (28)..(312): Homolog of NCBI NO: 30697627 NR Description: BAG domain containing protein [Arabidopsis
  misc_feature (2)..(269): Homolog of NCBI NO: 25553557 NR Description: OSJNBa0038F22.4 [Oryza sativa (japonica
  misc_feature (2)..(269): Homolog of NCBI NO: 34898024 NR Description: ESTs AU082174(S13676),AU032395(R3986) correspond a region of the predicted gene.~Similar to Arabidopsis thaliana
  misc_feature (97)..(327): Homolog of NCBI NO: 10334497 NR Description: hypothetical protein [Cicer arietinum]
  misc_feature (28)..(312): Homolog of NCBI NO: 10176928 NR Description: contains similarity to unknown
MMRNKPTNLPTAGMTNGGRGSGGGGGGGGRESGGRDLEIRPGGMLVQKRNPDLDPVGPPPPPMIRVRIKYGAVYHEINISPQASFGELKKMLTGPTGIHHQDQKLMYKDKERDSKAFLDVSGVKDKSKMVLIEDPLSQEKRFLEMRKIAKTEKASKAISDISLEVDRLGGRVSAFEMVTKKGGKIAEKDLVTVIELLMNELIKLDAIVAEGDVKLQRKMQVKRVQNYVETLDALKVKNSMANGQQKQSSTAQRLAPIQEHNNEERQEQKPIQSLMDMPIQYKEKKQEIEEEPRNSGEGPFVLDSSAKWETFDHHPVTPLSSTTAKNNAIPPRFNWEFFD

SEQ ID NO: 74275 - protein, 338 aa, Arabidopsis thaliana
  peptide (1)..(338): Ceres Seq. ID no. 5001843
  misc_feature (156)..(234): Pfam Name: BAG domain Pfam Description: BAG domain
  misc_feature (13)..(338): Homolog of NCBI NO: 15242267 NR Description: putative protein; protein id: At5g52060.1 thaliana] >gi|10177741|dbj|BAB11054.1| contains similarity to
  misc_feature (26)..(311): Homolog of NCBI NO: 21537107 NR Description: unknown [Arabidopsis thaliana]
  misc_feature (26)..(311): Homolog of NCBI NO: 15240726 NR Description: putative protein; protein id: At5g07220.1, by cDNA: 12022., supported by cDNA: gi_16226482 [Arabidopsis
  misc_feature (27)..(311): Homolog of NCBI NO: 30697630 NR Description: BAG domain containing protein [Arabidopsis
  misc_feature (27)..(311): Homolog of NCBI NO: 21553443 NR Description: unknown [Arabidopsis thaliana]
  misc_feature (27)..(311): Homolog of NCBI NO: 30697627 NR Description: BAG domain containing protein [Arabidopsis
  misc_feature (1)..(268): Homolog of NCBI NO: 25553557 NR Description: OSJNBa0038F22.4 [Oryza sativa (japonica
  misc_feature (1)..(268): Homolog of NCBI NO: 34898024 NR Description: ESTs AU082174(S13676),AU032395(R3986) correspond a region of the predicted gene.~Similar to Arabidopsis thaliana
  misc_feature (96)..(326): Homolog of NCBI NO: 10334497 NR Description: hypothetical protein [Cicer arietinum]
  misc_feature (27)..(311): Homolog of NCBI NO: 10176928 NR Description: contains similarity to unknown
MRNKPTNLPTAGMTNGGRGSGGGGGGGGRESGGRDLEIRPGGMLVQKRNPDLDPVGPPPPPMIRVRIKYGAVYHEINISPQASFGELKKMLTGPTGIHHQDQKLMYKDKERDSKAFLDVSGVKDKSKMVLIEDPLSQEKRFLEMRKIAKTEKASKAISDISLEVDRLGGRVSAFEMVTKKGGKIAEKDLVTVIELLMNELIKLDAIVAEGDVKLQRKMQVKRVQNYVETLDALKVKNSMANGQQKQSSTAQRLAPIQEHNNEERQEQKPIQSLMDMPIQYKEKKQEIEEEPRNSGEGPFVLDSSAKWETFDHHPVTPLSSTTAKNNAIPPRFNWEFFD

SEQ ID NO: 74276 - protein, 326 aa, Arabidopsis thaliana; identical to SEQ ID NO: 70053
  peptide (1)..(326): Ceres Seq. ID no. 5001844
  misc_feature (144)..(222): Pfam Name: BAG domain Pfam Description: BAG domain
  misc_feature (1)..(326): Homolog of NCBI NO: 15242267 NR Description: putative protein; protein id: At5g52060.1 thaliana] >gi|10177741|dbj|BAB11054.1| contains similarity to
  misc_feature (14)..(299): Homolog of NCBI NO: 21537107 NR Description: unknown [Arabidopsis thaliana]
  misc_feature (14)..(299): Homolog of NCBI NO: 15240726 NR Description: putative protein; protein id: At5g07220.1, by cDNA: 12022., supported by cDNA: gi_16226482 [Arabidopsis
  misc_feature (15)..(299): Homolog of NCBI NO: 30697630 NR Description: BAG domain containing protein [Arabidopsis
  misc_feature (15)..(299): Homolog of NCBI NO: 21553443 NR Description: unknown [Arabidopsis thaliana]
  misc_feature (15)..(299): Homolog of NCBI NO: 30697627 NR Description: BAG domain containing protein [Arabidopsis
  misc_feature (1)..(256): Homolog of NCBI NO: 25553557 NR Description: OSJNBa0038F22.4 [Oryza sativa (japonica
  misc_feature (1)..(256): Homolog of NCBI NO: 34898024 NR Description: ESTs AU082174(S13676),AU032395(R3986) correspond a region of the predicted gene.~Similar to Arabidopsis thaliana
  misc_feature (84)..(314): Homolog of NCBI NO: 10334497 NR Description: hypothetical protein [Cicer arietinum]
  misc_feature (15)..(299): Homolog of NCBI NO: 10176928 NR Description: contains similarity to unknown

SEQ ID NO: 74277 - DNA, 1227 bp, Arabidopsis thaliana
  misc_feature (1)..(1227): Ceres Seq. ID no. 5001990
  misc_feature: MA Experiment ID: 20000171 Result: Down-regulated in Transcription
  misc_feature: MA Experiment 20000171 PARAMETER Experiment Name: At_42deg_Heat_P Parameter: Age (day) Value: 14
  misc_feature: MA Experiment 20000171 PARAMETER Experiment Name: At_42deg_Heat_P Parameter: Organism Value: A. thaliana
  misc_feature: MA Experiment 20000171 PARAMETER Experiment Name: At_42deg_Heat_P Parameter: Plant Line Value: WS
  misc_feature: MA Experiment 20000171 PARAMETER Experiment Name: At_42deg_Heat_P Parameter: Temperature (deg C) Value: 42 vs. 22
  misc_feature: MA Experiment 20000171 PARAMETER Experiment Name: At_42deg_Heat_P Parameter: Timepoint (hr) Value: 1
  misc_feature: MA Experiment 20000171 PARAMETER Experiment Name: At_42deg_Heat_P Parameter: Tissue Value: Aerial
  misc_feature: MA Experiment ID: 20000173 Result: Down-regulated in Transcription
  misc_feature: MA Experiment 20000173 PARAMETER Experiment Name: At_42deg_Heat_P Parameter: Age (day) Value: 14
  misc_feature: MA Experiment 20000173 PARAMETER Experiment Name: At_42deg_Heat_P Parameter: Organism Value: A. thaliana
  misc_feature: MA Experiment 20000173 PARAMETER Experiment Name: At_42deg_Heat_P Parameter: Plant Line Value: WS
  misc_feature: MA Experiment 20000173 PARAMETER Experiment Name: At_42deg_Heat_P Parameter: Temperature (deg C) Value: 42 vs. 22
  misc_feature: MA Experiment 20000173 PARAMETER Experiment Name: At_42deg_Heat_P Parameter: Timepoint (hr) Value: 6
  misc_feature: MA Experiment 20000173 PARAMETER Experiment Name: At_42deg_Heat_P Parameter: Tissue Value: Aerial
  misc_feature: MA Experiment ID: 20000184 Result: Down-regulated in Transcription
  misc_feature: MA Experiment 20000184 PARAMETER Experiment Name: At_Shoots__P Parameter: Age (day) Value: 7
  misc_feature: MA Experiment 20000184 PARAMETER Experiment Name: At_Shoots__P Parameter: Tissue Value: Shoots vs. Whole Plant
atgtttggtggaaaaagtcatatactcagagggagtgtatcactggccttgatcgtccttattcttttggtcattatactcctggtttctgaggaaaacccgcttcgtgattctctctttgaagtaaaacgtcagttttcatcttcttcttcttcttcttcttcagtttgtaactttgcaaagggaaaatgggttgaagaccggaagagaccattgtattctggttttgaatgtaaacaatggttatcatccatgtggtcatgtagaataatgggcagacccgatttctcatttgagggttaccgttggcagccagaaggttgcaacatgccacagtttgacagattcactttcttgacaagaatgcagaacaagacgatagcatttataggagactcattggggcggcaacagtttcaatccctaatgtgtatggccagtggtggtgaagatagcccagaggttcaaaacgtgggatgggagtacggtttggtgaaagccaaaggagctctccgtcctgatggttgggcttatcggttcccaaccacaaacacgacgatcttgtattattggtcagctagcttatcagatttggtacccatgaacaatacagatccacctagtcttactgcaatgcatctagatcgtccaccagcattcatgagaaactaccttcaccgtttcgatgtattggttctaaacactggtcaccattggaacagaggtaagattgaaggaaaccattgggtgatgcatgtaaatggaacacaggtcgaaggcgaatatctcaaagatatcagaaacgccaaggattttacaatacacagcgttgcgaagtggctcgatgcacagcttccattgcatccgcggttgaaagctttctttaggacaatttctccgaggcattttaaaaacggagattggaatacaggtggaaactgtaacaacacggttcctttgtctagaggcagcgaaatcacaggggatgatggatcgatcgatgcaacagttgagagtgctgtgaacgggacaaggatcaagattcttgacataactgcactttctgagctaagagacgaagctcatatctcagggtctaaactcaaaccccgaaaaccgaagaaggcaagtaacgtgacctcaactccaacgatcaacgattgcttgcattggtgcttaccagggatcccagatacttggaatgaacttttcattgctcagatttga

SEQ ID NO: 74278 - protein, 408 aa, Arabidopsis thaliana
  peptide (1)..(408): Ceres Seq. ID no. 5001991
  misc_feature (239)..(408): Pfam Name: Arabidopsis proteins of unknown function Pfam Description: Arabidopsis proteins of unknown function
  misc_feature (1)..(408): Homolog of NCBI NO: 30697938 NR Description: expressed protein [Arabidopsis thaliana]
  misc_feature (1)..(408): Homolog of NCBI NO: 8777315 NR Description: gene_id:MBM17.12~pir||T02538~strong similarity to
  misc_feature (1)..(408): Homolog of NCBI NO: 15224349 NR Description: unknown protein; protein id: At2g37720.1
  misc_feature (41)..(408): Homolog of NCBI NO: 15810385 NR Description: unknown protein [Arabidopsis thaliana]
  misc_feature (41)..(408): Homolog of NCBI NO: 18420285 NR Description: putative protein; protein id: At5g20680.1,
  misc_feature (53)..(406): Homolog of NCBI NO: 6862912 NR Description: unknown protein [Arabidopsis thaliana]
  misc_feature (5)..(408): Homolog of NCBI NO: 15229797 NR Description: hypothetical protein; protein id: At3g11570.1
  misc_feature (15)..(408): Homolog of NCBI NO: 9759321 NR Description: gb|AAF00670.1~gene_id:MBL20.11~strong similarity
  misc_feature (47)..(408): Homolog of NCBI NO: 18415139 NR Description: putative protein; protein id: At5g06230.1, by cDNA: gi_13605530 [Arabidopsis thaliana] AT5g06230/MBL20_11 [Arabidopsis thaliana]
  misc_feature (40)..(406): Homolog of NCBI NO: 15239660 NR Description: putative protein; protein id: At5g19160.1
MFGGKSHILRGSVSLALIVLILLVIILLVSEENPLRDSLFEVKRQFSSSSSSSSSVCNFAKGKWVEDRKRPLYSGFECKQWLSSMWSCRIMGRPDFSFEGYRWQPEGCNMPQFDRFTFLTRMQNKTIAFIGDSLGRQQFQSLMCMASGGEDSPEVQNVGWEYGLVKAKGALRPDGWAYRFPTTNTTILYYWSASLSDLVPMNNTDPPSLTAMHLDRPPAFMRNYLHRFDVLVLNTGHHWNRGKIEGNHWVMHVNGTQVEGEYLKDIRNAKDFTIHSVAKWLDAQLPLHPRLKAFFRTISPRHFKNGDWNTGGNCNNTVPLSRGSEITGDDGSIDATVESAVNGTRIKILDITALSELRDEAHISGSKLKPRKPKKASNVTSTPTINDCLHWCLPGIPDTWNELFIAQI

SEQ ID NO: 74279 - protein, 324 aa, Arabidopsis thaliana; identical to SEQ ID NO: 74146
  peptide (1)..(324): Ceres Seq. ID no. 5001992
  misc_feature (155)..(324): Pfam Name: Arabidopsis proteins of unknown function Pfam Description: Arabidopsis proteins of unknown function
  misc_feature (1)..(324): Homolog of NCBI NO: 30697938 NR Description: expressed protein [Arabidopsis thaliana]
  misc_feature (1)..(324): Homolog of NCBI NO: 8777315 NR Description: gene_id:MBM17.12~pir||T02538~strong similarity to
  misc_feature (1)..(324): Homolog of NCBI NO: 15224349 NR Description: unknown protein; protein id: At2g37720.1
  misc_feature (1)..(324): Homolog of NCBI NO: 15810385 NR Description: unknown protein [Arabidopsis thaliana]
  misc_feature (1)..(324): Homolog of NCBI NO: 18420285 NR Description: putative protein; protein id: At5g20680.1,
  misc_feature (1)..(322): Homolog of NCBI NO: 6862912 NR Description: unknown protein [Arabidopsis thaliana]
  misc_feature (1)..(324): Homolog of NCBI NO: 15229797 NR Description: hypothetical protein; protein id: At3g11570.1
  misc_feature (1)..(324): Homolog of NCBI NO: 9759321 NR Description: gb|AAF00670.1~gene_id:MBL20.11~strong similarity
  misc_feature (1)..(324): Homolog of NCBI NO: 18415139 NR Description: putative protein; protein id: At5g06230.1, by cDNA: gi_13605530 [Arabidopsis thaliana] AT5g06230/MBL20_11 [Arabidopsis thaliana]
  misc_feature (1)..(322): Homolog of NCBI NO: 15239660 NR Description: putative protein; protein id: At5g19160.1

SEQ ID NO: 74280 - protein, 318 aa, Arabidopsis thaliana; identical to SEQ ID NO: 74147
  peptide (1)..(318): Ceres Seq. ID no. 5001993
  misc_feature (149)..(318): Pfam Name: Arabidopsis proteins of unknown function Pfam Description: Arabidopsis proteins of unknown function
  misc_feature (1)..(318): Homolog of NCBI NO: 30697938 NR Description: expressed protein [Arabidopsis thaliana]
  misc_feature (1)..(318): Homolog of NCBI NO: 8777315 NR Description: gene_id:MBM17.12~pir||T02538~strong similarity to
  misc_feature (1)..(318): Homolog of NCBI NO: 15224349 NR Description: unknown protein; protein id: At2g37720.1
  misc_feature (1)..(318): Homolog of NCBI NO: 15810385 NR Description: unknown protein [Arabidopsis thaliana]
  misc_feature (1)..(318): Homolog of NCBI NO: 18420285 NR Description: putative protein; protein id: At5g20680.1,
  misc_feature (1)..(316): Homolog of NCBI NO: 6862912 NR Description: unknown protein [Arabidopsis thaliana]
  misc_feature (1)..(318): Homolog of NCBI NO: 15229797 NR Description: hypothetical protein; protein id: At3g11570.1
  misc_feature (1)..(318): Homolog of NCBI NO: 9759321 NR Description: gb|AAF00670.1~gene_id:MBL20.11~strong similarity
  misc_feature (1)..(318): Homolog of NCBI NO: 18415139 NR Description: putative protein; protein id: At5g06230.1, by cDNA: gi_13605530 [Arabidopsis thaliana] AT5g06230/MBL20_11 [Arabidopsis thaliana]
  misc_feature (1)..(316): Homolog of NCBI NO: 15239660 NR Description: putative protein; protein id: At5g19160.1

SEQ ID NO: 74281 - DNA, 2193 bp, Arabidopsis thaliana
  misc_feature (1)..(2193): Ceres Seq. ID no. 5002027
  misc_feature: MA Experiment ID: 20001451 Result: Down-regulated in Transcription
  misc_feature: MA Experiment 20001451 PARAMETER Experiment Name: At_Far-red-induction_P Parameter: Age (day) Value: 7
  misc_feature: MA Experiment 20001451 PARAMETER Experiment Name: At_Far-red-induction_P Parameter: Light Value: Far-red vs. White
  misc_feature: MA Experiment 20001451 PARAMETER Experiment Name: At_Far-red-induction_P Parameter: Organism Value: A. thaliana
  misc_feature: MA Experiment 20001451 PARAMETER Experiment Name: At_Far-red-induction_P Parameter: Plant Line Value: Columbia
  misc_feature: MA Experiment 20001451 PARAMETER Experiment Name: At_Far-red-induction_P Parameter: Timepoint (hr) Value: 24
  misc_feature: MA Experiment 20001451 PARAMETER Experiment Name: At_Far-red-induction_P Parameter: Tissue Value: Whole Plant
atggttatgctagcgagatcaaagctagctctagatgtgagcagaagatcacagtctttgcaaagaatctgctactacgcaagtctctcctctagattttccggcggcggcggagatgatggcggcggcagctcaccggaaatcggtggtaccgattcagcaaacgaatgggagaagctccttaaaccattcgatctggattctctaaggaattcatttcacaagataactccctttcagctctataagctacttgagttacctctcaatgtatccacttcaatggagttgttctcatggaccggttctcaaaacggttatcgtcactccttcgatgtgtatcaagttcttataggtaagcttggtgcgaatggtgagtttaaaaccattgatagattgttaattcagatgaaagatgaaggaatcgtttttaaagaatctcttttcatttcgattatgagagattacgacaaagctggttttcctggacagacaacgagattgatgttggagatgaggaatgtctattcctgtgaacccacttttaaatcttacaatgttgtcttggagattttggtttctggtaattgtcataaagttgcagctaatgtgttctacgatatgcttagccgaaagattcctccaacgcttttcacatttggtgttgtgatgaaagctttttgtgctgttaatgagatagattcggctctgtctctgcttagggacatgacgaaacatggatgtgtcccaaactctgttatttaccagactcttatacattcgttatcgaagtgtaatagagtgaacgaagcgcttcagcttttagaggagatgtttctgatgggatgtgttcctgatgctgagactttcaacgatgttatccttggtctctgtaagtttgatcggattaacgaagctgctaaaatggtgaaccggatgctgattagagggtttgctcctgatgatataacttatggttatttgatgaatggtctatgtaagataggccgggttgatgctgcaaaagatcttttttacagaattccgaagccggaaattgtgatcttcaatactcttattcacgggtttgtgactcacggaagacttgatgatgctaaagctgttttatcagatatggtcacgtcttatggcattgttcctgatgtctgcacatataactcactgatctatggatattggaaggagggtcttgtaggtttagctctggaagttcttcatgacatgaggaataagggatgtaagcctaacgtctactcttatactattttagttgatggtttctgtaaattaggaaagatagatgaagcctacaatgttcttaatgaaatgtctgccgatggactgaaacccaacactgttggttttaactgtttgatatcggctttctgcaaggaacacagaatccccgaggccgtagagattttcagagagatgccgagaaaaggctgtaaacccgatgtgtatacatttaattcgctgatatctggactatgtgaggtcgacgaaataaagcatgccttgtggttacttagagatatgatatcagaaggtgttgttgctaatactgttacttacaacacgctgatcaacgcgtttcttagaagaggtgaaatcaaagaagctcgtaaactagtaaacgagatggttttccagggatccccgcttgatgagataacctacaacagtctgataaaagggctgtgcagggccggggaggtagataaggcgagaagcttgtttgaaaagatgttaagagacgggcatgcaccaagcaacatctcctgcaacatacttataaacgggctctgcagaagcgggatggtggaagaagcggttgagtttcagaaagagatggttctgagaggatcgacaccggacattgtgacatttaacagtctgataaacggtctgtgtagggccggtaggatcgaagatggtttgacgatgtttaggaagcttcaggctgaaggaataccgcctgatacggtgacgtttaacactttgatgagttggttgtgcaaaggaggttttgtttatgatgcttgcttacttctggatgaaggtattgaagatggttttgttccaaatcatagaacttggtcaattttgttacagagtattattccccaagaaacacttgatagacgaaggttttataatgcagctttttga

SEQ ID NO: 74282 - protein, 730 aa, Arabidopsis thaliana
  peptide (1)..(730): Ceres Seq. ID no. 5002028
  misc_feature (390)..(424): Pfam Name: PPR repeat Pfam Description: PPR repeat
  misc_feature (46)..(696): Homolog of NCBI NO: 37533554 NR Description: putative PPR-repeat protein [Oryza sativa
  misc_feature (94)..(711): Homolog of NCBI NO: 15221300 NR Description: hypothetical protein; protein id: At1g74580.1
  misc_feature (112)..(715): Homolog of NCBI NO: 34896698 NR Description: putative pentatricopeptide repeat protein [Oryza
  misc_feature (180)..(722): Homolog of NCBI NO: 15221549 NR Description: PPR-repeat protein; protein id: At1g62670.1
  misc_feature (180)..(701): Homolog of NCBI NO: 32452381 NR Description: fertility restorer homologue A [Raphanus sativus]
  misc_feature (180)..(701): Homolog of NCBI NO: 32527604 NR Description: pentatricopeptide repeat-containing protein
  misc_feature (58)..(677): Homolog of NCBI NO: 15229026 NR Description: putative protein; protein id: At3g48810.1
  misc_feature (180)..(722): Homolog of NCBI NO: 6630464 NR Description: F23N19.4 [Arabidopsis thaliana]
  misc_feature (206)..(711): Homolog of NCBI NO: 30840327 NR Description: fertility restorer homologue [Raphanus sativus]
  misc_feature (180)..(723): Homolog of NCBI NO: 15221635 NR Description: unknown protein; protein id: At1g62930.1
MVMLARSKLALDVSRRSQSLQRICYYASLSSRFSGGGGDDGGGSSPEIGGTDSANEWEKLLKPFDLDSLRNSFHKITPFQLYKLLELPLNVSTSMELFSWTGSQNGYRHSFDVYQVLIGKLGANGEFKTIDRLLIQMKDEGIVFKESLFISIMRDYDKAGFPGQTTRLMLEMRNVYSCEPTFKSYNVVLEILVSGNCHKVAANVFYDMLSRKIPPTLFTFGVVMKAFCAVNEIDSALSLLRDMTKHGCVPNSVIYQTLIHSLSKCNRVNEALQLLEEMFLMGCVPDAETFNDVILGLCKFDRINEAAKMVNRMLIRGFAPDDITYGYLMNGLCKIGRVDAAKDLFYRIPKPEIVIFNTLIHGFVTHGRLDDAKAVLSDMVTSYGIVPDVCTYNSLIYGYWKEGLVGLALEVLHDMRNKGCKPNVYSYTILVDGFCKLGKIDEAYNVLNEMSADGLKPNTVGFNCLISAFCKEHRIPEAVEIFREMPRKGCKPDVYTFNSLISGLCEVDEIKHALWLLRDMISEGVVANTVTYNTLINAFLRRGEIKEARKLVNEMVFQGSPLDEITYNSLIKGLCRAGEVDKARSLFEKMLRDGHAPSNISCNILINGLCRSGMVEEAVEFQKEMVLRGSTPDIVTFNSLINGLCRAGRIEDGLTMFRKLQAEGIPPDTVTFNTLMSWLCKGGFVYDACLLLDEGIEDGFVPNHRTWSILLQSIIPQETLDRRRFYNAAF

SEQ ID NO: 74283 - protein, 728 aa, Arabidopsis thaliana
  peptide (1)..(728): Ceres Seq. ID no. 5002029
  misc_feature (388)..(422): Pfam Name: PPR repeat Pfam Description: PPR repeat
  misc_feature (44)..(694): Homolog of NCBI NO: 37533554 NR Description: putative PPR-repeat protein [Oryza sativa
  misc_feature (92)..(709): Homolog of NCBI NO: 15221300 NR Description: hypothetical protein; protein id: At1g74580.1
  misc_feature (110)..(713): Homolog of NCBI NO: 34896698 NR Description: putative pentatricopeptide repeat protein [Oryza
  misc_feature (178)..(720): Homolog of NCBI NO: 15221549 NR Description: PPR-repeat protein; protein id: At1g62670.1
  misc_feature (178)..(699): Homolog of NCBI NO: 32452381 NR Description: fertility restorer homologue A [Raphanus sativus]
  misc_feature (178)..(699): Homolog of NCBI NO: 32527604 NR Description: pentatricopeptide repeat-containing protein
  misc_feature (56)..(675): Homolog of NCBI NO: 15229026 NR Description: putative protein; protein id: At3g48810.1
  misc_feature (178)..(720): Homolog of NCBI NO: 6630464 NR Description: F23N19.4 [Arabidopsis thaliana]
  misc_feature (204)..(709): Homolog of NCBI NO: 30840327 NR Description: fertility restorer homologue [Raphanus sativus]
  misc_feature (178)..(721): Homolog of NCBI NO: 15221635 NR Description: unknown protein; protein id: At1g62930.1
MLARSKLALDVSRRSQSLQRICYYASLSSRFSGGGGDDGGGSSPEIGGTDSANEWEKLLKPFDLDSLRNSFHKITPFQLYKLLELPLNVSTSMELFSWTGSQNGYRHSFDVYQVLIGKLGANGEFKTIDRLLIQMKDEGIVFKESLFISIMRDYDKAGFPGQTTRLMLEMRNVYSCEPTFKSYNVVLEILVSGNCHKVAANVFYDMLSRKIPPTLFTFGVVMKAFCAVNEIDSALSLLRDMTKHGCVPNSVIYQTLIHSLSKCNRVNEALQLLEEMFLMGCVPDAETFNDVILGLCKFDRINEAAKMVNRMLIRGFAPDDITYGYLMNGLCKIGRVDAAKDLFYRIPKPEIVIFNTLIHGFVTHGRLDDAKAVLSDMVTSYGIVPDVCTYNSLIYGYWKEGLVGLALEVLHDMRNKGCKPNVYSYTILVDGFCKLGKIDEAYNVLNEMSADGLKPNTVGFNCLISAFCKEHRIPEAVEIFREMPRKGCKPDVYTFNSLISGLCEVDEIKHALWLLRDMISEGVVANTVTYNTLINAFLRRGEIKEARKLVNEMVFQGSPLDEITYNSLIKGLCRAGEVDKARSLFEKMLRDGHAPSNISCNILINGLCRSGMVEEAVEFQKEMVLRGSTPDIVTFNSLINGLCRAGRIEDGLTMFRKLQAEGIPPDTVTFNTLMSWLCKGGFVYDACLLLDEGIEDGFVPNHRTWSILLQSIIPQETLDRRRFYNAAF

SEQ ID NO: 74284 - protein, 636 aa, Arabidopsis thaliana
  peptide (1)..(636): Ceres Seq. ID no. 5002030
  misc_feature (296)..(330): Pfam Name: PPR repeat Pfam Description: PPR repeat
  misc_feature (1)..(602): Homolog of NCBI NO: 37533554 NR Description: putative PPR-repeat protein [Oryza sativa
  misc_feature (1)..(617): Homolog of NCBI NO: 15221300 NR Description: hypothetical protein; protein id: At1g74580.1
  misc_feature (18)..(621): Homolog of NCBI NO: 34896698 NR Description: putative pentatricopeptide repeat protein [Oryza
  misc_feature (86)..(628): Homolog of NCBI NO: 15221549 NR Description: PPR-repeat protein; protein id: At1g62670.1
  misc_feature (86)..(607): Homolog of NCBI NO: 32452381 NR Description: fertility restorer homologue A [Raphanus sativus]
  misc_feature (86)..(607): Homolog of NCBI NO: 32527604 NR Description: pentatricopeptide repeat-containing protein
  misc_feature (1)..(583): Homolog of NCBI NO: 15229026 NR Description: putative protein; protein id: At3g48810.1
  misc_feature (86)..(628): Homolog of NCBI NO: 6630464 NR Description: F23N19.4 [Arabidopsis thaliana]
  misc_feature (112)..(617): Homolog of NCBI NO: 30840327 NR Description: fertility restorer homologue [Raphanus sativus]
  misc_feature (86)..(629): Homolog of NCBI NO: 15221635 NR Description: unknown protein; protein id: At1g62930.1
MELFSWTGSQNGYRHSFDVYQVLIGKLGANGEFKTIDRLLIQMKDEGIVFKESLFISIMRDYDKAGFPGQTTRLMLEMRNVYSCEPTFKSYNVVLEILVSGNCHKVAANVFYDMLSRKIPPTLFTFGVVMKAFCAVNEIDSALSLLRDMTKHGCVPNSVIYQTLIHSLSKCNRVNEALQLLEEMFLMGCVPDAETFNDVILGLCKFDRINEAAKMVNRMLIRGFAPDDITYGYLMNGLCKIGRVDAAKDLFYRIPKPEIVIFNTLIHGFVTHGRLDDAKAVLSDMVTSYGIVPDVCTYNSLIYGYWKEGLVGLALEVLHDMRNKGCKPNVYSYTILVDGFCKLGKIDEAYNVLNEMSADGLKPNTVGFNCLISAFCKEHRIPEAVEIFREMPRKGCKPDVYTFNSLISGLCEVDEIKHALWLLRDMISEGVVANTVTYNTLINAFLRRGEIKEARKLVNEMVFQGSPLDEITYNSLIKGLCRAGEVDKARSLFEKMLRDGHAPSNISCNILINGLCRSGMVEEAVEFQKEMVLRGSTPDIVTFNSLINGLCRAGRIEDGLTMFRKLQAEGIPPDTVTFNTLMSWLCKGGFVYDACLLLDEGIEDGFVPNHRTWSILLQSIIPQETLDRRRFYNAAF

SEQ ID NO: 74285 - DNA, 704 bp, Arabidopsis thaliana
  misc_feature (1)..(704): Ceres Seq. ID no. 5002197
  misc_feature: MA Experiment ID: 20000069 Result: Up-regulated in Transcription
  misc_feature: MA Experiment 20000069 PARAMETER Experiment Name: At_100uM_ABA_Mutants_cDNA_P Parameter: Plant Line Value: CS23
  misc_feature: MA Experiment 20000069 PARAMETER Experiment Name: At_100uM_ABA_Mutants_cDNA_P Parameter: Timepoint (hr) Value: 6
  misc_feature: MA Experiment 20000069 PARAMETER Experiment Name: At_100uM_ABA_Mutants_cDNA_P Parameter: Tissue Value: Aerial
  misc_feature: MA Experiment 20000069 PARAMETER Experiment Name: At_100uM_ABA_Mutants_cDNA_P Parameter: Treatment Value: 100uM ABA vs. No Treatment
  misc_feature: MA Experiment ID: 20000070 Result: Up-regulated in Transcription
  misc_feature: MA Experiment 20000070 PARAMETER Experiment Name: At_100uM_ABA_Mutants_cDNA_P Parameter: Plant Line Value: CS24
  misc_feature: MA Experiment 20000070 PARAMETER Experiment Name: At_100uM_ABA_Mutants_cDNA_P Parameter: Timepoint (hr) Value: 6
  misc_feature: MA Experiment 20000070 PARAMETER Experiment Name: At_100uM_ABA_Mutants_cDNA_P Parameter: Tissue Value: Aerial
  misc_feature: MA Experiment 20000070 PARAMETER Experiment Name: At_100uM_ABA_Mutants_cDNA_P Parameter: Treatment Value: 100uM ABA vs. No Treatment
  misc_feature: MA Experiment ID: 20000314 Result: Up-regulated in Transcription
  misc_feature: MA Experiment 20000314 PARAMETER Experiment Name: At_14day_Shoots-Roots_Sub_P Parameter: Age (day) Value: 14
  misc_feature: MA Experiment 20000314 PARAMETER Experiment Name: At_14day_Shoots-Roots_Sub_P Parameter: Organism Value: A. thaliana
  misc_feature: MA Experiment 20000314 PARAMETER Experiment Name: At_14day_Shoots-Roots_Sub_P Parameter: Plant Line Value: WS
  misc_feature: MA Experiment 20000314 PARAMETER Experiment Name: At_14day_Shoots-Roots_Sub_P Parameter: Tissue Value: Roots vs. Whole Plant
  misc_feature: MA Experiment ID: 20000327 Result: Down-regulated in Transcription
  misc_feature: MA Experiment 20000327 PARAMETER Experiment Name: At_42deg_Heat_Sub_P Parameter: Age (day) Value: 14
  misc_feature: MA Experiment 20000327 PARAMETER Experiment Name: At_42deg_Heat_Sub_P Parameter: Organism Value: A. thaliana
  misc_feature: MA Experiment 20000327 PARAMETER Experiment Name: At_42deg_Heat_Sub_P Parameter: Plant Line Value: WS
  misc_feature: MA Experiment 20000327 PARAMETER Experiment Name: At_42deg_Heat_Sub_P Parameter: Temperature (deg C) Value: 42 vs. 22
  misc_feature: MA Experiment 20000327 PARAMETER Experiment Name: At_42deg_Heat_Sub_P Parameter: Timepoint (hr) Value: 1
  misc_feature: MA Experiment 20000327 PARAMETER Experiment Name: At_42deg_Heat_Sub_P Parameter: Tissue Value: Aerial
  misc_feature: MA Experiment ID: 20000328 Result: Down-regulated in Transcription
  misc_feature: MA Experiment 20000328 PARAMETER Experiment Name: At_42deg_Heat_Sub_P Parameter: Age (day) Value: 14
  misc_feature: MA Experiment 20000328 PARAMETER Experiment Name: At_42deg_Heat_Sub_P Parameter: Organism Value: A. thaliana
  misc_feature: MA Experiment 20000328 PARAMETER Experiment Name: At_42deg_Heat_Sub_P Parameter: Plant Line Value: WS
  misc_feature: MA Experiment 20000328 PARAMETER Experiment Name: At_42deg_Heat_Sub_P Parameter: Temperature (deg C) Value: 42 vs. 22
  misc_feature: MA Experiment 20000328 PARAMETER Experiment Name: At_42deg_Heat_Sub_P Parameter: Timepoint (hr) Value: 6
  misc_feature: MA Experiment 20000328 PARAMETER Experiment Name: At_42deg_Heat_Sub_P Parameter: Tissue Value: Aerial
  misc_feature: MA Experiment ID: 20000355 Result: Up-regulated in Transcription
  misc_feature: MA Experiment 20000355 PARAMETER Experiment Name: At_Siliques_Sub_P Parameter: Age (day) Value: 21
  misc_feature: MA Experiment 20000355 PARAMETER Experiment Name: At_Siliques_Sub_P Parameter: Organism Value: A. thaliana
  misc_feature: MA Experiment 20000355 PARAMETER Experiment Name: At_Siliques_Sub_P Parameter: Plant Line Value: WS
  misc_feature: MA Experiment 20000355 PARAMETER Experiment Name: At_Siliques_Sub_P Parameter: Tissue Value: Less Than 5mm Siliques vs. Whole Plant
  misc_feature: Pfam Name: Glyco_transf_8 Pfam Description: Glycosyl transferase family 8
aggagccagaaagaatagtcttccatgtcgtgactgattcacttaattacccagcaatctcaatgtggtttctgctaaacattcaaaattcatttctacactcaatcacgcacgcttctatctcccggatatattcccgggtttgaacaagatggtactcttggaccatgatgtagttgttcaaagagatttaagtagactgtggagcattgatatgaaaggaaaggtggttggagctgtagagacttgtcttgaaggtgaatcttcatttcgatcaatgagcacatttattaatttctcagacacatgggtcgctgggaaatttagtcctagagcttgcacatgggctttcgggatgaatctaattgatctcgaagaatggagaatacggaagttgacttctacatacataaaatacttcaacctgggaacaaagagaccattgtggaaagctgggagcttaccaataggttggttgactttctataggcaaacattagcattggacaagagatggcatgtgatggggttaggtcgcgaatcaggagtcaaagcggttgacatcgaacaagcggcagttatacactacgatggggtcatgaagccgtggttggacattggaaaagagaattacaaacgttactggaacatacacgtcccttaccatcacacctacttgcaacagtgcaatcttcaagcttgat

SEQ ID NO: 74286 - protein, 183 aa, Arabidopsis thaliana; identical to SEQ ID NO: 27848
  peptide (1)..(183): Ceres Seq. ID no. 5002198
  misc_feature: Pfam Name: Glyco_transf_8 Pfam Description: Glycosyl transferase family 8
  misc_feature (1)..(183): Homolog of NCBI NO: 18390688 NR Description: expressed protein; protein id: At1g06780.1, by cDNA: gi_15028086, supported by cDNA: gi_20259310 [Arabidopsis
  misc_feature (1)..(181): Homolog of NCBI NO: 30684642 NR Description: glycosyltransferase family 8 [Arabidopsis >gi|19698933|gb|AAL91202.1| unknown protein [Arabidopsis >gi|27311915|gb|AAO00923.1| unknown protein [Arabidopsis
  misc_feature (1)..(181): Homolog of NCBI NO: 10177914 NR Description: emb|CAB71043.1~gene_id:MCA23.10~strong similarity
  misc_feature (1)..(181): Homolog of NCBI NO: 18422837 NR Description: putative protein; protein id: At5g47780.1, by cDNA: gi_15810326, supported by cDNA: gi_20259234 [Arabidopsis >gi|15810327|gb|AAL07051.1| unknown protein [Arabidopsis
  misc_feature (1)..(181): Homolog of NCBI NO: 15233046 NR Description: putative protein; protein id: At3g61130.1, by cDNA: gi_14517361 [Arabidopsis thaliana]
  misc_feature (1)..(181): Homolog of NCBI NO: 38423965 NR Description: putative glycosyltransferase [Oryza sativa
  misc_feature (1)..(181): Homolog of NCBI NO: 7271113 NR Description: 68 kDa protein [Cicer arietinum]
  misc_feature (1)..(181): Homolog of NCBI NO: 7485958 NR Description: hypothetical protein F22I13.40 - Arabidopsis >gi|4539335|emb|CAB37483.1| putative protein [Arabidopsis >gi|7270811|emb|CAB80492.1| putative protein [Arabidopsis
  misc_feature (1)..(181): Homolog of NCBI NO: 30691875 NR Description: glycosyltransferase family 8 [Arabidopsis
  misc_feature (1)..(179): Homolog of NCBI NO: 37533460 NR Description: hypothetical protein [Oryza sativa (japonica group)] >gi|20279459|gb|AAM18739.1| hypothetical protein [Oryza

SEQ ID NO: 74287 - protein, 162 aa, Arabidopsis thaliana; identical to SEQ ID NO: 27849
  peptide (1)..(162): Ceres Seq. ID no. 5002199
  misc_feature: Pfam Name: Glyco_transf_8 Pfam Description: Glycosyl transferase family 8
  misc_feature (1)..(162): Homolog of NCBI NO: 18390688 NR Description: expressed protein; protein id: At1g06780.1, by cDNA: gi_15028086, supported by cDNA: gi_20259310 [Arabidopsis
  misc_feature (1)..(160): Homolog of NCBI NO: 30684642 NR Description: glycosyltransferase family 8 [Arabidopsis >gi|19698933|gb|AAL91202.1| unknown protein [Arabidopsis >gi|27311915|gb|AAO00923.1| unknown protein [Arabidopsis
  misc_feature (1)..(160): Homolog of NCBI NO: 10177914 NR Description: emb|CAB71043.1~gene_id:MCA23.10~strong similarity
  misc_feature (1)..(160): Homolog of NCBI NO: 18422837 NR Description: putative protein; protein id: At5g47780.1, by cDNA: gi_15810326, supported by cDNA: gi_20259234 [Arabidopsis >gi|15810327|gb|AAL07051.1| unknown protein [Arabidopsis
  misc_feature (1)..(160): Homolog of NCBI NO: 15233046 NR Description: putative protein; protein id: At3g61130.1, by cDNA: gi_14517361 [Arabidopsis thaliana]
  misc_feature (1)..(160): Homolog of NCBI NO: 38423965 NR Description: putative glycosyltransferase [Oryza sativa
  misc_feature (1)..(160): Homolog of NCBI NO: 7271113 NR Description: 68 kDa protein [Cicer arietinum]
  misc_feature (1)..(160): Homolog of NCBI NO: 7485958 NR Description: hypothetical protein F22I13.40 - Arabidopsis >gi|4539335|emb|CAB37483.1| putative protein [Arabidopsis >gi|7270811|emb|CAB80492.1| putative protein [Arabidopsis
  misc_feature (1)..(160): Homolog of NCBI NO: 30691875 NR Description: glycosyltransferase family 8 [Arabidopsis
  misc_feature (1)..(158): Homolog of NCBI NO: 37533460 NR Description: hypothetical protein [Oryza sativa (japonica group)] >gi|20279459|gb|AAM18739.1| hypothetical protein [Oryza

SEQ ID NO: 74288 - protein, 141 aa, Arabidopsis thaliana; identical to SEQ ID NO: 27850
  peptide (1)..(141): Ceres Seq. ID no. 5002200
  misc_feature: Pfam Name: Glyco_transf_8 Pfam Description: Glycosyl transferase family 8
  misc_feature (1)..(141): Homolog of NCBI NO: 18390688 NR Description: expressed protein; protein id: At1g06780.1, by cDNA: gi_15028086, supported by cDNA: gi_20259310 [Arabidopsis
  misc_feature (1)..(139): Homolog of NCBI NO: 30684642 NR Description: glycosyltransferase family 8 [Arabidopsis >gi|19698933|gb|AAL91202.1| unknown protein [Arabidopsis >gi|27311915|gb|AAO00923.1| unknown protein [Arabidopsis
  misc_feature (1)..(139): Homolog of NCBI NO: 10177914 NR Description: emb|CAB71043.1~gene_id:MCA23.10~strong similarity
  misc_feature (1)..(139): Homolog of NCBI NO: 18422837 NR Description: putative protein; protein id: At5g47780.1, by cDNA: gi_15810326, supported by cDNA: gi_20259234 [Arabidopsis >gi|15810327|gb|AAL07051.1| unknown protein [Arabidopsis
  misc_feature (1)..(139): Homolog of NCBI NO: 15233046 NR Description: putative protein; protein id: At3g61130.1, by cDNA: gi_14517361 [Arabidopsis thaliana]
  misc_feature (1)..(139): Homolog of NCBI NO: 38423965 NR Description: putative glycosyltransferase [Oryza sativa
  misc_feature (1)..(139): Homolog of NCBI NO: 7271113 NR Description: 68 kDa protein [Cicer arietinum]
  misc_feature (1)..(139): Homolog of NCBI NO: 7485958 NR Description: hypothetical protein F22I13.40 - Arabidopsis >gi|4539335|emb|CAB37483.1| putative protein [Arabidopsis >gi|7270811|emb|CAB80492.1| putative protein [Arabidopsis
  misc_feature (1)..(139): Homolog of NCBI NO: 30691875 NR Description: glycosyltransferase family 8 [Arabidopsis
  misc_feature (1)..(137): Homolog of NCBI NO: 37533460 NR Description: hypothetical protein [Oryza sativa (japonica group)] >gi|20279459|gb|AAM18739.1| hypothetical protein [Oryza

SEQ ID NO: 74289 - DNA, 343 bp, Arabidopsis thaliana
  misc_feature (1)..(343): Ceres Seq. ID no. 5002221
  misc_feature: MA Experiment ID: 108434 Result: Down-regulated in Transcription
  misc_feature: MA Experiment 108434 PARAMETER Experiment Name: At_Root_Tips_cDNA_P Parameter: Tissue Value: Root Tips
  misc_feature: MA Experiment ID: 108461 Result: Up-regulated in Transcription
  misc_feature: MA Experiment 108461 PARAMETER Experiment Name: At_Germinating_Seeds_cDNA_P Parameter: Age (day) Value: 1 vs. 0
  misc_feature: MA Experiment 108461 PARAMETER Experiment Name: At_Germinating_Seeds_cDNA_P Parameter: Tissue Value: Germinating Seeds
  misc_feature: MA Experiment ID: 108464 Result: Up-regulated in Transcription
  misc_feature: MA Experiment 108464 PARAMETER Experiment Name: At_Germinating_Seeds_cDNA_P Parameter: Age (day) Value: 4 vs. 0
  misc_feature: MA Experiment 108464 PARAMETER Experiment Name: At_Germinating_Seeds_cDNA_P Parameter: Tissue Value: Germinating Seeds
  misc_feature: MA Experiment ID: 108488 Result: Up-regulated in Transcription
  misc_feature: MA Experiment ID: 108595 Result: Down-regulated in Transcription
  misc_feature: MA Experiment 108595 PARAMETER Experiment Name: At_Ler-pi_Ovule_cDNA_P Parameter: Plant Line Value: null
  misc_feature: MA Experiment ID: 20000087 Result: Down-regulated in Transcription
  misc_feature: MA Experiment 20000087 PARAMETER Experiment Name: At_100uM_ABA_Mutants_cDNA_P Parameter: Plant Line Value: WS
  misc_feature: MA Experiment 20000087 PARAMETER Experiment Name: At_100uM_ABA_Mutants_cDNA_P Parameter: Timepoint (hr) Value: 6
  misc_feature: MA Experiment 20000087 PARAMETER Experiment Name: At_100uM_ABA_Mutants_cDNA_P Parameter: Tissue Value: Aerial
  misc_feature: MA Experiment 20000087 PARAMETER Experiment Name: At_100uM_ABA_Mutants_cDNA_P Parameter: Treatment Value: 100uM ABA vs. No Treatment
  misc_feature: MA Experiment ID: 20000179 Result: Up-regulated in Transcription
  misc_feature: MA Experiment 20000179 PARAMETER Experiment Name: At_Germinating_Seeds_P Parameter: Age (hr) Value: 6 vs. 0
  misc_feature: MA Experiment 20000179 PARAMETER Experiment Name: At_Germinating_Seeds_P Parameter: Tissue Value: Germinating Seeds
  misc_feature: MA Experiment ID: 20000180 Result: Up-regulated in Transcription
  misc_feature: MA Experiment 20000180 PARAMETER Experiment Name: At_Germinating_Seeds_P Parameter: Age (hr) Value: 24 vs. 0
  misc_feature: MA Experiment 20000180 PARAMETER Experiment Name: At_Germinating_Seeds_P Parameter: Tissue Value: Germinating Seeds
  misc_feature: MA Experiment ID: 20000185 Result: Down-regulated in Transcription
  misc_feature: MA Experiment 20000185 PARAMETER Experiment Name: At_Roots__P Parameter: Age (day) Value: 7 vs. 21
  misc_feature: MA Experiment 20000185 PARAMETER Experiment Name: At_Roots__P Parameter: Organism Value: A. thaliana
  misc_feature: MA Experiment 20000185 PARAMETER Experiment Name: At_Roots__P Parameter: Tissue Value: Roots vs. Whole Plant
  misc_feature: MA Experiment ID: 20000269 Result: Down-regulated in Transcription
  misc_feature: MA Experiment 20000269 PARAMETER Experiment Name: At_1mM_KNO3_L-vs-H_Roots_P Parameter: Age (day) Value: 7,10,12
  misc_feature: MA Experiment 20000269 PARAMETER Experiment Name: At_1mM_KNO3_L-vs-H_Roots_P Parameter: Organism Value: A. thaliana
  misc_feature: MA Experiment 20000269 PARAMETER Experiment Name: At_1mM_KNO3_L-vs-H_Roots_P Parameter: Plant Line Value: WS
  misc_feature: MA Experiment 20000269 PARAMETER Experiment Name: At_1mM_KNO3_L-vs-H_Roots_P Parameter: Timepoint (day) Value: 7,10,12
  misc_feature: MA Experiment 20000269 PARAMETER Experiment Name: At_1mM_KNO3_L-vs-H_Roots_P Parameter: Tissue Value: Roots
  misc_feature: MA Experiment 20000269 PARAMETER Experiment Name: At_1mM_KNO3_L-vs-H_Roots_P Parameter: Treatment Value: 1mM KNO3 vs. 50mM KNO3
  misc_feature: MA Experiment ID: 20000439 Result: Down-regulated in Transcription
  misc_feature: MA Experiment 20000439 PARAMETER Experiment Name: At_Roots__P Parameter: Age (day) Value: 14 vs. 21
  misc_feature: MA Experiment 20000439 PARAMETER Experiment Name: At_Roots__P Parameter: Organism Value: A. thaliana
  misc_feature: MA Experiment 20000439 PARAMETER Experiment Name: At_Roots__P Parameter: Tissue Value: Roots vs. Whole Plant
  misc_feature: MA Experiment ID: 20000794 Result: Down-regulated in Transcription
  misc_feature: MA Experiment 20000794 PARAMETER Experiment Name: At_Petals_P Parameter: Age (day) Value: 23-25 days
  misc_feature: MA Experiment 20000794 PARAMETER Experiment Name: At_Petals_P Parameter: Plant Line Value: WS
  misc_feature: MA Experiment 20000794 PARAMETER Experiment Name: At_Petals_P Parameter: Tissue Value: Petals vs. Whole plant
  misc_feature: MA Experiment ID: 20001557 Result: Down-regulated in Transcription
  misc_feature: MA Experiment 20001557 PARAMETER Experiment Name: At_Drought_Soil_Dry_P Parameter: Age (day) Value: 27
  misc_feature: MA Experiment 20001557 PARAMETER Experiment Name: At_Drought_Soil_Dry_P Parameter: Organism Value: A. thaliana
  misc_feature: MA Experiment 20001557 PARAMETER Experiment Name: At_Drought_Soil_Dry_P Parameter: Plant Line Value: WS
  misc_feature: MA Experiment 20001557 PARAMETER Experiment Name: At_Drought_Soil_Dry_P Parameter: Post Timepoint (hr) Value: 3
  misc_feature: MA Experiment 20001557 PARAMETER Experiment Name: At_Drought_Soil_Dry_P Parameter: Post-Treatment Value: Re-Water vs. No Drought
  misc_feature: MA Experiment 20001557 PARAMETER Experiment Name: At_Drought_Soil_Dry_P Parameter: Timepoint (day) Value: 13
  misc_feature: MA Experiment 20001557 PARAMETER Experiment Name: At_Drought_Soil_Dry_P Parameter: Treatment Value: Drought vs. No Drought
  misc_feature: MA Experiment ID: 20001757 Result: Up-regulated in Transcription
  misc_feature: MA Experiment 20001757 PARAMETER Experiment Name: At_50mM_NH4NO3_L-to-H_P Parameter: Timepoint (hr) Value: 6
  misc_feature: MA Experiment 20001757 PARAMETER Experiment Name: At_50mM_NH4NO3_L-to-H_P Parameter: Tissue Value: Leaf
  misc_feature: MA Experiment 20001757 PARAMETER Experiment Name: At_50mM_NH4NO3_L-to-H_P Parameter: Treatment Value: 50mM NH4NO3 vs 100mM Mannitol
  misc_feature: MA Experiment ID: 20001904 Result: Down-regulated in Transcription
  misc_feature: MA Experiment 20001904 PARAMETER Experiment Name: At_Drought_Reproduction_P Parameter: Age (day) Value: 37
  misc_feature: MA Experiment 20001904 PARAMETER Experiment Name: At_Drought_Reproduction_P Parameter: Organism Value: A. thaliana
  misc_feature: MA Experiment 20001904 PARAMETER Experiment Name: At_Drought_Reproduction_P Parameter: Plant Line Value: WS
  misc_feature: MA Experiment 20001904 PARAMETER Experiment Name: At_Drought_Reproduction_P Parameter: Timepoint (day) Value: 7
  misc_feature: MA Experiment 20001904 PARAMETER Experiment Name: At_Drought_Reproduction_P Parameter: Tissue Value: Rosettes
  misc_feature: MA Experiment 20001904 PARAMETER Experiment Name: At_Drought_Reproduction_P Parameter: Treatment Value: Drought vs. No Drought
  misc_feature: MA Experiment ID: 20001906 Result: Down-regulated in Transcription
  misc_feature: MA Experiment 20001906 PARAMETER Experiment Name: At_Drought_Reproduction_P Parameter: Age (day) Value: 35
  misc_feature: MA Experiment 20001906 PARAMETER Experiment Name: At_Drought_Reproduction_P Parameter: Organism Value: A. thaliana
  misc_feature: MA Experiment 20001906 PARAMETER Experiment Name: At_Drought_Reproduction_P Parameter: Plant Line Value: WS
  misc_feature: MA Experiment 20001906 PARAMETER Experiment Name: At_Drought_Reproduction_P Parameter: Timepoint (day) Value: 5
  misc_feature: MA Experiment 20001906 PARAMETER Experiment Name: At_Drought_Reproduction_P Parameter: Tissue Value: Siliques
  misc_feature: MA Experiment 20001906 PARAMETER Experiment Name: At_Drought_Reproduction_P Parameter: Treatment Value: Drought vs. No Drought
aacttaatcacacacaaggagagaagagagaaagagagaaagagagacagagataatggcgtacagtgcgtgtttcctacaccagagcgcattggcttcatcagccgcacgatcatcatcttcctcctcatcccagcgtcacgtgtcgctctccaaacctgttcagatcatctgtaaagcacaagctggagacaagaggtggttcaagggagccaggaaatttgtcgagagcgcagccacttctttcagtgttgcttgagtgaaagcaacacaacgtaacaatgctctgcttgctttcttcatttgtctcttgtaaaaaatggaaaatgaaactgagcttttg

SEQ ID NO: 74290 - protein, 67 aa, Arabidopsis thaliana
  peptide (1)..(67): Ceres Seq. ID no. 5002222
  misc_feature (13)..(67): Pfam Name: PsbP Pfam Description: PsbP
  misc_feature (1)..(43): Homolog of NCBI NO: 15222166 NR Description: photosystem II oxygen-evolving complex 23 protein id: At1g06680.1, supported by cDNA: 33922., supported by
  misc_feature (1)..(43): Homolog of NCBI NO: 15224572 NR Description: photosystem II oxygen-evolving complex 23 protein id: At2g30790.1 [Arabidopsis thaliana]
  misc_feature (1)..(43): Homolog of NCBI NO: 11133887 NR Description: OXYGEN-EVOLVING ENHANCER PROTEIN 2-2, CHLOROPLAST (OEE2) (23 KDA SUBUNIT OF OXYGEN EVOLVING SYSTEM OF PHOTOSYSTEM
  misc_feature (1)..(43): Homolog of NCBI NO: 131391 NR Description: Oxygen-evolving enhancer protein 2, chloroplast (OEE2) (23 kDa subunit of oxygen evolving system of photosystem (OEC 23 kDa subunit) (23 kDa thylakoid membrane protein)
  misc_feature (13)..(67): Homolog of NCBI NO: 19898 NR Description: photosystem II 23 kDa polypeptide [Nicotiana
  misc_feature (13)..(67): Homolog of NCBI NO: 1345550 NR Description: 23-kDa ploypeptide of photosystem II
  misc_feature (13)..(67): Homolog of NCBI NO: 417604 NR Description: 23 kDa polypeptide of water-oxidizing complex of
  misc_feature (13)..(67): Homolog of NCBI NO: 7443216 NR Description: photosystem II oxygen-evolving complex protein 2
  misc_feature (15)..(67): Homolog of NCBI NO: 15222166 NR Description: photosystem II oxygen-evolving complex 23 protein id: At1g06680.1, supported by cDNA: 33922., supported by
  misc_feature (15)..(67): Homolog of NCBI NO: 15224572 NR Description: photosystem II oxygen-evolving complex 23 protein id: At2g30790.1 [Arabidopsis thaliana]
MAYSACFLHQSALASSAARSSSSSSSQRHVSLSKPVQIICKAQAGDKRWFKGARKFVESAATSFSVA

SEQ ID NO: 74291 - protein, 58 aa, Arabidopsis thaliana; identical to SEQ ID NO: 29639
  peptide (1)..(58): Ceres Seq. ID no. 5002223

SEQ ID NO: 74292 - DNA, 1216 bp, Arabidopsis thaliana
  misc_feature (1)..(1216): Ceres Seq. ID no. 5002258
  misc_feature: MA Experiment ID: 20000087 Result: Up-regulated in Transcription
  misc_feature: MA Experiment 20000087 PARAMETER Experiment Name: At_100uM_ABA_Mutants_cDNA_P Parameter: Plant Line Value: WS
  misc_feature: MA Experiment 20000087 PARAMETER Experiment Name: At_100uM_ABA_Mutants_cDNA_P Parameter: Timepoint (hr) Value: 6
  misc_feature: MA Experiment 20000087 PARAMETER Experiment Name: At_100uM_ABA_Mutants_cDNA_P Parameter: Tissue Value: Aerial
  misc_feature: MA Experiment 20000087 PARAMETER Experiment Name: At_100uM_ABA_Mutants_cDNA_P Parameter: Treatment Value: 100uM ABA vs. No Treatment
  misc_feature: MA Experiment ID: 20000173 Result: Down-regulated in Transcription
  misc_feature: MA Experiment 20000173 PARAMETER Experiment Name: At_42deg_Heat_P Parameter: Age (day) Value: 14
  misc_feature: MA Experiment 20000173 PARAMETER Experiment Name: At_42deg_Heat_P Parameter: Organism Value: A. thaliana
  misc_feature: MA Experiment 20000173 PARAMETER Experiment Name: At_42deg_Heat_P Parameter: Plant Line Value: WS
  misc_feature: MA Experiment 20000173 PARAMETER Experiment Name: At_42deg_Heat_P Parameter: Temperature (deg C) Value: 42 vs. 22
  misc_feature: MA Experiment 20000173 PARAMETER Experiment Name: At_42deg_Heat_P Parameter: Timepoint (hr) Value: 6
  misc_feature: MA Experiment 20000173 PARAMETER Experiment Name: At_42deg_Heat_P Parameter: Tissue Value: Aerial
  misc_feature: MA Experiment ID: 20000185 Result: Down-regulated in Transcription
  misc_feature: MA Experiment 20000185 PARAMETER Experiment Name: At_Roots__P Parameter: Age (day) Value: 7 vs. 21
  misc_feature: MA Experiment 20000185 PARAMETER Experiment Name: At_Roots__P Parameter: Organism Value: A. thaliana
  misc_feature: MA Experiment 20000185 PARAMETER Experiment Name: At_Roots__P Parameter: Tissue Value: Roots vs. Whole Plant
  misc_feature: MA Experiment ID: 20000234 Result: Down-regulated in Transcription
  misc_feature: MA Experiment 20000234 PARAMETER Experiment Name: At_Siliques_P Parameter: Age (day) Value: 21
  misc_feature: MA Experiment 20000234 PARAMETER Experiment Name: At_Siliques_P Parameter: Organism Value: A. thaliana
  misc_feature: MA Experiment 20000234 PARAMETER Experiment Name: At_Siliques_P Parameter: Plant Line Value: WS
  misc_feature: MA Experiment 20000234 PARAMETER Experiment Name: At_Siliques_P Parameter: Tissue Value: Less Than 5mm Siliques vs. Whole Plant
  misc_feature: MA Experiment ID: 20000264 Result: Up-regulated in Transcription
  misc_feature: MA Experiment 20000264 PARAMETER Experiment Name: At_Open_Flower_P Parameter: Age (day) Value: 21
  misc_feature: MA Experiment 20000264 PARAMETER Experiment Name: At_Open_Flower_P Parameter: Plant Line Value: WS
  misc_feature: MA Experiment 20000264 PARAMETER Experiment Name: At_Open_Flower_P Parameter: Tissue Value: Open Flower vs. Whole Plant
  misc_feature: MA Experiment ID: 20000265 Result: Up-regulated in Transcription
  misc_feature: MA Experiment 20000265 PARAMETER Experiment Name: At_Open_Flower_P Parameter: Age (day) Value: 21
  misc_feature: MA Experiment 20000265 PARAMETER Experiment Name: At_Open_Flower_P Parameter: Plant Line Value: WS
  misc_feature: MA Experiment 20000265 PARAMETER Experiment Name: At_Open_Flower_P Parameter: Tissue Value: Closed Flower vs. Whole Plant
  misc_feature: MA Experiment ID: 20000286 Result: Up-regulated in Transcription
  misc_feature: MA Experiment 20000286 PARAMETER Experiment Name: At_Open_Flower_P Parameter: Age (day) Value: 21
  misc_feature: MA Experiment 20000286 PARAMETER Experiment Name: At_Open_Flower_P Parameter: Plant Line Value: WS
  misc_feature: MA Experiment 20000286 PARAMETER Experiment Name: At_Open_Flower_P Parameter: Tissue Value: Half Open vs. Whole Plant
  misc_feature: MA Experiment ID: 20000439 Result: Down-regulated in Transcription
  misc_feature: MA Experiment 20000439 PARAMETER Experiment Name: At_Roots__P Parameter: Age (day) Value: 14 vs. 21
  misc_feature: MA Experiment 20000439 PARAMETER Experiment Name: At_Roots__P Parameter: Organism Value: A. thaliana
  misc_feature: MA Experiment 20000439 PARAMETER Experiment Name: At_Roots__P Parameter: Tissue Value: Roots vs. Whole Plant
  misc_feature: MA Experiment ID: 20000794 Result: Up-regulated in Transcription
  misc_feature: MA Experiment 20000794 PARAMETER Experiment Name: At_Petals_P Parameter: Age (day) Value: 23-25 days
  misc_feature: MA Experiment 20000794 PARAMETER Experiment Name: At_Petals_P Parameter: Plant Line Value: WS
  misc_feature: MA Experiment 20000794 PARAMETER Experiment Name: At_Petals_P Parameter: Tissue Value: Petals vs. Whole plant
  misc_feature: MA Experiment ID: 20001248 Result: Up-regulated in Transcription
  misc_feature: MA Experiment 20001248 PARAMETER Experiment Name: At_Far-red-induction_P Parameter: Age (day) Value: 7
  misc_feature: MA Experiment 20001248 PARAMETER Experiment Name: At_Far-red-induction_P Parameter: Light Value: Far-red vs. White
  misc_feature: MA Experiment 20001248 PARAMETER Experiment Name: At_Far-red-induction_P Parameter: Organism Value: A. thaliana
  misc_feature: MA Experiment 20001248 PARAMETER Experiment Name: At_Far-red-induction_P Parameter: Plant Line Value: Columbia
  misc_feature: MA Experiment 20001248 PARAMETER Experiment Name: At_Far-red-induction_P Parameter: Timepoint (hr) Value: 4
  misc_feature: MA Experiment 20001248 PARAMETER Experiment Name: At_Far-red-induction_P Parameter: Tissue Value: Whole Plant
  misc_feature: MA Experiment ID: 20001450 Result: Up-regulated in Transcription
  misc_feature: MA Experiment 20001450 PARAMETER Experiment Name: At_Far-red-induction_P Parameter: Age (day) Value: 7
  misc_feature: MA Experiment 20001450 PARAMETER Experiment Name: At_Far-red-induction_P Parameter: Light Value: Far-red vs. White
  misc_feature: MA Experiment 20001450 PARAMETER Experiment Name: At_Far-red-induction_P Parameter: Organism Value: A. thaliana
  misc_feature: MA Experiment 20001450 PARAMETER Experiment Name: At_Far-red-induction_P Parameter: Plant Line Value: Columbia
  misc_feature: MA Experiment 20001450 PARAMETER Experiment Name: At_Far-red-induction_P Parameter: Timepoint (hr) Value: 8
  misc_feature: MA Experiment 20001450 PARAMETER Experiment Name: At_Far-red-induction_P Parameter: Tissue Value: Whole Plant
  misc_feature: MA Experiment ID: 20001557 Result: Up-regulated in Transcription
  misc_feature: MA Experiment 20001557 PARAMETER Experiment Name: At_Drought_Soil_Dry_P Parameter: Age (day) Value: 27
  misc_feature: MA Experiment 20001557 PARAMETER Experiment Name: At_Drought_Soil_Dry_P Parameter: Organism Value: A. thaliana
  misc_feature: MA Experiment 20001557 PARAMETER Experiment Name: At_Drought_Soil_Dry_P Parameter: Plant Line Value: WS
  misc_feature: MA Experiment 20001557 PARAMETER Experiment Name: At_Drought_Soil_Dry_P Parameter: Post Timepoint (hr) Value: 3
  misc_feature: MA Experiment 20001557 PARAMETER Experiment Name: At_Drought_Soil_Dry_P Parameter: Post-Treatment Value: Re-Water vs. No Drought
  misc_feature: MA Experiment 20001557 PARAMETER Experiment Name: At_Drought_Soil_Dry_P Parameter: Timepoint (day) Value: 13
  misc_feature: MA Experiment 20001557 PARAMETER Experiment Name: At_Drought_Soil_Dry_P Parameter: Treatment Value: Drought vs. No Drought
  misc_feature: MA Experiment ID: 20001911 Result: Down-regulated in Transcription
  misc_feature: MA Experiment 20001911 PARAMETER Experiment Name: At_Drought_Reproduction_P Parameter: Age (day) Value: 40
  misc_feature: MA Experiment 20001911 PARAMETER Experiment Name: At_Drought_Reproduction_P Parameter: Organism Value: A. thaliana
  misc_feature: MA Experiment 20001911 PARAMETER Experiment Name: At_Drought_Reproduction_P Parameter: Plant Line Value: WS
  misc_feature: MA Experiment 20001911 PARAMETER Experiment Name: At_Drought_Reproduction_P Parameter: Timepoint (day) Value: 10
  misc_feature: MA Experiment 20001911 PARAMETER Experiment Name: At_Drought_Reproduction_P Parameter: Tissue Value: Flowers
  misc_feature: MA Experiment 20001911 PARAMETER Experiment Name: At_Drought_Reproduction_P Parameter: Treatment Value: Drought vs. No Drought
  misc_feature: Pfam Name: Aminotran_4 Pfam Description: Aminotransferase class IV
atataagaaaataggcttcaataggcaaaatattcttcctgtgatgcagtgaggatgaagaatatgctgatgtagattgggacaaccttggattcagtcttgtacggacagatttcatgttcgccaccaaaagttgcagagacggaaacttcgaacagggttaccttagccgttacggcaacatcgagctcaaccctgctgctggaattctcaactatggccagggactaatagaggggatgaaagcgtacagaggagaagacggtagggttcttctcttccgtccagagctaaacgcgatgcgtatgaagataggagctgagagaatgtgtatgcattctccttctgttcatcagtttattgaaggtgttaagcagaccgttcttgcaaacaggcgttgggttcctcctccgggcaaaggctcgttgtatctcagaccgttgttgttcggaagtggagcaagcttgggtgtggctgcagcatcagagtacacgtttcttgtgtttggctctcctgttcaaaactacttcaaggaaggcacagcggcgttgaacctgtatgtggaggaggtgattccacgcgcttatcttggaggaactggtggtgtaaaggcaatatccaattacggtccagtgcttgaagtgatgagaagagcaaaatcaagagggttttcggatgttttgtatcttgatgcagatactgggaagaacatagaagaagtctctgctgctaatatattccttgtgaagggcaatacaatagtgacaccagctacgagcggaacgattctcggagggatcacacgtaagagcataatcgaaatcgcccttgatcttggttacaaagtggaagaacgaagtgttccggtagaagaactgaaggaagctgaagaagttttctgcactggaactgccgctggagttgcttctgttggaagcatcacttttaagaacacaaggactgagtacaaagttggagatgggattgttacacagcaacttcgatctattcttgtcggaatacaaactggttctatccaagacactaaagattgggttttgcagattgcctaagttactttcatatcctataaataatgttgcactctcttgatcacccatcaaaagcttttgaaatagtttttggtaaatttgtgacataaatttgtgatatatcaccacatcgtattagtattaaacatttgtttcactcttcc

SEQ ID NO: 74293 - protein, 318 aa, Arabidopsis thaliana; identical to SEQ ID NO: 23289
  peptide (1)..(318): Ceres Seq. ID no. 5002259
  misc_feature: Pfam Name: Aminotran_4 Pfam Description: Aminotransferase class IV
  misc_feature (1)..(318): Homolog of NCBI NO: 30681524 NR Description: branched-chain amino acid aminotransferase
  misc_feature (1)..(230): Homolog of NCBI NO: 18391105 NR Description: expressed protein; protein id: At1g10060.1, by cDNA: gi_15450873 [Arabidopsis thaliana]
  misc_feature (1)..(317): Homolog of NCBI NO: 14280354 NR Description: branched-chain amino acid aminotransferase
  misc_feature (1)..(317): Homolog of NCBI NO: 15218409 NR Description: tat-binding protein, putative; protein id: supported by cDNA: gi_13877744, supported by cDNA: gi_15293208
  misc_feature (1)..(317): Homolog of NCBI NO: 6319167 NR Description: branched-chain amino acid aminotransferase
  misc_feature (1)..(317): Homolog of NCBI NO: 7450517 NR Description: branched-chain amino acid aminotransferase
  misc_feature (1)..(317): Homolog of NCBI NO: 34902362 NR Description: Putative aminotransferase [Oryza sativa (japonica group)] >gi|24418036|gb|AAN60486.1| Putative aminotransferase
  misc_feature (1)..(318): Homolog of NCBI NO: 26391655 NR Description: Branched-chain amino acid aminotransferase 5,
  misc_feature (1)..(317): Homolog of NCBI NO: 15222881 NR Description: branched-chain amino acid aminotransferase, protein id: At1g50090.1 [Arabidopsis thaliana]
  misc_feature (1)..(317): Homolog of NCBI NO: 6319165 NR Description: branched-chain amino acid aminotransferase

SEQ ID NO: 74294 - protein, 277 aa, Arabidopsis thaliana; identical to SEQ ID NO: 23290
  peptide (1)..(277): Ceres Seq. ID no. 5002260
  misc_feature: Pfam Name: Aminotran_4 Pfam Description: Aminotransferase class IV
  misc_feature (1)..(277): Homolog of NCBI NO: 30681524 NR Description: branched-chain amino acid aminotransferase
  misc_feature (1)..(189): Homolog of NCBI NO: 18391105 NR Description: expressed protein; protein id: At1g10060.1, by cDNA: gi_15450873 [Arabidopsis thaliana]
  misc_feature (1)..(276): Homolog of NCBI NO: 14280354 NR Description: branched-chain amino acid aminotransferase
  misc_feature (1)..(276): Homolog of NCBI NO: 15218409 NR Description: tat-binding protein, putative; protein id: supported by cDNA: gi_13877744, supported by cDNA: gi_15293208
  misc_feature (1)..(276): Homolog of NCBI NO: 6319167 NR Description: branched-chain amino acid aminotransferase
  misc_feature (1)..(276): Homolog of NCBI NO: 7450517 NR Description: branched-chain amino acid aminotransferase
  misc_feature (1)..(276): Homolog of NCBI NO: 34902362 NR Description: Putative aminotransferase [Oryza sativa (japonica group)] >gi|24418036|gb|AAN60486.1| Putative aminotransferase
  misc_feature (1)..(277): Homolog of NCBI NO: 26391655 NR Description: Branched-chain amino acid aminotransferase 5,
  misc_feature (1)..(276): Homolog of NCBI NO: 15222881 NR Description: branched-chain amino acid aminotransferase, protein id: At1g50090.1 [Arabidopsis thaliana]
  misc_feature (1)..(276): Homolog of NCBI NO: 6319165 NR Description: branched-chain amino acid aminotransferase

SEQ ID NO: 74295 - protein, 257 aa, Arabidopsis thaliana; identical to SEQ ID NO: 23291
  peptide (1)..(257): Ceres Seq. ID no. 5002261
  misc_feature: Pfam Name: Aminotran_4 Pfam Description: Aminotransferase class IV
  misc_feature (1)..(257): Homolog of NCBI NO: 30681524 NR Description: branched-chain amino acid aminotransferase
  misc_feature (1)..(169): Homolog of NCBI NO: 18391105 NR Description: expressed protein; protein id: At1g10060.1, by cDNA: gi_15450873 [Arabidopsis thaliana]
  misc_feature (1)..(256): Homolog of NCBI NO: 14280354 NR Description: branched-chain amino acid aminotransferase
  misc_feature (1)..(256): Homolog of NCBI NO: 15218409 NR Description: tat-binding protein, putative; protein id: supported by cDNA: gi_13877744, supported by cDNA: gi_15293208
  misc_feature (1)..(256): Homolog of NCBI NO: 6319167 NR Description: branched-chain amino acid aminotransferase
  misc_feature (1)..(256): Homolog of NCBI NO: 7450517 NR Description: branched-chain amino acid aminotransferase
  misc_feature (1)..(256): Homolog of NCBI NO: 34902362 NR Description: Putative aminotransferase [Oryza sativa (japonica group)] >gi|24418036|gb|AAN60486.1| Putative aminotransferase
  misc_feature (1)..(257): Homolog of NCBI NO: 26391655 NR Description: Branched-chain amino acid aminotransferase 5,
  misc_feature (1)..(256): Homolog of NCBI NO: 15222881 NR Description: branched-chain amino acid aminotransferase, protein id: At1g50090.1 [Arabidopsis thaliana]
  misc_feature (1)..(256): Homolog of NCBI NO: 6319165 NR Description: branched-chain amino acid aminotransferase

SEQ ID NO: 74296 - DNA, 1272 bp, Arabidopsis thaliana
  misc_feature (1)..(1272): Ceres Seq. ID no. 5002281
  misc_feature: MA Experiment ID: 108434 Result: Down-regulated in Transcription
  misc_feature: MA Experiment 108434 PARAMETER Experiment Name: At_Root_Tips_cDNA_P Parameter: Tissue Value: Root Tips
  misc_feature: MA Experiment ID: 108462 Result: Up-regulated in Transcription
  misc_feature: MA Experiment 108462 PARAMETER Experiment Name: At_Germinating_Seeds_cDNA_P Parameter: Age (day) Value: 2 vs. 0
  misc_feature: MA Experiment 108462 PARAMETER Experiment Name: At_Germinating_Seeds_cDNA_P Parameter: Tissue Value: Germinating Seeds
  misc_feature: MA Experiment ID: 108463 Result: Up-regulated in Transcription
  misc_feature: MA Experiment 108463 PARAMETER Experiment Name: At_Germinating_Seeds_cDNA_P Parameter: Age (day) Value: 3 vs. 0
  misc_feature: MA Experiment 108463 PARAMETER Experiment Name: At_Germinating_Seeds_cDNA_P Parameter: Tissue Value: Germinating Seeds
  misc_feature: MA Experiment ID: 108464 Result: Up-regulated in Transcription
  misc_feature: MA Experiment 108464 PARAMETER Experiment Name: At_Germinating_Seeds_cDNA_P Parameter: Age (day) Value: 4 vs. 0
  misc_feature: MA Experiment 108464 PARAMETER Experiment Name: At_Germinating_Seeds_cDNA_P Parameter: Tissue Value: Germinating Seeds
  misc_feature: MA Experiment ID: 108573 Result: Up-regulated in Transcription
  misc_feature: MA Experiment 108573 PARAMETER Experiment Name: At_Drought_cDNA_P Parameter: Timepoint (hr) Value: 6
  misc_feature: MA Experiment 108573 PARAMETER Experiment Name: At_Drought_cDNA_P Parameter: Tissue Value: Aerial
  misc_feature: MA Experiment 108573 PARAMETER Experiment Name: At_Drought_cDNA_P Parameter: Treatment Value: Drought vs. No Drought
  misc_feature: MA Experiment ID: 108579 Result: Down-regulated in Transcription
  misc_feature: MA Experiment 108579 PARAMETER Experiment Name: At_4deg_Cold_cDNA_P Parameter: Temperature (deg C) Value: 4 vs. 22
  misc_feature: MA Experiment 108579 PARAMETER Experiment Name: At_4deg_Cold_cDNA_P Parameter: Timepoint (hr) Value: 6
  misc_feature: MA Experiment 108579 PARAMETER Experiment Name: At_4deg_Cold_cDNA_P Parameter: Tissue Value: Aerial
  misc_feature: MA Experiment ID: 108595 Result: Down-regulated in Transcription
  misc_feature: MA Experiment 108595 PARAMETER Experiment Name: At_Ler-pi_Ovule_cDNA_P Parameter: Plant Line Value: null
  misc_feature: MA Experiment ID: 20000214 Result: Down-regulated in Transcription
  misc_feature: MA Experiment 20000214 PARAMETER Experiment Name: At_4deg_Cold_P Parameter: Timepoint (hr) Value: 6
  misc_feature: MA Experiment ID: 20000224 Result: Down-regulated in Transcription
  misc_feature: MA Experiment ID: 20000234 Result: Down-regulated in Transcription
  misc_feature: MA Experiment 20000234 PARAMETER Experiment Name: At_Siliques_P Parameter: Age (day) Value: 21
  misc_feature: MA Experiment 20000234 PARAMETER Experiment Name: At_Siliques_P Parameter: Organism Value: A. thaliana
  misc_feature: MA Experiment 20000234 PARAMETER Experiment Name: At_Siliques_P Parameter: Plant Line Value: WS
  misc_feature: MA Experiment 20000234 PARAMETER Experiment Name: At_Siliques_P Parameter: Tissue Value: Less Than 5mm Siliques vs. Whole Plant
  misc_feature: MA Experiment ID: 20000264 Result: Down-regulated in Transcription
  misc_feature: MA Experiment 20000264 PARAMETER Experiment Name: At_Open_Flower_P Parameter: Age (day) Value: 21
  misc_feature: MA Experiment 20000264 PARAMETER Experiment Name: At_Open_Flower_P Parameter: Plant Line Value: WS
  misc_feature: MA Experiment 20000264 PARAMETER Experiment Name: At_Open_Flower_P Parameter: Tissue Value: Open Flower vs. Whole Plant
  misc_feature: MA Experiment ID: 20000265 Result: Down-regulated in Transcription
  misc_feature: MA Experiment 20000265 PARAMETER Experiment Name: At_Open_Flower_P Parameter: Age (day) Value: 21
  misc_feature: MA Experiment 20000265 PARAMETER Experiment Name: At_Open_Flower_P Parameter: Plant Line Value: WS
  misc_feature: MA Experiment 20000265 PARAMETER Experiment Name: At_Open_Flower_P Parameter: Tissue Value: Closed Flower vs. Whole Plant
  misc_feature: MA Experiment ID: 20000286 Result: Down-regulated in Transcription
  misc_feature: MA Experiment 20000286 PARAMETER Experiment Name: At_Open_Flower_P Parameter: Age (day) Value: 21
  misc_feature: MA Experiment 20000286 PARAMETER Experiment Name: At_Open_Flower_P Parameter: Plant Line Value: WS
  misc_feature: MA Experiment 20000286 PARAMETER Experiment Name: At_Open_Flower_P Parameter: Tissue Value: Half Open vs. Whole Plant
  misc_feature: MA Experiment ID: 20001557 Result: Down-regulated in Transcription
  misc_feature: MA Experiment 20001557 PARAMETER Experiment Name: At_Drought_Soil_Dry_P Parameter: Age (day) Value: 27
  misc_feature: MA Experiment 20001557 PARAMETER Experiment Name: At_Drought_Soil_Dry_P Parameter: Organism Value: A. thaliana
  misc_feature: MA Experiment 20001557 PARAMETER Experiment Name: At_Drought_Soil_Dry_P Parameter: Plant Line Value: WS
  misc_feature: MA Experiment 20001557 PARAMETER Experiment Name: At_Drought_Soil_Dry_P Parameter: Post Timepoint (hr) Value: 3
  misc_feature: MA Experiment 20001557 PARAMETER Experiment Name: At_Drought_Soil_Dry_P Parameter: Post-Treatment Value: Re-Water vs. No Drought
  misc_feature: MA Experiment 20001557 PARAMETER Experiment Name: At_Drought_Soil_Dry_P Parameter: Timepoint (day) Value: 13
  misc_feature: MA Experiment 20001557 PARAMETER Experiment Name: At_Drought_Soil_Dry_P Parameter: Treatment Value: Drought vs. No Drought
  misc_feature: MA Experiment ID: 20001559 Result: Down-regulated in Transcription
  misc_feature: MA Experiment 20001559 PARAMETER Experiment Name: At_Drought_Soil_Dry_P Parameter: Age (day) Value: 28
  misc_feature: MA Experiment 20001559 PARAMETER Experiment Name: At_Drought_Soil_Dry_P Parameter: Organism Value: A. thaliana
  misc_feature: MA Experiment 20001559 PARAMETER Experiment Name: At_Drought_Soil_Dry_P Parameter: Plant Line Value: WS
  misc_feature: MA Experiment 20001559 PARAMETER Experiment Name: At_Drought_Soil_Dry_P Parameter: Post Timepoint (hr) Value: 29
  misc_feature: MA Experiment 20001559 PARAMETER Experiment Name: At_Drought_Soil_Dry_P Parameter: Post-Treatment Value: Re-Water vs. No Drought
  misc_feature: MA Experiment 20001559 PARAMETER Experiment Name: At_Drought_Soil_Dry_P Parameter: Timepoint (day) Value: 14
  misc_feature: MA Experiment 20001559 PARAMETER Experiment Name: At_Drought_Soil_Dry_P Parameter: Treatment Value: Drought vs. No Drought
  misc_feature: MA Experiment ID: 20001560 Result: Down-regulated in Transcription
  misc_feature: MA Experiment 20001560 PARAMETER Experiment Name: At_Drought_Soil_Dry_P Parameter: Age (day) Value: 28
  misc_feature: MA Experiment 20001560 PARAMETER Experiment Name: At_Drought_Soil_Dry_P Parameter: Organism Value: A. thaliana
  misc_feature: MA Experiment 20001560 PARAMETER Experiment Name: At_Drought_Soil_Dry_P Parameter: Plant Line Value: WS
  misc_feature: MA Experiment 20001560 PARAMETER Experiment Name: At_Drought_Soil_Dry_P Parameter: Post Timepoint (hr) Value: None
  misc_feature: MA Experiment 20001560 PARAMETER Experiment Name: At_Drought_Soil_Dry_P Parameter: Post-Treatment Value: None
  misc_feature: MA Experiment 20001560 PARAMETER Experiment Name: At_Drought_Soil_Dry_P Parameter: Timepoint (day) Value: 14
  misc_feature: MA Experiment 20001560 PARAMETER Experiment Name: At_Drought_Soil_Dry_P Parameter: Treatment Value: Drought vs. No Drought
agataagagcgaaacaaattacaaaattgaattacacaataatgtcctctaagcgacgactaccggtgaaatattttataagaaaacaaaaacaataattaacaaacaaaggcgacacctttagattcgacaagacgaccattttagaaaaagcttctcaaattctctccttatccccaaaaattcaaacttttttctctttggaaaattctgaggcaaaaatgcggcgtaattgctgccatgtttcatttgcttcaaccctcaagatccttaattttgtccaagctttcattggtgtttcgatcattatctactccatatggatgctccatgaatacagccgtcaccttcccgtggacccgcctccgtcagcttcatcaagctccggaaccgagatcgctactagtgtatctgagcccttgaagaatcctattgattttgtggcgagtatcattctcgggtctaatggtggtgatcatgggtttaacctacgctcgttggaccttcctgctccatggttcatctactctttcatggcggttggtatattggtctgcattgttaccttcattggtttcatagcagctgaagcaatcaatggctgttgcttgtgtttttactctattctcaaaactctgctcattctacttgaagctgcacttgttgcatacatcgctattgaccgtcactgggaaaaggatcttccgtatgatccaactggagaacttagtagtcttagggctttcattgaagaaaacatcgatatatgcaaatgggtggggattgctgtggtagcagtccagctactgtcattgctactagccatggttctcagagcgatggtttcaaccccgaaacccgaacttgacgaagaggaagatgatgagaacccaaggagtagaacttgggacccacttcttggtccgcaaggaaaccaagcgcctgctggctcaagcaagattgaaaactggagctcccgaatcagagaaaagtatggtttgaaccagagtccaccggtgaacccgaaaggttgatgaagccaaataatcatgtttctaaaactgcatgtgtccatatggtctctgtgaagctctctttctctatgttttgctctttgcaacttctcgagtgtgcataaacatttactcaaaacagtgctgtattgtgtttacacaaacggcataagcatcttcgtttgtgtgtttgcttgtacaaacaatcctgtgaacagtttgaagttagcatttccactataacgtttcgattcaattt

SEQ ID NO: 74297 - protein, 270 aa, Arabidopsis thaliana; identical to SEQ ID NO: 27674
  peptide (1)..(270): Ceres Seq. ID no. 5002282
  misc_feature (14)..(194): Pfam Name: Tetraspanin family Pfam Description: Tetraspanin family
  misc_feature (1)..(270): Homolog of NCBI NO: 18399283 NR Description: expressed protein; protein id: At2g20230.1, by cDNA: 6967., supported by cDNA: gi_15450979 [Arabidopsis >gi|15450980|gb|AAK96761.1| Unknown protein [Arabidopsis
  misc_feature (35)..(270): Homolog of NCBI NO: 25360978 NR Description: hypothetical protein At2g20230 [imported] - thaliana >gi|17978753|gb|AAL47370.1| unknown protein [Arabidopsis
  misc_feature (1)..(268): Homolog of NCBI NO: 15235419 NR Description: putative protein; protein id: At4g28770.1, by cDNA: 1968. [Arabidopsis thaliana] >gi|7485528|pir||T04522
  misc_feature (94)..(222): Homolog of NCBI NO: 30681117 NR Description: expressed protein [Arabidopsis thaliana] At2g20740/F5H14.29 [Arabidopsis thaliana] At2g20740/F5H14.29 [Arabidopsis thaliana]
  misc_feature (6)..(268): Homolog of NCBI NO: 18398417 NR Description: expressed protein; protein id: At1g32400.1, by cDNA: 7849., supported by cDNA: gi_12248018, supported by gi_14326468 [Arabidopsis thaliana]
  misc_feature (95)..(257): Homolog of NCBI NO: 32487399 NR Description: OSJNBb0017I01.13 [Oryza sativa (japonica
  misc_feature (142)..(222): Homolog of NCBI NO: 25411991 NR Description: hypothetical protein At2g20740 [imported] - thaliana >gi|4454474|gb|AAD20921.1| hypothetical protein

SEQ ID NO: 74298 - protein, 236 aa, Arabidopsis thaliana; identical to SEQ ID NO: 27675
  peptide (1)..(236): Ceres Seq. ID no. 5002283
  misc_feature (1)..(160): Pfam Name: Tetraspanin family Pfam Description: Tetraspanin family
  misc_feature (1)..(236): Homolog of NCBI NO: 18399283 NR Description: expressed protein; protein id: At2g20230.1, by cDNA: 6967., supported by cDNA: gi_15450979 [Arabidopsis >gi|15450980|gb|AAK96761.1| Unknown protein [Arabidopsis
  misc_feature (1)..(236): Homolog of NCBI NO: 25360978 NR Description: hypothetical protein At2g20230 [imported] - thaliana >gi|17978753|gb|AAL47370.1| unknown protein [Arabidopsis
  misc_feature (1)..(234): Homolog of NCBI NO: 15235419 NR Description: putative protein; protein id: At4g28770.1, by cDNA: 1968. [Arabidopsis thaliana] >gi|7485528|pir||T04522
  misc_feature (60)..(188): Homolog of NCBI NO: 30681117 NR Description: expressed protein [Arabidopsis thaliana] At2g20740/F5H14.29 [Arabidopsis thaliana] At2g20740/F5H14.29 [Arabidopsis thaliana]
  misc_feature (1)..(234): Homolog of NCBI NO: 18398417 NR Description: expressed protein; protein id: At1g32400.1, by cDNA: 7849., supported by cDNA: gi_12248018, supported by gi_14326468 [Arabidopsis thaliana]
  misc_feature (61)..(223): Homolog of NCBI NO: 32487399 NR Description: OSJNBb0017I01.13 [Oryza sativa (japonica
  misc_feature (108)..(188): Homolog of NCBI NO: 25411991 NR Description: hypothetical protein At2g20740 [imported] - thaliana >gi|4454474|gb|AAD20921.1| hypothetical protein

SEQ ID NO: 74299 - protein, 166 aa, Arabidopsis thaliana; identical to SEQ ID NO: 27676
  peptide (1)..(166): Ceres Seq. ID no. 5002284
  misc_feature (1)..(90): Pfam Name: Tetraspanin family Pfam Description: Tetraspanin family
  misc_feature (1)..(166): Homolog of NCBI NO: 18399283 NR Description: expressed protein; protein id: At2g20230.1, by cDNA: 6967., supported by cDNA: gi_15450979 [Arabidopsis >gi|15450980|gb|AAK96761.1| Unknown protein [Arabidopsis
  misc_feature (1)..(166): Homolog of NCBI NO: 25360978 NR Description: hypothetical protein At2g20230 [imported] - thaliana >gi|17978753|gb|AAL47370.1| unknown protein [Arabidopsis
  misc_feature (1)..(164): Homolog of NCBI NO: 15235419 NR Description: putative protein; protein id: At4g28770.1, by cDNA: 1968. [Arabidopsis thaliana] >gi|7485528|pir||T04522
  misc_feature (1)..(118): Homolog of NCBI NO: 30681117 NR Description: expressed protein [Arabidopsis thaliana] At2g20740/F5H14.29 [Arabidopsis thaliana] At2g20740/F5H14.29 [Arabidopsis thaliana]
  misc_feature (1)..(164): Homolog of NCBI NO: 18398417 NR Description: expressed protein; protein id: At1g32400.1, by cDNA: 7849., supported by cDNA: gi_12248018, supported by gi_14326468 [Arabidopsis thaliana]
  misc_feature (1)..(153): Homolog of NCBI NO: 32487399 NR Description: OSJNBb0017I01.13 [Oryza sativa (japonica
  misc_feature (38)..(118): Homolog of NCBI NO: 25411991 NR Description: hypothetical protein At2g20740 [imported] - thaliana >gi|4454474|gb|AAD20921.1| hypothetical protein

SEQ ID NO: 74300 - DNA, 1453 bp, Arabidopsis thaliana
  misc_feature (1)..(1453): Ceres Seq. ID no. 5002479
  misc_feature: MA Experiment ID: 108434 Result: Up-regulated in Transcription
  misc_feature: MA Experiment 108434 PARAMETER Experiment Name: At_Root_Tips_cDNA_P Parameter: Tissue Value: Root Tips
  misc_feature: MA Experiment ID: 108561 Result: Down-regulated in Transcription
  misc_feature: MA Experiment 108561 PARAMETER Experiment Name: At_100uM_ABA_cDNA_P Parameter: Timepoint (hr) Value: 6
  misc_feature: MA Experiment 108561 PARAMETER Experiment Name: At_100uM_ABA_cDNA_P Parameter: Tissue Value: Aerial
  misc_feature: MA Experiment 108561 PARAMETER Experiment Name: At_100uM_ABA_cDNA_P Parameter: Treatment Value: 100uM ABA vs. No Treatment
  misc_feature: MA Experiment ID: 108595 Result: Up-regulated in Transcription
  misc_feature: MA Experiment 108595 PARAMETER Experiment Name: At_Ler-pi_Ovule_cDNA_P Parameter: Plant Line Value: null
  misc_feature: MA Experiment ID: 20000069 Result: Down-regulated in Transcription
  misc_feature: MA Experiment 20000069 PARAMETER Experiment Name: At_100uM_ABA_Mutants_cDNA_P Parameter: Plant Line Value: CS23
  misc_feature: MA Experiment 20000069 PARAMETER Experiment Name: At_100uM_ABA_Mutants_cDNA_P Parameter: Timepoint (hr) Value: 6
  misc_feature: MA Experiment 20000069 PARAMETER Experiment Name: At_100uM_ABA_Mutants_cDNA_P Parameter: Tissue Value: Aerial
  misc_feature: MA Experiment 20000069 PARAMETER Experiment Name: At_100uM_ABA_Mutants_cDNA_P Parameter: Treatment Value: 100uM ABA vs. No Treatment
  misc_feature: MA Experiment ID: 20000071 Result: Down-regulated in Transcription
  misc_feature: MA Experiment 20000071 PARAMETER Experiment Name: At_100uM_ABA_Mutants_cDNA_P Parameter: Plant Line Value: CS8104
  misc_feature: MA Experiment 20000071 PARAMETER Experiment Name: At_100uM_ABA_Mutants_cDNA_P Parameter: Timepoint (hr) Value: 6
  misc_feature: MA Experiment 20000071 PARAMETER Experiment Name: At_100uM_ABA_Mutants_cDNA_P Parameter: Tissue Value: Aerial
  misc_feature: MA Experiment 20000071 PARAMETER Experiment Name: At_100uM_ABA_Mutants_cDNA_P Parameter: Treatment Value: 100uM ABA vs. No Treatment
  misc_feature: MA Experiment ID: 20000072 Result: Down-regulated in Transcription
  misc_feature: MA Experiment 20000072 PARAMETER Experiment Name: At_100uM_ABA_Mutants_cDNA_P Parameter: Plant Line Value: CS8105
  misc_feature: MA Experiment 20000072 PARAMETER Experiment Name: At_100uM_ABA_Mutants_cDNA_P Parameter: Timepoint (hr) Value: 6
  misc_feature: MA Experiment 20000072 PARAMETER Experiment Name: At_100uM_ABA_Mutants_cDNA_P Parameter: Tissue Value: Aerial
  misc_feature: MA Experiment 20000072 PARAMETER Experiment Name: At_100uM_ABA_Mutants_cDNA_P Parameter: Treatment Value: 100uM ABA vs. No Treatment
  misc_feature: MA Experiment ID: 20000087 Result: Down-regulated in Transcription
  misc_feature: MA Experiment 20000087 PARAMETER Experiment Name: At_100uM_ABA_Mutants_cDNA_P Parameter: Plant Line Value: WS
  misc_feature: MA Experiment 20000087 PARAMETER Experiment Name: At_100uM_ABA_Mutants_cDNA_P Parameter: Timepoint (hr) Value: 6
  misc_feature: MA Experiment 20000087 PARAMETER Experiment Name: At_100uM_ABA_Mutants_cDNA_P Parameter: Tissue Value: Aerial
  misc_feature: MA Experiment 20000087 PARAMETER Experiment Name: At_100uM_ABA_Mutants_cDNA_P Parameter: Treatment Value: 100uM ABA vs. No Treatment
  misc_feature: MA Experiment ID: 20000089 Result: Down-regulated in Transcription
  misc_feature: MA Experiment ID: 20000090 Result: Down-regulated in Transcription
  misc_feature: MA Experiment ID: 20000113 Result: Down-regulated in Transcription
  misc_feature: MA Experiment 20000113 PARAMETER Experiment Name: At_42deg_Heat_cDNA_P Parameter: Temperature (deg C) Value: 42 vs. 22
  misc_feature: MA Experiment 20000113 PARAMETER Experiment Name: At_42deg_Heat_cDNA_P Parameter: Timepoint (hr) Value: 8
  misc_feature: MA Experiment 20000113 PARAMETER Experiment Name: At_42deg_Heat_cDNA_P Parameter: Tissue Value: Aerial
  misc_feature: MA Experiment ID: 20000117 Result: Down-regulated in Transcription
  misc_feature: MA Experiment 20000117 PARAMETER Experiment Name: At_100uM_ABA_Mutants_cDNA_P Parameter: Plant Line Value: Columbia
  misc_feature: MA Experiment 20000117 PARAMETER Experiment Name: At_100uM_ABA_Mutants_cDNA_P Parameter: Timepoint (hr) Value: 6
  misc_feature: MA Experiment 20000117 PARAMETER Experiment Name: At_100uM_ABA_Mutants_cDNA_P Parameter: Tissue Value: Aerial
  misc_feature: MA Experiment 20000117 PARAMETER Experiment Name: At_100uM_ABA_Mutants_cDNA_P Parameter: Treatment Value: 100uM ABA vs. No Treatment
  misc_feature: MA Experiment ID: 20000264 Result: Up-regulated in Transcription
  misc_feature: MA Experiment 20000264 PARAMETER Experiment Name: At_Open_Flower_P Parameter: Age (day) Value: 21
  misc_feature: MA Experiment 20000264 PARAMETER Experiment Name: At_Open_Flower_P Parameter: Plant Line Value: WS
  misc_feature: MA Experiment 20000264 PARAMETER Experiment Name: At_Open_Flower_P Parameter: Tissue Value: Open Flower vs. Whole Plant
  misc_feature: MA Experiment ID: 20000286 Result: Up-regulated in Transcription
  misc_feature: MA Experiment 20000286 PARAMETER Experiment Name: At_Open_Flower_P Parameter: Age (day) Value: 21
  misc_feature: MA Experiment 20000286 PARAMETER Experiment Name: At_Open_Flower_P Parameter: Plant Line Value: WS
  misc_feature: MA Experiment 20000286 PARAMETER Experiment Name: At_Open_Flower_P Parameter: Tissue Value: Half Open vs. Whole Plant
ctgggtgaaacatagaaaagtttctcttgctcaagttaatgataaaagggtgagagcaataaacgctgataagccttgtctggtccttggaattttgaattttctttttctatcttacttatagtattggtagttgagggtgtcgtcgataagttgttgtaggatttgttgctctggctctggtggtaggtctatgaaatcaacccatatcgtgaatggactgcaacatggtatcttcgtcccagtgggattgggagcatttgatcatgtccaatccgtcaaggactgaagatgacagcaaacagctacctactgagtgggaaattgaaaaaggtgaaggaattgaatctatagttccacatttctcaggccttgagagagtcagtagtggctctgccaccagcttctggcacactgctgtatcgaaaagctcacagtcgacctctatcaactcatcatctcccgaagccaaacgatgcaagcttgcatcagaaagttcccctggagattcttgcagcaacatagactttgtccaggtgaaggctcccacagctctcgaggtatccgttgcctcagctgaatcagatctttgtttaaaactaggaaagcggacatactctgaagaatactggggtagaaacaataatgaaatttcagcggtttctatgaagttgttaactccatctgttgtcgctgggaaatccaaattgtgtggtcagagcatgccagtcccgcgttgccaaattgatggctgtgaactggatctctcatctgctaagggttatcatcgtaagcacaaagtctgcgaaaagcattcaaagtgcccaaaagttagcgtgagtggcctggaacgtcggttctgccaacagtgtagcaggttccatgctgtctctgaatttgatgagaagaaacgaagctgccgaaaacgtctttctcatcataatgcgaggcgtcgtaagccacaaggagtattttcaatgaatcccgagagggtgtatgatcgaagacagcatacaaatatgttgtggaatggggtgtcccttaacgcgagatctgaagaaatgtatgaatggggtaataacacttatgatacaaagcctagacaaacggaaaaaagctttactctgagcttccagagaggtaatggctctgaggaccagctggttgctagtagcagccgtatgttctctacatctcaaacctcaggtgggttcccagcaggaaagtccaagtttcaacttcatggcgaagatgtgggagaatactcaggagtcctccatgaatctcaagatatccaccgtgctctctctcttctgtcaacctcttcggatcccctggcccaaccacatgtgcagccattttctctactctgttcatatgatgttgtaccaaaatagatgagtaagtaatgtgtaatttgtaaacctgttactcagttggtggatacttttcc

SEQ ID NO: 74301 - protein, 393 aa, Arabidopsis thaliana; identical to SEQ ID NO: 24209
  peptide (1)..(393): Ceres Seq. ID no. 5002480
  misc_feature (174)..(252): Pfam Name: SBP domain Pfam Description: SBP domain
  misc_feature (1)..(393): Homolog of NCBI NO: 18396302 NR Description: putative squamosa-promoter binding protein 2; id: At1g27360.1, supported by cDNA: 42666., supported by cDNA:
  misc_feature (5)..(393): Homolog of NCBI NO: 25403307 NR Description: protein F17L21.14 [imported] - Arabidopsis >gi|9802531|gb|AAF99733.1|AC004557_12 F17L21.14 [Arabidopsis
  misc_feature (1)..(378): Homolog of NCBI NO: 22329813 NR Description: putative squamosa-promoter binding protein 2; id: At1g27370.1, supported by cDNA: gi_18650610 [Arabidopsis >gi|25456667|pir||T52596 squamosa promoter binding protein
  misc_feature (1)..(378): Homolog of NCBI NO: 18650611 NR Description: At1g27370/F17L21_16 [Arabidopsis thaliana]
  misc_feature (5)..(378): Homolog of NCBI NO: 9802546 NR Description: F17L21.15 [Arabidopsis thaliana]
  misc_feature (1)..(371): Homolog of NCBI NO: 25456646 NR Description: squamosa promoter binding protein 2 [imported] -
  misc_feature (1)..(291): Homolog of NCBI NO: 15239820 NR Description: squamosa promoter binding protein-like 2 protein id: At5g43270.1 [Arabidopsis thaliana]
  misc_feature (117)..(381): Homolog of NCBI NO: 18423163 NR Description: putative protein; protein id: At5g50570.1, by cDNA: 113229. [Arabidopsis thaliana] putative protein; protein id: At5g50670.1, supported by cDNA:
  misc_feature (117)..(381): Homolog of NCBI NO: 21536841 NR Description: unknown [Arabidopsis thaliana]
  misc_feature (127)..(373): Homolog of NCBI NO: 15227896 NR Description: putative squamosa-promoter binding protein; id: At2g42200.1, supported by cDNA: gi_15028114 [Arabidopsis

SEQ ID NO: 74302 - protein, 389 aa, Arabidopsis thaliana; identical to SEQ ID NO: 24210
  peptide (1)..(389): Ceres Seq. ID no. 5002481
  misc_feature (170)..(248): Pfam Name: SBP domain Pfam Description: SBP domain
  misc_feature (1)..(389): Homolog of NCBI NO: 18396302 NR Description: putative squamosa-promoter binding protein 2; id: At1g27360.1, supported by cDNA: 42666., supported by cDNA:
  misc_feature (1)..(389): Homolog of NCBI NO: 25403307 NR Description: protein F17L21.14 [imported] - Arabidopsis >gi|9802531|gb|AAF99733.1|AC004557_12 F17L21.14 [Arabidopsis
  misc_feature (1)..(374): Homolog of NCBI NO: 22329813 NR Description: putative squamosa-promoter binding protein 2; id: At1g27370.1, supported by cDNA: gi_18650610 [Arabidopsis >gi|25456667|pir||T52596 squamosa promoter binding protein
  misc_feature (1)..(374): Homolog of NCBI NO: 18650611 NR Description: At1g27370/F17L21_16 [Arabidopsis thaliana]
  misc_feature (1)..(374): Homolog of NCBI NO: 9802546 NR Description: F17L21.15 [Arabidopsis thaliana]
  misc_feature (1)..(367): Homolog of NCBI NO: 25456646 NR Description: squamosa promoter binding protein 2 [imported] -
  misc_feature (1)..(287): Homolog of NCBI NO: 15239820 NR Description: squamosa promoter binding protein-like 2 protein id: At5g43270.1 [Arabidopsis thaliana]
  misc_feature (113)..(377): Homolog of NCBI NO: 18423163 NR Description: putative protein; protein id: At5g50570.1, by cDNA: 113229. [Arabidopsis thaliana] putative protein; protein id: At5g50670.1, supported by cDNA:
  misc_feature (113)..(377): Homolog of NCBI NO: 21536841 NR Description: unknown [Arabidopsis thaliana]
  misc_feature (123)..(369): Homolog of NCBI NO: 15227896 NR Description: putative squamosa-promoter binding protein; id: At2g42200.1, supported by cDNA: gi_15028114 [Arabidopsis

SEQ ID NO: 74303 - protein, 376 aa, Arabidopsis thaliana; identical to SEQ ID NO: 24211
  peptide (1)..(376): Ceres Seq. ID no. 5002482
  misc_feature (157)..(235): Pfam Name: SBP domain Pfam Description: SBP domain
  misc_feature (1)..(376): Homolog of NCBI NO: 18396302 NR Description: putative squamosa-promoter binding protein 2; id: At1g27360.1, supported by cDNA: 42666., supported by cDNA:
  misc_feature (1)..(376): Homolog of NCBI NO: 25403307 NR Description: protein F17L21.14 [imported] - Arabidopsis >gi|9802531|gb|AAF99733.1|AC004557_12 F17L21.14 [Arabidopsis
  misc_feature (1)..(361): Homolog of NCBI NO: 22329813 NR Description: putative squamosa-promoter binding protein 2; id: At1g27370.1, supported by cDNA: gi_18650610 [Arabidopsis >gi|25456667|pir||T52596 squamosa promoter binding protein
  misc_feature (1)..(361): Homolog of NCBI NO: 18650611 NR Description: At1g27370/F17L21_16 [Arabidopsis thaliana]
  misc_feature (1)..(361): Homolog of NCBI NO: 9802546 NR Description: F17L21.15 [Arabidopsis thaliana]
  misc_feature (1)..(354): Homolog of NCBI NO: 25456646 NR Description: squamosa promoter binding protein 2 [imported] -
  misc_feature (1)..(274): Homolog of NCBI NO: 15239820 NR Description: squamosa promoter binding protein-like 2 protein id: At5g43270.1 [Arabidopsis thaliana]
  misc_feature (100)..(364): Homolog of NCBI NO: 18423163 NR Description: putative protein; protein id: At5g50570.1, by cDNA: 113229. [Arabidopsis thaliana] putative protein; protein id: At5g50670.1, supported by cDNA:
  misc_feature (100)..(364): Homolog of NCBI NO: 21536841 NR Description: unknown [Arabidopsis thaliana]
  misc_feature (110)..(356): Homolog of NCBI NO: 15227896 NR Description: putative squamosa-promoter binding protein; id: At2g42200.1, supported by cDNA: gi_15028114 [Arabidopsis

SEQ ID NO: 74304 - DNA, 1086 bp, Arabidopsis thaliana
  misc_feature (1)..(1086): Ceres Seq. ID no. 5002549
  misc_feature: MA Experiment ID: 108573 Result: Up-regulated in Transcription
  misc_feature: MA Experiment 108573 PARAMETER Experiment Name: At_Drought_cDNA_P Parameter: Timepoint (hr) Value: 6
  misc_feature: MA Experiment 108573 PARAMETER Experiment Name: At_Drought_cDNA_P Parameter: Tissue Value: Aerial
  misc_feature: MA Experiment 108573 PARAMETER Experiment Name: At_Drought_cDNA_P Parameter: Treatment Value: Drought vs. No Drought
  misc_feature: MA Experiment ID: 20000224 Result: Down-regulated in Transcription
  misc_feature: Pfam Name: Yip1 Pfam Description: Yip1 domain
gcaattcaccggaacttagccgacgagcgctgatcaaatcaaccggagaagcaaagctatagatctactatctccttcacagttgctatcagagatgtataataatatgggaccccggcctggaatggcaatgcctcaggcaaatcctcagcctagcccatttgggaatccgttctctggacctggctctggacttatccggagtggcttgggagcttatggggagaagattttcggttctagctctgagtatgtgcagagcaacataagtcgctacttctccgatcctcaatactattttcaagtgaatgaccagtatgtgaggaacaagttgaagattgttctacttccattccttcacaggggacactggactcgaatatcagaaccagttgggggtagactttcatacaaaccaccgatatacgatataaatgcaccagacttatacattccgcttatggcctttggcacttacgttgttcttgctggtttgtcactaggactctatggaaagtttactccagaagctctgaactggctttttgtgaaaggaatggttggctggtttttgcaagtgatgctgctgaagataacattgctttcacttggaagcggagaagcccctctcttggatattgtggcatatgcaggctatactttcacaggcctttgtctagctgttcttggcaagataatctggggatactcttactatgttttgattccgtggacctgcttatgcactggggtattcttagtgaagacaatgaagcgagttctctttgcagaatctaggagttatgactcaagcaggcatcactatctcttgatctttgttgctttagcccagtttcctcttttgatctggcttggtaacattagtgtgaattggctcttttgaaacgcattacgtttatattgttgtgaaaaacacctctgaggttatgtagcagaatttggaatgtcctcctgatggatatattatatggtagttgagcttttttggtttagacttctgtatgtcaaacatcaatatggaaagaaaagtgttatctcccttcccttttctgaatctcacttttc

SEQ ID NO: 74305 - protein, 269 aa, Arabidopsis thaliana; identical to SEQ ID NO: 39420
  peptide (1)..(269): Ceres Seq. ID no. 5002550
  misc_feature: Pfam Name: Yip1 Pfam Description: Yip1 domain
  misc_feature (1)..(269): Homolog of NCBI NO: 30695009 NR Description: expressed protein [Arabidopsis thaliana]
  misc_feature (11)..(269): Homolog of NCBI NO: 11282553 NR Description: hypothetical protein T16L24.50 - Arabidopsis >gi|6996286|emb|CAB75447.1| putative protein [Arabidopsis
  misc_feature (11)..(269): Homolog of NCBI NO: 33589682 NR Description: At3g59500 [Arabidopsis thaliana]
  misc_feature (1)..(268): Homolog of NCBI NO: 18397705 NR Description: expressed protein; protein id: At1g30890.1, by cDNA: 251549., supported by cDNA: gi_14532657, supported by gi_21280942 [Arabidopsis thaliana] >gi|14532658|gb|AAK64057.1|
  misc_feature (1)..(268): Homolog of NCBI NO: 9755388 NR Description: F17F8.24 [Arabidopsis thaliana]
  misc_feature (1)..(263): Homolog of NCBI NO: 38346458 NR Description: OSJNBa0019G23.6 [Oryza sativa (japonica
  misc_feature (129)..(263): Homolog of NCBI NO: 10241632 NR Description: putative protein [Oryza sativa (indica
  misc_feature (10)..(260): Homolog of NCBI NO: 14043299 NR Description: Similar to RIKEN cDNA 9430029K10 gene [Homo
  misc_feature (10)..(260): Homolog of NCBI NO: 24308364 NR Description: similar to putative transmembrane protein;
  misc_feature (19)..(260): Homolog of NCBI NO: 12861030 NR Description: unnamed protein product [Mus musculus]

SEQ ID NO: 74306 - protein, 265 aa, Arabidopsis thaliana; identical to SEQ ID NO: 39421
  peptide (1)..(265): Ceres Seq. ID no. 5002551
  misc_feature: Pfam Name: Yip1 Pfam Description: Yip1 domain
  misc_feature (1)..(265): Homolog of NCBI NO: 30695009 NR Description: expressed protein [Arabidopsis thaliana]
  misc_feature (7)..(265): Homolog of NCBI NO: 11282553 NR Description: hypothetical protein T16L24.50 - Arabidopsis >gi|6996286|emb|CAB75447.1| putative protein [Arabidopsis
  misc_feature (7)..(265): Homolog of NCBI NO: 33589682 NR Description: At3g59500 [Arabidopsis thaliana]
  misc_feature (1)..(264): Homolog of NCBI NO: 18397705 NR Description: expressed protein; protein id: At1g30890.1, by cDNA: 251549., supported by cDNA: gi_14532657, supported by gi_21280942 [Arabidopsis thaliana] >gi|14532658|gb|AAK64057.1|
  misc_feature (1)..(264): Homolog of NCBI NO: 9755388 NR Description: F17F8.24 [Arabidopsis thaliana]
  misc_feature (1)..(259): Homolog of NCBI NO: 38346458 NR Description: OSJNBa0019G23.6 [Oryza sativa (japonica
  misc_feature (125)..(259): Homolog of NCBI NO: 10241632 NR Description: putative protein [Oryza sativa (indica
  misc_feature (6)..(256): Homolog of NCBI NO: 14043299 NR Description: Similar to RIKEN cDNA 9430029K10 gene [Homo
  misc_feature (6)..(256): Homolog of NCBI NO: 24308364 NR Description: similar to putative transmembrane protein;
  misc_feature (15)..(256): Homolog of NCBI NO: 12861030 NR Description: unnamed protein product [Mus musculus]

SEQ ID NO: 74307 - protein, 259 aa, Arabidopsis thaliana; identical to SEQ ID NO: 39422
  peptide (1)..(259): Ceres Seq. ID no. 5002552
  misc_feature: Pfam Name: Yip1 Pfam Description: Yip1 domain
  misc_feature (1)..(259): Homolog of NCBI NO: 30695009 NR Description: expressed protein [Arabidopsis thaliana]
  misc_feature (1)..(259): Homolog of NCBI NO: 11282553 NR Description: hypothetical protein T16L24.50 - Arabidopsis >gi|6996286|emb|CAB75447.1| putative protein [Arabidopsis
  misc_feature (1)..(259): Homolog of NCBI NO: 33589682 NR Description: At3g59500 [Arabidopsis thaliana]
  misc_feature (1)..(258): Homolog of NCBI NO: 18397705 NR Description: expressed protein; protein id: At1g30890.1, by cDNA: 251549., supported by cDNA: gi_14532657, supported by gi_21280942 [Arabidopsis thaliana] >gi|14532658|gb|AAK64057.1|
  misc_feature (1)..(258): Homolog of NCBI NO: 9755388 NR Description: F17F8.24 [Arabidopsis thaliana]
  misc_feature (1)..(253): Homolog of NCBI NO: 38346458 NR Description: OSJNBa0019G23.6 [Oryza sativa (japonica
  misc_feature (119)..(253): Homolog of NCBI NO: 10241632 NR Description: putative protein [Oryza sativa (indica
  misc_feature (1)..(250): Homolog of NCBI NO: 14043299 NR Description: Similar to RIKEN cDNA 9430029K10 gene [Homo
  misc_feature (1)..(250): Homolog of NCBI NO: 24308364 NR Description: similar to putative transmembrane protein;
  misc_feature (9)..(250): Homolog of NCBI NO: 12861030 NR Description: unnamed protein product [Mus musculus]

SEQ ID NO: 74308 - DNA, 1263 bp, Arabidopsis thaliana
  misc_feature (1)..(1263): Ceres Seq. ID no. 5002553
  misc_feature: MA Experiment ID: 108461 Result: Up-regulated in Transcription
  misc_feature: MA Experiment 108461 PARAMETER Experiment Name: At_Germinating_Seeds_cDNA_P Parameter: Age (day) Value: 1 vs. 0
  misc_feature: MA Experiment 108461 PARAMETER Experiment Name: At_Germinating_Seeds_cDNA_P Parameter: Tissue Value: Germinating Seeds
  misc_feature: MA Experiment ID: 108464 Result: Up-regulated in Transcription
  misc_feature: MA Experiment 108464 PARAMETER Experiment Name: At_Germinating_Seeds_cDNA_P Parameter: Age (day) Value: 4 vs. 0
  misc_feature: MA Experiment 108464 PARAMETER Experiment Name: At_Germinating_Seeds_cDNA_P Parameter: Tissue Value: Germinating Seeds
  misc_feature: MA Experiment ID: 108607 Result: Down-regulated in Transcription
  misc_feature: MA Experiment 108607 PARAMETER Experiment Name: At_100uM_ABA_cDNA_P Parameter: Timepoint (hr) Value: 4
  misc_feature: MA Experiment 108607 PARAMETER Experiment Name: At_100uM_ABA_cDNA_P Parameter: Tissue Value: Aerial
  misc_feature: MA Experiment 108607 PARAMETER Experiment Name: At_100uM_ABA_cDNA_P Parameter: Treatment Value: 100uM ABA vs. No Treatment
  misc_feature: MA Experiment ID: 20000069 Result: Down-regulated in Transcription
  misc_feature: MA Experiment 20000069 PARAMETER Experiment Name: At_100uM_ABA_Mutants_cDNA_P Parameter: Plant Line Value: CS23
  misc_feature: MA Experiment 20000069 PARAMETER Experiment Name: At_100uM_ABA_Mutants_cDNA_P Parameter: Timepoint (hr) Value: 6
  misc_feature: MA Experiment 20000069 PARAMETER Experiment Name: At_100uM_ABA_Mutants_cDNA_P Parameter: Tissue Value: Aerial
  misc_feature: MA Experiment 20000069 PARAMETER Experiment Name: At_100uM_ABA_Mutants_cDNA_P Parameter: Treatment Value: 100uM ABA vs. No Treatment
  misc_feature: MA Experiment ID: 20000070 Result: Down-regulated in Transcription
  misc_feature: MA Experiment 20000070 PARAMETER Experiment Name: At_100uM_ABA_Mutants_cDNA_P Parameter: Plant Line Value: CS24
  misc_feature: MA Experiment 20000070 PARAMETER Experiment Name: At_100uM_ABA_Mutants_cDNA_P Parameter: Timepoint (hr) Value: 6
  misc_feature: MA Experiment 20000070 PARAMETER Experiment Name: At_100uM_ABA_Mutants_cDNA_P Parameter: Tissue Value: Aerial
  misc_feature: MA Experiment 20000070 PARAMETER Experiment Name: At_100uM_ABA_Mutants_cDNA_P Parameter: Treatment Value: 100uM ABA vs. No Treatment
  misc_feature: MA Experiment ID: 20000071 Result: Down-regulated in Transcription
  misc_feature: MA Experiment 20000071 PARAMETER Experiment Name: At_100uM_ABA_Mutants_cDNA_P Parameter: Plant Line Value: CS8104
  misc_feature: MA Experiment 20000071 PARAMETER Experiment Name: At_100uM_ABA_Mutants_cDNA_P Parameter: Timepoint (hr) Value: 6
  misc_feature: MA Experiment 20000071 PARAMETER Experiment Name: At_100uM_ABA_Mutants_cDNA_P Parameter: Tissue Value: Aerial
  misc_feature: MA Experiment 20000071 PARAMETER Experiment Name: At_100uM_ABA_Mutants_cDNA_P Parameter: Treatment Value: 100uM ABA vs. No Treatment
  misc_feature: MA Experiment ID: 20000087 Result: Down-regulated in Transcription
  misc_feature: MA Experiment 20000087 PARAMETER Experiment Name: At_100uM_ABA_Mutants_cDNA_P Parameter: Plant Line Value: WS
  misc_feature: MA Experiment 20000087 PARAMETER Experiment Name: At_100uM_ABA_Mutants_cDNA_P Parameter: Timepoint (hr) Value: 6
  misc_feature: MA Experiment 20000087 PARAMETER Experiment Name: At_100uM_ABA_Mutants_cDNA_P Parameter: Tissue Value: Aerial
  misc_feature: MA Experiment 20000087 PARAMETER Experiment Name: At_100uM_ABA_Mutants_cDNA_P Parameter: Treatment Value: 100uM ABA vs. No Treatment
  misc_feature: MA Experiment ID: 20000088 Result: Down-regulated in Transcription
  misc_feature: MA Experiment 20000088 PARAMETER Experiment Name: At_100uM_ABA_Mutants_cDNA_P Parameter: Plant Line Value: Landsberg
  misc_feature: MA Experiment 20000088 PARAMETER Experiment Name: At_100uM_ABA_Mutants_cDNA_P Parameter: Timepoint (hr) Value: 6
  misc_feature: MA Experiment 20000088 PARAMETER Experiment Name: At_100uM_ABA_Mutants_cDNA_P Parameter: Tissue Value: Aerial
  misc_feature: MA Experiment 20000088 PARAMETER Experiment Name: At_100uM_ABA_Mutants_cDNA_P Parameter: Treatment Value: 100uM ABA vs. No Treatment
  misc_feature: MA Experiment ID: 20000113 Result: Down-regulated in Transcription
  misc_feature: MA Experiment 20000113 PARAMETER Experiment Name: At_42deg_Heat_cDNA_P Parameter: Temperature (deg C) Value: 42 vs. 22
  misc_feature: MA Experiment 20000113 PARAMETER Experiment Name: At_42deg_Heat_cDNA_P Parameter: Timepoint (hr) Value: 8
  misc_feature: MA Experiment 20000113 PARAMETER Experiment Name: At_42deg_Heat_cDNA_P Parameter: Tissue Value: Aerial
  misc_feature: MA Experiment ID: 20000117 Result: Down-regulated in Transcription
  misc_feature: MA Experiment 20000117 PARAMETER Experiment Name: At_100uM_ABA_Mutants_cDNA_P Parameter: Plant Line Value: Columbia
  misc_feature: MA Experiment 20000117 PARAMETER Experiment Name: At_100uM_ABA_Mutants_cDNA_P Parameter: Timepoint (hr) Value: 6
  misc_feature: MA Experiment 20000117 PARAMETER Experiment Name: At_100uM_ABA_Mutants_cDNA_P Parameter: Tissue Value: Aerial
  misc_feature: MA Experiment 20000117 PARAMETER Experiment Name: At_100uM_ABA_Mutants_cDNA_P Parameter: Treatment Value: 100uM ABA vs. No Treatment
  misc_feature: MA Experiment ID: 20000179 Result: Up-regulated in Transcription
  misc_feature: MA Experiment 20000179 PARAMETER Experiment Name: At_Germinating_Seeds_P Parameter: Age (hr) Value: 6 vs. 0
  misc_feature: MA Experiment 20000179 PARAMETER Experiment Name: At_Germinating_Seeds_P Parameter: Tissue Value: Germinating Seeds
  misc_feature: MA Experiment ID: 20000180 Result: Up-regulated in Transcription
  misc_feature: MA Experiment 20000180 PARAMETER Experiment Name: At_Germinating_Seeds_P Parameter: Age (hr) Value: 24 vs. 0
  misc_feature: MA Experiment 20000180 PARAMETER Experiment Name: At_Germinating_Seeds_P Parameter: Tissue Value: Germinating Seeds
  misc_feature: MA Experiment ID: 20000234 Result: Up-regulated in Transcription
  misc_feature: MA Experiment 20000234 PARAMETER Experiment Name: At_Siliques_P Parameter: Age (day) Value: 21
  misc_feature: MA Experiment 20000234 PARAMETER Experiment Name: At_Siliques_P Parameter: Organism Value: A. thaliana
  misc_feature: MA Experiment 20000234 PARAMETER Experiment Name: At_Siliques_P Parameter: Plant Line Value: WS
  misc_feature: MA Experiment 20000234 PARAMETER Experiment Name: At_Siliques_P Parameter: Tissue Value: Less Than 5mm Siliques vs. Whole Plant
  misc_feature: MA Experiment ID: 20000265 Result: Up-regulated in Transcription
  misc_feature: MA Experiment 20000265 PARAMETER Experiment Name: At_Open_Flower_P Parameter: Age (day) Value: 21
  misc_feature: MA Experiment 20000265 PARAMETER Experiment Name: At_Open_Flower_P Parameter: Plant Line Value: WS
  misc_feature: MA Experiment 20000265 PARAMETER Experiment Name: At_Open_Flower_P Parameter: Tissue Value: Closed Flower vs. Whole Plant
  misc_feature: MA Experiment ID: 20001911 Result: Down-regulated in Transcription
  misc_feature: MA Experiment 20001911 PARAMETER Experiment Name: At_Drought_Reproduction_P Parameter: Age (day) Value: 40
  misc_feature: MA Experiment 20001911 PARAMETER Experiment Name: At_Drought_Reproduction_P Parameter: Organism Value: A. thaliana
  misc_feature: MA Experiment 20001911 PARAMETER Experiment Name: At_Drought_Reproduction_P Parameter: Plant Line Value: WS
  misc_feature: MA Experiment 20001911 PARAMETER Experiment Name: At_Drought_Reproduction_P Parameter: Timepoint (day) Value: 10
  misc_feature: MA Experiment 20001911 PARAMETER Experiment Name: At_Drought_Reproduction_P Parameter: Tissue Value: Flowers
  misc_feature: MA Experiment 20001911 PARAMETER Experiment Name: At_Drought_Reproduction_P Parameter: Treatment Value: Drought vs. No Drought
ggaatcgcttctacttcactctcaccttcctcctattctctctctctttctatgtcaagttagcttagccgtctcaccagaaagctaaccttacctcacaaacattgattgtgttacactaatctcttaaatagagagccgtaatttctacacactctgatcgctagatggaaacggagatatcaggaatggataatccagctatgaccttggacgaggtttccatggaacgcaacaagagcttcgttaaggcattgcaggagctcaagaacttgaggcctcaactttattcagctgctgattactgtgaaaagtcttatcttcatagcgagcaaaagcaaatggtattggacaatttgaaagactacactgtgaaggctctagttaatgctgttgatcaccttggaactgtagcttccaagcttactgatctttttgatcaccaaaattcagacatatcaactatggaaatgagagcttcttgtgttagccagcaactgcttacatgccggacatatatcgacaaagaaggtcttagacagcaacagctattagcagttatcccattgcatcacaagcattacattcttcccaattctgttaacaagcgggtacactttagtcctctcagacgaactgacacaagacagaatcattaccaagctatatcccgtcttcaaccttcagatgcccctgcatcgaaatcactctcctggcatttaggctcagagaccaagtctaccctcaaaggaacatccacagttgcaccaagctccaaagattcaaaagctttctcaaagacatctggagtgttccatctcttaggtgatgatgaaaacatagcaaacaagaagcctttggctggttctcaggtctcaggtgttcctgctgcatccactgcccataaggatttggaggttccgaaacttctaactgcacacaggtcacttgataacaacccgcgacgagagatcattcaagctcctgtccggacaaagagtgttctttctgcgttctttgttaaacagaaaactccaaagctcaaagctggctatgtctcgtgaaaacaccaactctttgtactgagaaggaaatttcaatctcataccacgtttcttttaccttatataataacatgttgattttcatgtaattatcttaatcaccacatcaacgtacgaagtccagtaagacatgattttggtctatcattaacaaaactgtgtaatagattaagaatgtgtttttagaatgtaaaagctt

SEQ ID NO: 74309 - protein, 298 aa, Arabidopsis thaliana; identical to SEQ ID NO: 29206
  peptide (1)..(298): Ceres Seq. ID no. 5002554
  misc_feature (1)..(298): Homolog of NCBI NO: 18407012 NR Description: expressed protein; protein id: At2g46225.1, by cDNA: 13319. [Arabidopsis thaliana] expressed protein [Arabidopsis thaliana]
  misc_feature (1)..(298): Homolog of NCBI NO: 26452761 NR Description: unknown protein [Arabidopsis thaliana]
  misc_feature (24)..(196): Homolog of NCBI NO: 25408977 NR Description: hypothetical protein At2g46220 [imported] -
  misc_feature (174)..(298): Homolog of NCBI NO: 25408977 NR Description: hypothetical protein At2g46220 [imported] -
  misc_feature (4)..(293): Homolog of NCBI NO: 34912804 NR Description: P0501G01.11 [Oryza sativa (japonica
  misc_feature (12)..(291): Homolog of NCBI NO: 15229112 NR Description: putative protein; protein id: At3g49290.1
  misc_feature (8)..(148): Homolog of NCBI NO: 10177091 NR Description: emb|CAB66408.1~gene_id:MOP9.13~strong similarity
  misc_feature (8)..(148): Homolog of NCBI NO: 30689382 NR Description: expressed protein [Arabidopsis thaliana]
  misc_feature (5)..(167): Homolog of NCBI NO: 34913914 NR Description: OSJNBa0066C06.8 [Oryza sativa (japonica
  misc_feature (16)..(142): Homolog of NCBI NO: 15238265 NR Description: putative protein; protein id: At5g42030.1, by cDNA: 106836. [Arabidopsis thaliana] emb|CAB66408.1~gene_id:MJC20.13~similar to unknown protein

SEQ ID NO: 74310 - protein, 291 aa, Arabidopsis thaliana; identical to SEQ ID NO: 29207
  peptide (1)..(291): Ceres Seq. ID no. 5002555
  misc_feature (1)..(291): Homolog of NCBI NO: 18407012 NR Description: expressed protein; protein id: At2g46225.1, by cDNA: 13319. [Arabidopsis thaliana] expressed protein [Arabidopsis thaliana]
  misc_feature (1)..(291): Homolog of NCBI NO: 26452761 NR Description: unknown protein [Arabidopsis thaliana]
  misc_feature (17)..(189): Homolog of NCBI NO: 25408977 NR Description: hypothetical protein At2g46220 [imported] -
  misc_feature (167)..(291): Homolog of NCBI NO: 25408977 NR Description: hypothetical protein At2g46220 [imported] -
  misc_feature (1)..(286): Homolog of NCBI NO: 34912804 NR Description: P0501G01.11 [Oryza sativa (japonica
  misc_feature (5)..(284): Homolog of NCBI NO: 15229112 NR Description: putative protein; protein id: At3g49290.1
  misc_feature (1)..(141): Homolog of NCBI NO: 10177091 NR Description: emb|CAB66408.1~gene_id:MOP9.13~strong similarity
  misc_feature (1)..(141): Homolog of NCBI NO: 30689382 NR Description: expressed protein [Arabidopsis thaliana]
  misc_feature (1)..(160): Homolog of NCBI NO: 34913914 NR Description: OSJNBa0066C06.8 [Oryza sativa (japonica
  misc_feature (9)..(135): Homolog of NCBI NO: 15238265 NR Description: putative protein; protein id: At5g42030.1, by cDNA: 106836. [Arabidopsis thaliana] emb|CAB66408.1~gene_id:MJC20.13~similar to unknown protein

SEQ ID NO: 74311 - protein, 286 aa, Arabidopsis thaliana; identical to SEQ ID NO: 29208
  peptide (1)..(286): Ceres Seq. ID no. 5002556
  misc_feature (1)..(286): Homolog of NCBI NO: 18407012 NR Description: expressed protein; protein id: At2g46225.1, by cDNA: 13319. [Arabidopsis thaliana] expressed protein [Arabidopsis thaliana]
  misc_feature (1)..(286): Homolog of NCBI NO: 26452761 NR Description: unknown protein [Arabidopsis thaliana]
  misc_feature (12)..(184): Homolog of NCBI NO: 25408977 NR Description: hypothetical protein At2g46220 [imported] -
  misc_feature (162)..(286): Homolog of NCBI NO: 25408977 NR Description: hypothetical protein At2g46220 [imported] -
  misc_feature (1)..(281): Homolog of NCBI NO: 34912804 NR Description: P0501G01.11 [Oryza sativa (japonica
  misc_feature (1)..(279): Homolog of NCBI NO: 15229112 NR Description: putative protein; protein id: At3g49290.1
  misc_feature (1)..(136): Homolog of NCBI NO: 10177091 NR Description: emb|CAB66408.1~gene_id:MOP9.13~strong similarity
  misc_feature (1)..(136): Homolog of NCBI NO: 30689382 NR Description: expressed protein [Arabidopsis thaliana]
  misc_feature (1)..(155): Homolog of NCBI NO: 34913914 NR Description: OSJNBa0066C06.8 [Oryza sativa (japonica
  misc_feature (4)..(130): Homolog of NCBI NO: 15238265 NR Description: putative protein; protein id: At5g42030.1, by cDNA: 106836. [Arabidopsis thaliana] emb|CAB66408.1~gene_id:MJC20.13~similar to unknown protein

SEQ ID NO: 74312 - DNA, 1407 bp, Arabidopsis thaliana
  misc_feature (1)..(1407): Ceres Seq. ID no. 5002641
  misc_feature: MA Experiment ID: 108576 Result: Down-regulated in Transcription
  misc_feature: MA Experiment 108576 PARAMETER Experiment Name: At_42deg_Heat_cDNA_P Parameter: Temperature (deg C) Value: 42 vs. 22
  misc_feature: MA Experiment 108576 PARAMETER Experiment Name: At_42deg_Heat_cDNA_P Parameter: Timepoint (hr) Value: 1
  misc_feature: MA Experiment 108576 PARAMETER Experiment Name: At_42deg_Heat_cDNA_P Parameter: Tissue Value: Aerial
  misc_feature: MA Experiment ID: 108577 Result: Down-regulated in Transcription
  misc_feature: MA Experiment 108577 PARAMETER Experiment Name: At_42deg_Heat_cDNA_P Parameter: Temperature (deg C) Value: 42 vs. 22
  misc_feature: MA Experiment 108577 PARAMETER Experiment Name: At_42deg_Heat_cDNA_P Parameter: Timepoint (hr) Value: 6
  misc_feature: MA Experiment 108577 PARAMETER Experiment Name: At_42deg_Heat_cDNA_P Parameter: Tissue Value: Aerial
  misc_feature: MA Experiment ID: 108595 Result: Down-regulated in Transcription
  misc_feature: MA Experiment 108595 PARAMETER Experiment Name: At_Ler-pi_Ovule_cDNA_P Parameter: Plant Line Value: null
  misc_feature: MA Experiment ID: 20000111 Result: Down-regulated in Transcription
  misc_feature: MA Experiment 20000111 PARAMETER Experiment Name: At_42deg_Heat_cDNA_P Parameter: Temperature (deg C) Value: 42 vs. 22
  misc_feature: MA Experiment 20000111 PARAMETER Experiment Name: At_42deg_Heat_cDNA_P Parameter: Timepoint (hr) Value: 6
  misc_feature: MA Experiment 20000111 PARAMETER Experiment Name: At_42deg_Heat_cDNA_P Parameter: Tissue Value: Aerial
  misc_feature: MA Experiment ID: 20000112 Result: Down-regulated in Transcription
  misc_feature: MA Experiment 20000112 PARAMETER Experiment Name: At_42deg_Heat_cDNA_P Parameter: Temperature (deg C) Value: 42 vs. 22
  misc_feature: MA Experiment 20000112 PARAMETER Experiment Name: At_42deg_Heat_cDNA_P Parameter: Timepoint (hr) Value: 2
  misc_feature: MA Experiment 20000112 PARAMETER Experiment Name: At_42deg_Heat_cDNA_P Parameter: Tissue Value: Aerial
  misc_feature: MA Experiment ID: 20000113 Result: Down-regulated in Transcription
  misc_feature: MA Experiment 20000113 PARAMETER Experiment Name: At_42deg_Heat_cDNA_P Parameter: Temperature (deg C) Value: 42 vs. 22
  misc_feature: MA Experiment 20000113 PARAMETER Experiment Name: At_42deg_Heat_cDNA_P Parameter: Timepoint (hr) Value: 8
  misc_feature: MA Experiment 20000113 PARAMETER Experiment Name: At_42deg_Heat_cDNA_P Parameter: Tissue Value: Aerial
  misc_feature: MA Experiment ID: 20000117 Result: Down-regulated in Transcription
  misc_feature: MA Experiment 20000117 PARAMETER Experiment Name: At_100uM_ABA_Mutants_cDNA_P Parameter: Plant Line Value: Columbia
  misc_feature: MA Experiment 20000117 PARAMETER Experiment Name: At_100uM_ABA_Mutants_cDNA_P Parameter: Timepoint (hr) Value: 6
  misc_feature: MA Experiment 20000117 PARAMETER Experiment Name: At_100uM_ABA_Mutants_cDNA_P Parameter: Tissue Value: Aerial
  misc_feature: MA Experiment 20000117 PARAMETER Experiment Name: At_100uM_ABA_Mutants_cDNA_P Parameter: Treatment Value: 100uM ABA vs. No Treatment
  misc_feature: MA Experiment ID: 20000144 Result: Down-regulated in Transcription
  misc_feature: MA Experiment 20000144 PARAMETER Experiment Name: At_42deg_Heat_cDNA_P Parameter: Temperature (deg C) Value: 42 vs. 22
  misc_feature: MA Experiment 20000144 PARAMETER Experiment Name: At_42deg_Heat_cDNA_P Parameter: Timepoint (hr) Value: 1
  misc_feature: MA Experiment 20000144 PARAMETER Experiment Name: At_42deg_Heat_cDNA_P Parameter: Tissue Value: Aerial
  misc_feature: MA Experiment ID: 20000224 Result: Down-regulated in Transcription
tctttcaattactgtaatgttgaatttgggtttcatctactaactaagatgaagtttcttgtctctttctgtctccctctttcttaattcctctctacttttcggttaattgctcctcttcagctaactttggggctttaaagtgataggatggctcgcttcagttttccttgttttccaaattttgggggttttaatcagcacaggatgagagaggcacagctaggcggtcacactctgaggtcccatggaatgactgttgcaaggactcacatgcatgattggatcattctcgtgttacttgttattctcgagtgtgtactccttataatccacccattttatcgctttgttggtaaagatatgatgactgatctaagttacccgttaaagagtaacaccgtaccaatttggtctgtcccggtatatgcgatgctgttacctttggtaatcttcatctttatctacttccgtcgaagagatgtttatgatcttcatcacgcggtgctaggtctcttatactctgttctggtgacagcagtacttaccgatgcaataaagaatgcagttggtcgaccacgtcctgacttcttctggcgttgttttccagatggcaaagctctttatgatagccttggagatgttatatgccatggtgataaaagcgtcataagggaaggtcacaaaagctttccaagtggacacacgtcatggtctttttcgggtctcggatttctttcgctttacttatcgggaaagattcaagcatttgacggtaaaggccacgttgcaaagctatgcatagtcatactccctttgctatttgcagctcttgtcggcatttcccgtgttgatgactattggcatcattggcaagacgtctttgcaggaggcttgctaggtcttgcgatctctacaatctgttatcttcaatttttcccgccaccatatcacaccgaaggttggggaccatatgcttacttccaagtgttggaggctgcgagagtgcaaggagcagcgaatggagcagtgcagcagccgccgccccaagttaacaacggtgaagaagaagacggtgggtttatgggtttacatttggtggataatccgactatgaggagagaagaggatgtagaaactggtagaggctgagatgaagaaactctgaagctggtttggttacttgttaggacactttctcttgttcttttgattctttgttggacaactttagtagatttctctaagataactaatagagtcgtttggttttggttttggtttaaatggatgaccggttttatggttccggtattggtggttaaagtttatgtttttcaaaaaagttcactggataaatgtagctttattttcaatattttaaggattgaaatcggatttgaactt

SEQ ID NO: 74313 - protein, 333 aa, Arabidopsis thaliana; identical to SEQ ID NO: 40140
  peptide (1)..(333): Ceres Seq. ID no. 5002642
  misc_feature (127)..(267): Pfam Name: PAP2 superfamily Pfam Description: PAP2 superfamily
  misc_feature (17)..(333): Homolog of NCBI NO: 18396250 NR Description: putative phosphatidate phosphohydrolase; protein At3g02600.1, supported by cDNA: 121374. [Arabidopsis thaliana]
  misc_feature (1)..(17): Homolog of NCBI NO: 18396250 NR Description: putative phosphatidate phosphohydrolase; protein At3g02600.1, supported by cDNA: 121374. [Arabidopsis thaliana]
  misc_feature (20)..(333): Homolog of NCBI NO: 6957723 NR Description: putative phosphatidate phosphohydrolase
  misc_feature (1)..(333): Homolog of NCBI NO: 9621903 NR Description: phosphatidic acid phosphatase alpha [Vigna
  misc_feature (20)..(290): Homolog of NCBI NO: 15218051 NR Description: putative phosphatidic acid phosphatase; protein At1g15080.1, supported by cDNA: 37546., supported by cDNA: [Arabidopsis thaliana] >gi|25353095|pir||E86284 F9L1.2 Contains
  misc_feature (19)..(292): Homolog of NCBI NO: 15724220 NR Description: At2g01180/F10A8.6 [Arabidopsis thaliana]
  misc_feature (19)..(292): Homolog of NCBI NO: 18379166 NR Description: putative phosphatidic acid phosphatase; protein At2g01180.1, supported by cDNA: 19163., supported by cDNA: [Arabidopsis thaliana] >gi|14020927|dbj|BAB47575.1| phosphatidic
  misc_feature (20)..(292): Homolog of NCBI NO: 25353094 NR Description: probable phosphatidic acid phosphatase [imported] Arabidopsis thaliana >gi|26005743|dbj|BAC41334.1| prenyl
  misc_feature (19)..(292): Homolog of NCBI NO: 21554001 NR Description: putative phosphatidic acid phosphatase
  misc_feature (20)..(303): Homolog of NCBI NO: 10673973 NR Description: phosphatidic acid phosphatase beta [Vigna

SEQ ID NO: 74314 - protein, 314 aa, Arabidopsis thaliana; identical to SEQ ID NO: 27353
  peptide (1)..(314): Ceres Seq. ID no. 5002643
  misc_feature (108)..(248): Pfam Name: PAP2 superfamily Pfam Description: PAP2 superfamily
  misc_feature (1)..(314): Homolog of NCBI NO: 18396250 NR Description: putative phosphatidate phosphohydrolase; protein At3g02600.1, supported by cDNA: 121374. [Arabidopsis thaliana]
  misc_feature (1)..(314): Homolog of NCBI NO: 6957723 NR Description: putative phosphatidate phosphohydrolase
  misc_feature (1)..(314): Homolog of NCBI NO: 9621903 NR Description: phosphatidic acid phosphatase alpha [Vigna
  misc_feature (1)..(271): Homolog of NCBI NO: 15218051 NR Description: putative phosphatidic acid phosphatase; protein At1g15080.1, supported by cDNA: 37546., supported by cDNA: [Arabidopsis thaliana] >gi|25353095|pir||E86284 F9L1.2 Contains
  misc_feature (1)..(273): Homolog of NCBI NO: 15724220 NR Description: At2g01180/F10A8.6 [Arabidopsis thaliana]
  misc_feature (1)..(273): Homolog of NCBI NO: 18379166 NR Description: putative phosphatidic acid phosphatase; protein At2g01180.1, supported by cDNA: 19163., supported by cDNA: [Arabidopsis thaliana] >gi|14020927|dbj|BAB47575.1| phosphatidic
  misc_feature (1)..(273): Homolog of NCBI NO: 25353094 NR Description: probable phosphatidic acid phosphatase [imported] Arabidopsis thaliana >gi|26005743|dbj|BAC41334.1| prenyl
  misc_feature (1)..(273): Homolog of NCBI NO: 21554001 NR Description: putative phosphatidic acid phosphatase
  misc_feature (1)..(284): Homolog of NCBI NO: 10673973 NR Description: phosphatidic acid phosphatase beta [Vigna
  misc_feature (2)..(256): Homolog of NCBI NO: 34895654 NR Description: putative phosphatidic acid phosphatase alpha

SEQ ID NO: 74315 - protein, 299 aa, Arabidopsis thaliana; identical to SEQ ID NO: 27354
  peptide (1)..(299): Ceres Seq. ID no. 5002644
  misc_feature (93)..(233): Pfam Name: PAP2 superfamily Pfam Description: PAP2 superfamily
  misc_feature (1)..(299): Homolog of NCBI NO: 18396250 NR Description: putative phosphatidate phosphohydrolase; protein At3g02600.1, supported by cDNA: 121374. [Arabidopsis thaliana]
  misc_feature (1)..(299): Homolog of NCBI NO: 6957723 NR Description: putative phosphatidate phosphohydrolase
  misc_feature (1)..(299): Homolog of NCBI NO: 9621903 NR Description: phosphatidic acid phosphatase alpha [Vigna
  misc_feature (1)..(256): Homolog of NCBI NO: 15218051 NR Description: putative phosphatidic acid phosphatase; protein At1g15080.1, supported by cDNA: 37546., supported by cDNA: [Arabidopsis thaliana] >gi|25353095|pir||E86284 F9L1.2 Contains
  misc_feature (1)..(258): Homolog of NCBI NO: 15724220 NR Description: At2g01180/F10A8.6 [Arabidopsis thaliana]
  misc_feature (1)..(258): Homolog of NCBI NO: 18379166 NR Description: putative phosphatidic acid phosphatase; protein At2g01180.1, supported by cDNA: 19163., supported by cDNA: [Arabidopsis thaliana] >gi|14020927|dbj|BAB47575.1| phosphatidic
  misc_feature (1)..(258): Homolog of NCBI NO: 25353094 NR Description: probable phosphatidic acid phosphatase [imported] Arabidopsis thaliana >gi|26005743|dbj|BAC41334.1| prenyl
  misc_feature (1)..(258): Homolog of NCBI NO: 21554001 NR Description: putative phosphatidic acid phosphatase
  misc_feature (1)..(269): Homolog of NCBI NO: 10673973 NR Description: phosphatidic acid phosphatase beta [Vigna
  misc_feature (1)..(241): Homolog of NCBI NO: 34895654 NR Description: putative phosphatidic acid phosphatase alpha

SEQ ID NO: 74316 - DNA, 1461 bp, Arabidopsis thaliana
  misc_feature (1)..(1461): Ceres Seq. ID no. 5002667
  misc_feature: MA Experiment ID: 20000111 Result: Down-regulated in Transcription
  misc_feature: MA Experiment 20000111 PARAMETER Experiment Name: At_42deg_Heat_cDNA_P Parameter: Temperature (deg C) Value: 42 vs. 22
  misc_feature: MA Experiment 20000111 PARAMETER Experiment Name: At_42deg_Heat_cDNA_P Parameter: Timepoint (hr) Value: 6
  misc_feature: MA Experiment 20000111 PARAMETER Experiment Name: At_42deg_Heat_cDNA_P Parameter: Tissue Value: Aerial
  misc_feature: MA Experiment ID: 20000112 Result: Down-regulated in Transcription
  misc_feature: MA Experiment 20000112 PARAMETER Experiment Name: At_42deg_Heat_cDNA_P Parameter: Temperature (deg C) Value: 42 vs. 22
  misc_feature: MA Experiment 20000112 PARAMETER Experiment Name: At_42deg_Heat_cDNA_P Parameter: Timepoint (hr) Value: 2
  misc_feature: MA Experiment 20000112 PARAMETER Experiment Name: At_42deg_Heat_cDNA_P Parameter: Tissue Value: Aerial
  misc_feature: MA Experiment ID: 20000113 Result: Down-regulated in Transcription
  misc_feature: MA Experiment 20000113 PARAMETER Experiment Name: At_42deg_Heat_cDNA_P Parameter: Temperature (deg C) Value: 42 vs. 22
  misc_feature: MA Experiment 20000113 PARAMETER Experiment Name: At_42deg_Heat_cDNA_P Parameter: Timepoint (hr) Value: 8
  misc_feature: MA Experiment 20000113 PARAMETER Experiment Name: At_42deg_Heat_cDNA_P Parameter: Tissue Value: Aerial
  misc_feature: MA Experiment ID: 20000144 Result: Down-regulated in Transcription
  misc_feature: MA Experiment 20000144 PARAMETER Experiment Name: At_42deg_Heat_cDNA_P Parameter: Temperature (deg C) Value: 42 vs. 22
  misc_feature: MA Experiment 20000144 PARAMETER Experiment Name: At_42deg_Heat_cDNA_P Parameter: Timepoint (hr) Value: 1
  misc_feature: MA Experiment 20000144 PARAMETER Experiment Name: At_42deg_Heat_cDNA_P Parameter: Tissue Value: Aerial
  misc_feature: MA Experiment ID: 20000224 Result: Down-regulated in Transcription
agattgtccctaggagtcactgttatcgctctttcaattactgtaatgttgaatttgggtttcatctactaactaagatgaagtttctttgataggatggctcgcttcagttttccttgttttccaaattttgggggttttaatcaggtccaagtaattaggtgaagtttgcctctctctttttttggatctcattggtctgcaatagtctcaattaaaccttctagtttgcatattaccagttgagtgactcttggttccagattcgtttttggtggtcatagtcgcgagctgtgacaaatcgggggcctgagatttcagaaactgctgataattgggtctcaccatctgacattccactcatagaacctaatagtaaagaggatgagagaggcacagctaggcggtcacactctgaggtcccatggaatgactgttgcaaggactcacatgcatgattggatcattctcgtgttacttgttattctcgagtgtgtactccttataatccacccattttatcgctttgttggtaaagatatgatgactgatctaagttacccgttaaagagtaacaccgtaccaatttggtctgtcccggtatatgcgatgctgttacctttggtaatcttcatctttatctacttccgtcgaagagatgtttatgatcttcatcacgcggtgctaggtctcttatactctgttctggtgacagcagtacttaccgatgcaataaagaatgcagttggtcgaccacgtcctgacttcttctggcgttgttttccagatggcaaagctctttatgatagccttggagatgttatatgccatggtgataaaagcgtcataagggaaggtcacaaaagctttccaagtggacacacgtcatggtctttttcgggtctcggatttctttcgctttacttatcgggaaagattcaagcatttgacggtaaaggccacgttgcaaagctatgcatagtcatactccctttgctatttgcagctcttgtcggcatttcccgtgttgatgactattggcatcattggcaagacgtctttgcaggaggcttgctaggtcttgcgatctctacaatctgttatcttcaatttttcccgccaccatatcacaccgaaggttggggaccatatgcttacttccaagtgttggaggctgcgagagtgcaaggagcagcgaatggagcagtgcagcagccgccgccccaagttaacaacggtgaagaagaagacggtgggtttatgggtttacatttggtggataatccgactatgaggagagaagaggatgtagaaactggtagaggctgagatgaagaaactctgaagctggtttggttacttgttaggacactttctcttgttcttttgattctttgttggacaactttagtagatttctctaagataactaatagagtcgtttggttttggttttggttt

SEQ ID NO: 74317 - protein, 314 aa, Arabidopsis thaliana; identical to SEQ ID NO: 27353
  peptide (1)..(314): Ceres Seq. ID no. 5002668
  misc_feature (108)..(248): Pfam Name: PAP2 superfamily Pfam Description: PAP2 superfamily
  misc_feature (1)..(314): Homolog of NCBI NO: 18396250 NR Description: putative phosphatidate phosphohydrolase; protein At3g02600.1, supported by cDNA: 121374. [Arabidopsis thaliana]
  misc_feature (1)..(314): Homolog of NCBI NO: 6957723 NR Description: putative phosphatidate phosphohydrolase
  misc_feature (1)..(314): Homolog of NCBI NO: 9621903 NR Description: phosphatidic acid phosphatase alpha [Vigna
  misc_feature (1)..(271): Homolog of NCBI NO: 15218051 NR Description: putative phosphatidic acid phosphatase; protein At1g15080.1, supported by cDNA: 37546., supported by cDNA: [Arabidopsis thaliana] >gi|25353095|pir||E86284 F9L1.2 Contains
  misc_feature (1)..(273): Homolog of NCBI NO: 15724220 NR Description: At2g01180/F10A8.6 [Arabidopsis thaliana]
  misc_feature (1)..(273): Homolog of NCBI NO: 18379166 NR Description: putative phosphatidic acid phosphatase; protein At2g01180.1, supported by cDNA: 19163., supported by cDNA: [Arabidopsis thaliana] >gi|14020927|dbj|BAB47575.1| phosphatidic
  misc_feature (1)..(273): Homolog of NCBI NO: 25353094 NR Description: probable phosphatidic acid phosphatase [imported] Arabidopsis thaliana >gi|26005743|dbj|BAC41334.1| prenyl
  misc_feature (1)..(273): Homolog of NCBI NO: 21554001 NR Description: putative phosphatidic acid phosphatase
  misc_feature (1)..(284): Homolog of NCBI NO: 10673973 NR Description: phosphatidic acid phosphatase beta [Vigna
  misc_feature (2)..(256): Homolog of NCBI NO: 34895654 NR Description: putative phosphatidic acid phosphatase alpha

SEQ ID NO: 74318 - protein, 299 aa, Arabidopsis thaliana; identical to SEQ ID NO: 27354
  peptide (1)..(299): Ceres Seq. ID no. 5002669
  misc_feature (93)..(233): Pfam Name: PAP2 superfamily Pfam Description: PAP2 superfamily
  misc_feature (1)..(299): Homolog of NCBI NO: 18396250 NR Description: putative phosphatidate phosphohydrolase; protein At3g02600.1, supported by cDNA: 121374. [Arabidopsis thaliana]
  misc_feature (1)..(299): Homolog of NCBI NO: 6957723 NR Description: putative phosphatidate phosphohydrolase
  misc_feature (1)..(299): Homolog of NCBI NO: 9621903 NR Description: phosphatidic acid phosphatase alpha [Vigna
  misc_feature (1)..(256): Homolog of NCBI NO: 15218051 NR Description: putative phosphatidic acid phosphatase; protein At1g15080.1, supported by cDNA: 37546., supported by cDNA: [Arabidopsis thaliana] >gi|25353095|pir||E86284 F9L1.2 Contains
  misc_feature (1)..(258): Homolog of NCBI NO: 15724220 NR Description: At2g01180/F10A8.6 [Arabidopsis thaliana]
  misc_feature (1)..(258): Homolog of NCBI NO: 18379166 NR Description: putative phosphatidic acid phosphatase; protein At2g01180.1, supported by cDNA: 19163., supported by cDNA: [Arabidopsis thaliana] >gi|14020927|dbj|BAB47575.1| phosphatidic
  misc_feature (1)..(258): Homolog of NCBI NO: 25353094 NR Description: probable phosphatidic acid phosphatase [imported] Arabidopsis thaliana >gi|26005743|dbj|BAC41334.1| prenyl
  misc_feature (1)..(258): Homolog of NCBI NO: 21554001 NR Description: putative phosphatidic acid phosphatase
  misc_feature (1)..(269): Homolog of NCBI NO: 10673973 NR Description: phosphatidic acid phosphatase beta [Vigna
  misc_feature (1)..(241): Homolog of NCBI NO: 34895654 NR Description: putative phosphatidic acid phosphatase alpha

SEQ ID NO: 74319 - protein, 292 aa, Arabidopsis thaliana; identical to SEQ ID NO: 27355
  peptide (1)..(292): Ceres Seq. ID no. 5002670
  misc_feature (86)..(226): Pfam Name: PAP2 superfamily Pfam Description: PAP2 superfamily
  misc_feature (1)..(292): Homolog of NCBI NO: 18396250 NR Description: putative phosphatidate phosphohydrolase; protein At3g02600.1, supported by cDNA: 121374. [Arabidopsis thaliana]
  misc_feature (1)..(292): Homolog of NCBI NO: 6957723 NR Description: putative phosphatidate phosphohydrolase
  misc_feature (1)..(292): Homolog of NCBI NO: 9621903 NR Description: phosphatidic acid phosphatase alpha [Vigna
  misc_feature (1)..(249): Homolog of NCBI NO: 15218051 NR Description: putative phosphatidic acid phosphatase; protein At1g15080.1, supported by cDNA: 37546., supported by cDNA: [Arabidopsis thaliana] >gi|25353095|pir||E86284 F9L1.2 Contains
  misc_feature (1)..(251): Homolog of NCBI NO: 15724220 NR Description: At2g01180/F10A8.6 [Arabidopsis thaliana]
  misc_feature (1)..(251): Homolog of NCBI NO: 18379166 NR Description: putative phosphatidic acid phosphatase; protein At2g01180.1, supported by cDNA: 19163., supported by cDNA: [Arabidopsis thaliana] >gi|14020927|dbj|BAB47575.1| phosphatidic
  misc_feature (1)..(251): Homolog of NCBI NO: 25353094 NR Description: probable phosphatidic acid phosphatase [imported] Arabidopsis thaliana >gi|26005743|dbj|BAC41334.1| prenyl
  misc_feature (1)..(251): Homolog of NCBI NO: 21554001 NR Description: putative phosphatidic acid phosphatase
  misc_feature (1)..(262): Homolog of NCBI NO: 10673973 NR Description: phosphatidic acid phosphatase beta [Vigna
  misc_feature (1)..(234): Homolog of NCBI NO: 34895654 NR Description: putative phosphatidic acid phosphatase alpha

SEQ ID NO: 74320 - DNA, 1436 bp, Arabidopsis thaliana
  misc_feature (1)..(1436): Ceres Seq. ID no. 5002697
  misc_feature: MA Experiment ID: 108594 Result: Down-regulated in Transcription
  misc_feature: MA Experiment 108594 PARAMETER Experiment Name: At_Ler-rhl_Root_cDNA_P Parameter: Plant Line Value: null
  misc_feature: MA Experiment ID: 108595 Result: Up-regulated in Transcription
  misc_feature: MA Experiment 108595 PARAMETER Experiment Name: At_Ler-pi_Ovule_cDNA_P Parameter: Plant Line Value: null
  misc_feature: MA Experiment ID: 20000184 Result: Down-regulated in Transcription
  misc_feature: MA Experiment 20000184 PARAMETER Experiment Name: At_Shoots__P Parameter: Age (day) Value: 7
  misc_feature: MA Experiment 20000184 PARAMETER Experiment Name: At_Shoots__P Parameter: Tissue Value: Shoots vs. Whole Plant
  misc_feature: MA Experiment ID: 20000185 Result: Up-regulated in Transcription
  misc_feature: MA Experiment 20000185 PARAMETER Experiment Name: At_Roots__P Parameter: Age (day) Value: 7 vs. 21
  misc_feature: MA Experiment 20000185 PARAMETER Experiment Name: At_Roots__P Parameter: Organism Value: A. thaliana
  misc_feature: MA Experiment 20000185 PARAMETER Experiment Name: At_Roots__P Parameter: Tissue Value: Roots vs. Whole Plant
  misc_feature: MA Experiment ID: 20000227 Result: Down-regulated in Transcription
  misc_feature: MA Experiment 20000227 PARAMETER Experiment Name: At_Root-Tips-vs-Tops_P Parameter: Tissue Value: Root Tips vs. Root Tops
  misc_feature: MA Experiment ID: 20000439 Result: Up-regulated in Transcription
  misc_feature: MA Experiment 20000439 PARAMETER Experiment Name: At_Roots__P Parameter: Age (day) Value: 14 vs. 21
  misc_feature: MA Experiment 20000439 PARAMETER Experiment Name: At_Roots__P Parameter: Organism Value: A. thaliana
  misc_feature: MA Experiment 20000439 PARAMETER Experiment Name: At_Roots__P Parameter: Tissue Value: Roots vs. Whole Plant
  misc_feature: MA Experiment ID: 20000495 Result: Up-regulated in Transcription
  misc_feature: MA Experiment 20000495 PARAMETER Experiment Name: At_Guard_Cells_P Parameter: Harvest Date Value: 8/2/2002
  misc_feature: MA Experiment 20000495 PARAMETER Experiment Name: At_Guard_Cells_P Parameter: Organism Value: A. thaliana
  misc_feature: MA Experiment 20000495 PARAMETER Experiment Name: At_Guard_Cells_P Parameter: Tissue Value: Guard Cells vs. Leaves
  misc_feature: Pfam Name: DUF6 Pfam Description: Integral membrane protein DUF6
atatacacaaaccccttagagaaacaaaaagaatacaaaaagaagagagagattagttattaacttattcataataagtgtaattacttcgtatttacttttttttggttagcagtcgactagtaatcaataatgggttactgcgatggtaaatggacaccggtgattattatggttatgatcaattcagcgctgggtttagctaatgctttggttaaaaaagtactcgatggtggtgttaaccatatggttatcgcaacatatcgtcttgctatttcaaccctatttttggcaccaatcgcatttttttgggaacggaaaacgagaccgacactaacgctcaacatcttggttcagcttttcttcagtgctcttgttggggcaagtttgactcagtatttcttcctattggggctatcatacacatcggctacgttggcatgtgcttttattagcatgacgcctgcgattacattcgttatggctctaatattcagggtagagaagctaaacatgaaaagcaaagcaggtatggggatggtgatgggcgcgttgatatgcataggaggagctttattattaacaatgtacaaaggtgttcccttgacaaaacttcggaaactagaaacccatcagttgataaacaataaccacgctatgaaaccagagaattggataataggatgcgtacttctctttgcgggtagtagctgtttcgggtcgtggatgctgatacaagccaaagtgaacgagaaatacccttgtcaatactcgagtactgtcgtattatccttctttggcaccatccaatgcgcccttctaagcctcatcaaatctcgagatatcacggcttggatcctcacagataaacttgatatcgttaccattgtttacgcgggagcagtagcacaaggaatatgtacggttggaacgtcttggtgcatcagaaagagaggacctatctttacttctatatttaccccggtggggcttatatttgcaacactatttgatttcttgatccttcatcgtcaaattttcctaggaagtgttgtcggatctggggttgtaatcttcggactatacatattcttgttgggaaaagtcaggctaatgaaagaagagtgtgaaaagaagttaccttgtcgttttaatgaagatgatcaagaagaagatgatgatgaacaatacaaaaagggtcatcttatggttgttccaatgactccttgataagattagacttttttttttttcttcttcttcacttcgtacattatttagtaaaaccattgaccggtgaaaattacatggactagtctaacaacggttcaaaaaactagtcacatgtttttttttttttgctttttcttttctttcccttttttttgttttgcaatgtaaaacttttattgcaataataaaaaaatctcctttgc

SEQ ID NO: 74321 - protein, 365 aa, Arabidopsis thaliana; identical to SEQ ID NO: 25404
  peptide (1)..(365): Ceres Seq. ID no. 5002698
  misc_feature: Pfam Name: DUF6 Pfam Description: Integral membrane protein DUF6
  misc_feature (1)..(365): Homolog of NCBI NO: 15234182 NR Description: hypothetical protein; protein id: At4g01440.1, by cDNA: 40560. [Arabidopsis thaliana] >gi|25407108|pir||G85018
  misc_feature (184)..(365): Homolog of NCBI NO: 7486353 NR Description: hypothetical protein F3D13.3 - Arabidopsis >gi|3193308|gb|AAC19291.1| similar to Medicago truncatula MtN2
  misc_feature (84)..(158): Homolog of NCBI NO: 7486353 NR Description: hypothetical protein F3D13.3 - Arabidopsis >gi|3193308|gb|AAC19291.1| similar to Medicago truncatula MtN2
  misc_feature (1)..(142): Homolog of NCBI NO: 7486353 NR Description: hypothetical protein F3D13.3 - Arabidopsis >gi|3193308|gb|AAC19291.1| similar to Medicago truncatula MtN2
  misc_feature (1)..(365): Homolog of NCBI NO: 15234185 NR Description: unknown protein; protein id: At4g01450.1
  misc_feature (84)..(365): Homolog of NCBI NO: 7485384 NR Description: hypothetical protein F11O4.14 - Arabidopsis >gi|3695385|gb|AAC62788.1| similar to Medicago truncatula MtN21
  misc_feature (1)..(107): Homolog of NCBI NO: 7485384 NR Description: hypothetical protein F11O4.14 - Arabidopsis >gi|3695385|gb|AAC62788.1| similar to Medicago truncatula MtN21
  misc_feature (1)..(305): Homolog of NCBI NO: 30678880 NR Description: nodulin MtN21 family protein [Arabidopsis >gi|26449909|dbj|BAC42076.1| unknown protein [Arabidopsis >gi|28973211|gb|AAO63930.1| unknown protein [Arabidopsis
  misc_feature (7)..(324): Homolog of NCBI NO: 18378792 NR Description: expressed protein; protein id: At1g01070.1,
  misc_feature (7)..(348): Homolog of NCBI NO: 15234179 NR Description: unknown protein; protein id: At4g01430.1, by cDNA: gi_20260641 [Arabidopsis thaliana]

SEQ ID NO: 74322 - protein, 352 aa, Arabidopsis thaliana; identical to SEQ ID NO: 25405
  peptide (1)..(352): Ceres Seq. ID no. 5002699
  misc_feature: Pfam Name: DUF6 Pfam Description: Integral membrane protein DUF6
  misc_feature (1)..(352): Homolog of NCBI NO: 15234182 NR Description: hypothetical protein; protein id: At4g01440.1, by cDNA: 40560. [Arabidopsis thaliana] >gi|25407108|pir||G85018
  misc_feature (171)..(352): Homolog of NCBI NO: 7486353 NR Description: hypothetical protein F3D13.3 - Arabidopsis >gi|3193308|gb|AAC19291.1| similar to Medicago truncatula MtN2
  misc_feature (71)..(145): Homolog of NCBI NO: 7486353 NR Description: hypothetical protein F3D13.3 - Arabidopsis >gi|3193308|gb|AAC19291.1| similar to Medicago truncatula MtN2
  misc_feature (1)..(129): Homolog of NCBI NO: 7486353 NR Description: hypothetical protein F3D13.3 - Arabidopsis >gi|3193308|gb|AAC19291.1| similar to Medicago truncatula MtN2
  misc_feature (1)..(352): Homolog of NCBI NO: 15234185 NR Description: unknown protein; protein id: At4g01450.1
  misc_feature (71)..(352): Homolog of NCBI NO: 7485384 NR Description: hypothetical protein F11O4.14 - Arabidopsis >gi|3695385|gb|AAC62788.1| similar to Medicago truncatula MtN21
  misc_feature (1)..(94): Homolog of NCBI NO: 7485384 NR Description: hypothetical protein F11O4.14 - Arabidopsis >gi|3695385|gb|AAC62788.1| similar to Medicago truncatula MtN21
  misc_feature (1)..(292): Homolog of NCBI NO: 30678880 NR Description: nodulin MtN21 family protein [Arabidopsis >gi|26449909|dbj|BAC42076.1| unknown protein [Arabidopsis >gi|28973211|gb|AAO63930.1| unknown protein [Arabidopsis
  misc_feature (1)..(311): Homolog of NCBI NO: 18378792 NR Description: expressed protein; protein id: At1g01070.1,
  misc_feature (1)..(335): Homolog of NCBI NO: 15234179 NR Description: unknown protein; protein id: At4g01430.1, by cDNA: gi_20260641 [Arabidopsis thaliana]

SEQ ID NO: 74323 - protein, 350 aa, Arabidopsis thaliana; identical to SEQ ID NO: 25406
  peptide (1)..(350): Ceres Seq. ID no. 5002700
  misc_feature: Pfam Name: DUF6 Pfam Description: Integral membrane protein DUF6
  misc_feature (1)..(350): Homolog of NCBI NO: 15234182 NR Description: hypothetical protein; protein id: At4g01440.1, by cDNA: 40560. [Arabidopsis thaliana] >gi|25407108|pir||G85018
  misc_feature (169)..(350): Homolog of NCBI NO: 7486353 NR Description: hypothetical protein F3D13.3 - Arabidopsis >gi|3193308|gb|AAC19291.1| similar to Medicago truncatula MtN2
  misc_feature (69)..(143): Homolog of NCBI NO: 7486353 NR Description: hypothetical protein F3D13.3 - Arabidopsis >gi|3193308|gb|AAC19291.1| similar to Medicago truncatula MtN2
  misc_feature (1)..(127): Homolog of NCBI NO: 7486353 NR Description: hypothetical protein F3D13.3 - Arabidopsis >gi|3193308|gb|AAC19291.1| similar to Medicago truncatula MtN2
  misc_feature (1)..(350): Homolog of NCBI NO: 15234185 NR Description: unknown protein; protein id: At4g01450.1
  misc_feature (69)..(350): Homolog of NCBI NO: 7485384 NR Description: hypothetical protein F11O4.14 - Arabidopsis >gi|3695385|gb|AAC62788.1| similar to Medicago truncatula MtN21
  misc_feature (1)..(92): Homolog of NCBI NO: 7485384 NR Description: hypothetical protein F11O4.14 - Arabidopsis >gi|3695385|gb|AAC62788.1| similar to Medicago truncatula MtN21
  misc_feature (1)..(290): Homolog of NCBI NO: 30678880 NR Description: nodulin MtN21 family protein [Arabidopsis >gi|26449909|dbj|BAC42076.1| unknown protein [Arabidopsis >gi|28973211|gb|AAO63930.1| unknown protein [Arabidopsis
  misc_feature (1)..(309): Homolog of NCBI NO: 18378792 NR Description: expressed protein; protein id: At1g01070.1,
  misc_feature (1)..(333): Homolog of NCBI NO: 15234179 NR Description: unknown protein; protein id: At4g01430.1, by cDNA: gi_20260641 [Arabidopsis thaliana]

SEQ ID NO: 74324 - DNA, 1278 bp, Arabidopsis thaliana
  misc_feature (1)..(1278): Ceres Seq. ID no. 5002711
  misc_feature: MA Experiment ID: 108572 Result: Up-regulated in Transcription
  misc_feature: MA Experiment 108572 PARAMETER Experiment Name: At_Drought_cDNA_P Parameter: Timepoint (hr) Value: 1
  misc_feature: MA Experiment 108572 PARAMETER Experiment Name: At_Drought_cDNA_P Parameter: Tissue Value: Aerial
  misc_feature: MA Experiment 108572 PARAMETER Experiment Name: At_Drought_cDNA_P Parameter: Treatment Value: Drought vs. No Drought
  misc_feature: MA Experiment ID: 20000173 Result: Up-regulated in Transcription
  misc_feature: MA Experiment 20000173 PARAMETER Experiment Name: At_42deg_Heat_P Parameter: Age (day) Value: 14
  misc_feature: MA Experiment 20000173 PARAMETER Experiment Name: At_42deg_Heat_P Parameter: Organism Value: A. thaliana
  misc_feature: MA Experiment 20000173 PARAMETER Experiment Name: At_42deg_Heat_P Parameter: Plant Line Value: WS
  misc_feature: MA Experiment 20000173 PARAMETER Experiment Name: At_42deg_Heat_P Parameter: Temperature (deg C) Value: 42 vs. 22
  misc_feature: MA Experiment 20000173 PARAMETER Experiment Name: At_42deg_Heat_P Parameter: Timepoint (hr) Value: 6
  misc_feature: MA Experiment 20000173 PARAMETER Experiment Name: At_42deg_Heat_P Parameter: Tissue Value: Aerial
  misc_feature: MA Experiment ID: 20000179 Result: Up-regulated in Transcription
  misc_feature: MA Experiment 20000179 PARAMETER Experiment Name: At_Germinating_Seeds_P Parameter: Age (hr) Value: 6 vs. 0
  misc_feature: MA Experiment 20000179 PARAMETER Experiment Name: At_Germinating_Seeds_P Parameter: Tissue Value: Germinating Seeds
  misc_feature: MA Experiment ID: 20000180 Result: Up-regulated in Transcription
  misc_feature: MA Experiment 20000180 PARAMETER Experiment Name: At_Germinating_Seeds_P Parameter: Age (hr) Value: 24 vs. 0
  misc_feature: MA Experiment 20000180 PARAMETER Experiment Name: At_Germinating_Seeds_P Parameter: Tissue Value: Germinating Seeds
  misc_feature: MA Experiment ID: 20000264 Result: Up-regulated in Transcription
  misc_feature: MA Experiment 20000264 PARAMETER Experiment Name: At_Open_Flower_P Parameter: Age (day) Value: 21
  misc_feature: MA Experiment 20000264 PARAMETER Experiment Name: At_Open_Flower_P Parameter: Plant Line Value: WS
  misc_feature: MA Experiment 20000264 PARAMETER Experiment Name: At_Open_Flower_P Parameter: Tissue Value: Open Flower vs. Whole Plant
  misc_feature: MA Experiment ID: 20001555 Result: Down-regulated in Transcription
  misc_feature: MA Experiment 20001555 PARAMETER Experiment Name: At_Drought_Soil_Dry_P Parameter: Age (day) Value: 24
  misc_feature: MA Experiment 20001555 PARAMETER Experiment Name: At_Drought_Soil_Dry_P Parameter: Organism Value: A. thaliana
  misc_feature: MA Experiment 20001555 PARAMETER Experiment Name: At_Drought_Soil_Dry_P Parameter: Plant Line Value: WS
  misc_feature: MA Experiment 20001555 PARAMETER Experiment Name: At_Drought_Soil_Dry_P Parameter: Post Timepoint (hr) Value: None
  misc_feature: MA Experiment 20001555 PARAMETER Experiment Name: At_Drought_Soil_Dry_P Parameter: Post-Treatment Value: None
  misc_feature: MA Experiment 20001555 PARAMETER Experiment Name: At_Drought_Soil_Dry_P Parameter: Timepoint (day) Value: 10
  misc_feature: MA Experiment 20001555 PARAMETER Experiment Name: At_Drought_Soil_Dry_P Parameter: Treatment Value: Drought vs. No Drought
  misc_feature: MA Experiment ID: 20001905 Result: Up-regulated in Transcription
  misc_feature: MA Experiment 20001905 PARAMETER Experiment Name: At_Drought_Reproduction_P Parameter: Age (day) Value: 40
  misc_feature: MA Experiment 20001905 PARAMETER Experiment Name: At_Drought_Reproduction_P Parameter: Organism Value: A. thaliana
  misc_feature: MA Experiment 20001905 PARAMETER Experiment Name: At_Drought_Reproduction_P Parameter: Plant Line Value: WS
  misc_feature: MA Experiment 20001905 PARAMETER Experiment Name: At_Drought_Reproduction_P Parameter: Timepoint (day) Value: 10
  misc_feature: MA Experiment 20001905 PARAMETER Experiment Name: At_Drought_Reproduction_P Parameter: Tissue Value: Rosettes
  misc_feature: MA Experiment 20001905 PARAMETER Experiment Name: At_Drought_Reproduction_P Parameter: Treatment Value: Drought vs. No Drought
  misc_feature: Pfam Name: TPX2 Pfam Description: Targeting protein for Xklp2 (TPX2)
accattccaaaatagtcaccgcccaaaaaaaaaaaaaaaaaaaaaaatcctttttttctcttcttgagagagagaaagagagagggagacaagtttgttctggataaaaagacaattcatttctattttaattgtctgcaaaattctcacgggccatcggagagaggagacagaggtggtgctgcacaagaatccttcctcctatatcctacaagactttggaatgggaagagaagttgttgaggtgcttatggaccgaaacgccgacgtttcaagcgctagagttcatgttgctcctaagatagctgcagaggagactgatgaggaatttgaagtcaaagaatgcacagaggagaagtctctttctgagaatgcaccaaatgttggatctgctgagagagttggagctcagaaatcacctaaaacccgtaatggaaatgctaaagtttcaaagcaggatgctcctcttctcgcggtgaggaagccattgcaacccgagaacaagaagcatattgatgacgaagataattgctccattgcttcttccgttgcaacttccatgaggatgggtaagtctggattgacttatggaagtgctccaacgtttaggagtgctcaacgtgctgagaaacgcaaggagtattaccaaaagctcgaggagaaaaaccaagcgcttgaagctgagaggaacgagcttgaacagaggcaaaaggatgaacaagaagcagccttgaagcaacttagaaagaatctcaagttcaaggctaaacccgtccccaacttctactacgaggcacctcctgcgaaacctgagctcaagaagcttcctttgacacgtcccaagtcgccaaaactgatcctttctcggagaaaaagcttcagcgacgcagtcagctcgtcttcccgtgaagagattctgaagacagtctctaaccggaaccgacacagcactggaacagttcagaacaaagacgatgatcacaggaacaagaacaccaatgctgcgcacgacagccctcgtgtcagatcaggcaaaggtaaatccggattgaaaccagtgaacgagtcctcagaagaagcttgaaatttcaaaagatgatgctttgttggtctaacttgatcttgccggagaaaatgtaaaatcaaagactctttgtttttcggttatttccggtatacgtttggttcactatgtaactgtcttttttcgattttaagttttaacatgaaaaactttatgttgattgttgaacaactcctcctaatgttgaaatttgt

SEQ ID NO: 74325 - protein, 286 aa, Arabidopsis thaliana; identical to SEQ ID NO: 41332
  peptide (1)..(286): Ceres Seq. ID no. 5002712
  misc_feature: Pfam Name: TPX2 Pfam Description: Targeting protein for Xklp2 (TPX2)
  misc_feature (1)..(286): Homolog of NCBI NO: 30679219 NR Description: expressed protein [Arabidopsis thaliana]
  misc_feature (1)..(286): Homolog of NCBI NO: 6175167 NR Description: unknown protein [Arabidopsis thaliana]
  misc_feature (1)..(286): Homolog of NCBI NO: 18396961 NR Description: expressed protein; protein id: At3g04630.1,
  misc_feature (1)..(286): Homolog of NCBI NO: 21618286 NR Description: unknown [Arabidopsis thaliana]
  misc_feature (94)..(242): Homolog of NCBI NO: 28453880 NR Description: WAVE-DAMPENED2 [Arabidopsis thaliana]
  misc_feature (1)..(50): Homolog of NCBI NO: 28453880 NR Description: WAVE-DAMPENED2 [Arabidopsis thaliana]
  misc_feature (46)..(286): Homolog of NCBI NO: 18404945 NR Description: expressed protein; protein id: At1g54460.1, by cDNA: 142094., supported by cDNA: gi_13605600, supported by gi_15777864 [Arabidopsis thaliana]
  misc_feature (46)..(286): Homolog of NCBI NO: 21553401 NR Description: unknown [Arabidopsis thaliana]
  misc_feature (42)..(259): Homolog of NCBI NO: 9294199 NR Description: gb|AAF04893.1~gene_id:MXC7.13~similar to unknown
  misc_feature (42)..(259): Homolog of NCBI NO: 15228950 NR Description: unknown protein; protein id: At3g23090.1 thaliana] >gi|27765054|gb|AAO23648.1| At3g23090 [Arabidopsis

SEQ ID NO: 74326 - protein, 277 aa, Arabidopsis thaliana; identical to SEQ ID NO: 41333
  peptide (1)..(277): Ceres Seq. ID no. 5002713
  misc_feature: Pfam Name: TPX2 Pfam Description: Targeting protein for Xklp2 (TPX2)
  misc_feature (1)..(277): Homolog of NCBI NO: 30679219 NR Description: expressed protein [Arabidopsis thaliana]
  misc_feature (1)..(277): Homolog of NCBI NO: 6175167 NR Description: unknown protein [Arabidopsis thaliana]
  misc_feature (1)..(277): Homolog of NCBI NO: 18396961 NR Description: expressed protein; protein id: At3g04630.1,
  misc_feature (1)..(277): Homolog of NCBI NO: 21618286 NR Description: unknown [Arabidopsis thaliana]
  misc_feature (85)..(233): Homolog of NCBI NO: 28453880 NR Description: WAVE-DAMPENED2 [Arabidopsis thaliana]
  misc_feature (1)..(41): Homolog of NCBI NO: 28453880 NR Description: WAVE-DAMPENED2 [Arabidopsis thaliana]
  misc_feature (37)..(277): Homolog of NCBI NO: 18404945 NR Description: expressed protein; protein id: At1g54460.1, by cDNA: 142094., supported by cDNA: gi_13605600, supported by gi_15777864 [Arabidopsis thaliana]
  misc_feature (37)..(277): Homolog of NCBI NO: 21553401 NR Description: unknown [Arabidopsis thaliana]
  misc_feature (33)..(250): Homolog of NCBI NO: 9294199 NR Description: gb|AAF04893.1~gene_id:MXC7.13~similar to unknown
  misc_feature (33)..(250): Homolog of NCBI NO: 15228950 NR Description: unknown protein; protein id: At3g23090.1 thaliana] >gi|27765054|gb|AAO23648.1| At3g23090 [Arabidopsis

SEQ ID NO: 74327 - protein, 174 aa, Arabidopsis thaliana; identical to SEQ ID NO: 41334
  peptide (1)..(174): Ceres Seq. ID no. 5002714
  misc_feature: Pfam Name: TPX2 Pfam Description: Targeting protein for Xklp2 (TPX2)
  misc_feature (1)..(174): Homolog of NCBI NO: 30679219 NR Description: expressed protein [Arabidopsis thaliana]
  misc_feature (1)..(174): Homolog of NCBI NO: 6175167 NR Description: unknown protein [Arabidopsis thaliana]
  misc_feature (1)..(174): Homolog of NCBI NO: 18396961 NR Description: expressed protein; protein id: At3g04630.1,
  misc_feature (1)..(174): Homolog of NCBI NO: 21618286 NR Description: unknown [Arabidopsis thaliana]
  misc_feature (1)..(130): Homolog of NCBI NO: 28453880 NR Description: WAVE-DAMPENED2 [Arabidopsis thaliana]
  misc_feature (1)..(174): Homolog of NCBI NO: 18404945 NR Description: expressed protein; protein id: At1g54460.1, by cDNA: 142094., supported by cDNA: gi_13605600, supported by gi_15777864 [Arabidopsis thaliana]
  misc_feature (1)..(174): Homolog of NCBI NO: 21553401 NR Description: unknown [Arabidopsis thaliana]
  misc_feature (1)..(147): Homolog of NCBI NO: 9294199 NR Description: gb|AAF04893.1~gene_id:MXC7.13~similar to unknown
  misc_feature (1)..(147): Homolog of NCBI NO: 15228950 NR Description: unknown protein; protein id: At3g23090.1 thaliana] >gi|27765054|gb|AAO23648.1| At3g23090 [Arabidopsis
  misc_feature (1)..(142): Homolog of NCBI NO: 34897180 NR Description: unknown protein [Oryza sativa (japonica

SEQ ID NO: 74328 - DNA, 706 bp, Arabidopsis thaliana
  misc_feature (1)..(706): Ceres Seq. ID no. 5002745
  misc_feature: MA Experiment ID: 108464 Result: Up-regulated in Transcription
  misc_feature: MA Experiment 108464 PARAMETER Experiment Name: At_Germinating_Seeds_cDNA_P Parameter: Age (day) Value: 4 vs. 0
  misc_feature: MA Experiment 108464 PARAMETER Experiment Name: At_Germinating_Seeds_cDNA_P Parameter: Tissue Value: Germinating Seeds
  misc_feature: MA Experiment ID: 20000111 Result: Down-regulated in Transcription
  misc_feature: MA Experiment 20000111 PARAMETER Experiment Name: At_42deg_Heat_cDNA_P Parameter: Temperature (deg C) Value: 42 vs. 22
  misc_feature: MA Experiment 20000111 PARAMETER Experiment Name: At_42deg_Heat_cDNA_P Parameter: Timepoint (hr) Value: 6
  misc_feature: MA Experiment 20000111 PARAMETER Experiment Name: At_42deg_Heat_cDNA_P Parameter: Tissue Value: Aerial
  misc_feature: MA Experiment ID: 20000180 Result: Up-regulated in Transcription
  misc_feature: MA Experiment 20000180 PARAMETER Experiment Name: At_Germinating_Seeds_P Parameter: Age (hr) Value: 24 vs. 0
  misc_feature: MA Experiment 20000180 PARAMETER Experiment Name: At_Germinating_Seeds_P Parameter: Tissue Value: Germinating Seeds
gtacaagtggaattttgaaaaaagaagcagagagcgatggagaaagtggttgatctcttcggagtcggagaagctaattcccagaagctactcgaaggaggcaaagatctcagcgagatccaacagggattgttcataggatcagtagctgaagcgaataacaaggattttctcaaaagctctaatatcactcatgtcttaaccgttgctgtggccttggctcctccttatcctgatgattttgtctacaaagtcattgaagtatatttcgatgagtgttatagcttcatcgaccaagctattcaatctggtggtggtgttttggttcattgcttcatgggaatgtctaggagtgtgactatagtggtggcttacctgatgaaaaagcatggaatgggattctctaaagctatggaacttgtaaggagccgacgacatcaggcatatcctaatcccggtttcatttcgcagctccagcaatttgaaaaatccatccaaggtaatgcatgattgcttcagctgataagaagattcaagatagtggcatgatgaactctcatgaaattccggcaagtgtcttcagccccatgttggccaaaaaagttgattggtttcgtgctgtgaaggattttttcttgtgaactattgatggtgagcactttgccatgtccattagccaattgaaatgaatgaaaacgcagaattt

SEQ ID NO: 74329 - protein, 157 aa, Arabidopsis thaliana; identical to SEQ ID NO: 30460
  peptide (1)..(157): Ceres Seq. ID no. 5002746
  misc_feature (24)..(152): Pfam Name: Dual specificity phosphatase, catalytic domain Pfam Description: Dual specificity phosphatase, catalytic domain
  misc_feature (1)..(157): Homolog of NCBI NO: 18397475 NR Description: putative dual-specificity protein phosphatase;
  misc_feature (1)..(157): Homolog of NCBI NO: 30679726 NR Description: dual-specificity protein phosphatase -related
  misc_feature (26)..(154): Homolog of NCBI NO: 9294518 NR Description: dual-specificity protein phosphatase-like protein
  misc_feature (26)..(154): Homolog of NCBI NO: 15229482 NR Description: dual-specificity protein phosphatase; protein id: [Arabidopsis thaliana] >gi|4150963|emb|CAA77232.1| DsPTP1 protein
  misc_feature (28)..(155): Homolog of NCBI NO: 34905574 NR Description: hypothetical protein~similar to Arabidopsis
  misc_feature (74)..(154): Homolog of NCBI NO: 19528569 NR Description: RH25447p [Drosophila melanogaster]
  misc_feature (24)..(58): Homolog of NCBI NO: 19528569 NR Description: RH25447p [Drosophila melanogaster]
  misc_feature (20)..(151): Homolog of NCBI NO: 24643332 NR Description: CG14211-PB [Drosophila melanogaster]
  misc_feature (74)..(154): Homolog of NCBI NO: 24643158 NR Description: CG7378-PA [Drosophila melanogaster]
  misc_feature (24)..(58): Homolog of NCBI NO: 24643158 NR Description: CG7378-PA [Drosophila melanogaster]

SEQ ID NO: 74330 - DNA, 1264 bp, Arabidopsis thaliana
  misc_feature (1)..(1264): Ceres Seq. ID no. 5002763
  misc_feature: MA Experiment ID: 108434 Result: Up-regulated in Transcription
  misc_feature: MA Experiment 108434 PARAMETER Experiment Name: At_Root_Tips_cDNA_P Parameter: Tissue Value: Root Tips
  misc_feature: MA Experiment ID: 108461 Result: Up-regulated in Transcription
  misc_feature: MA Experiment 108461 PARAMETER Experiment Name: At_Germinating_Seeds_cDNA_P Parameter: Age (day) Value: 1 vs. 0
  misc_feature: MA Experiment 108461 PARAMETER Experiment Name: At_Germinating_Seeds_cDNA_P Parameter: Tissue Value: Germinating Seeds
  misc_feature: MA Experiment ID: 108462 Result: Up-regulated in Transcription
  misc_feature: MA Experiment 108462 PARAMETER Experiment Name: At_Germinating_Seeds_cDNA_P Parameter: Age (day) Value: 2 vs. 0
  misc_feature: MA Experiment 108462 PARAMETER Experiment Name: At_Germinating_Seeds_cDNA_P Parameter: Tissue Value: Germinating Seeds
  misc_feature: MA Experiment ID: 108463 Result: Up-regulated in Transcription
  misc_feature: MA Experiment 108463 PARAMETER Experiment Name: At_Germinating_Seeds_cDNA_P Parameter: Age (day) Value: 3 vs. 0
  misc_feature: MA Experiment 108463 PARAMETER Experiment Name: At_Germinating_Seeds_cDNA_P Parameter: Tissue Value: Germinating Seeds
  misc_feature: MA Experiment ID: 108464 Result: Up-regulated in Transcription
  misc_feature: MA Experiment 108464 PARAMETER Experiment Name: At_Germinating_Seeds_cDNA_P Parameter: Age (day) Value: 4 vs. 0
  misc_feature: MA Experiment 108464 PARAMETER Experiment Name: At_Germinating_Seeds_cDNA_P Parameter: Tissue Value: Germinating Seeds
  misc_feature: MA Experiment ID: 108577 Result: Down-regulated in Transcription
  misc_feature: MA Experiment 108577 PARAMETER Experiment Name: At_42deg_Heat_cDNA_P Parameter: Temperature (deg C) Value: 42 vs. 22
  misc_feature: MA Experiment 108577 PARAMETER Experiment Name: At_42deg_Heat_cDNA_P Parameter: Timepoint (hr) Value: 6
  misc_feature: MA Experiment 108577 PARAMETER Experiment Name: At_42deg_Heat_cDNA_P Parameter: Tissue Value: Aerial
  misc_feature: MA Experiment ID: 20000111 Result: Down-regulated in Transcription
  misc_feature: MA Experiment 20000111 PARAMETER Experiment Name: At_42deg_Heat_cDNA_P Parameter: Temperature (deg C) Value: 42 vs. 22
  misc_feature: MA Experiment 20000111 PARAMETER Experiment Name: At_42deg_Heat_cDNA_P Parameter: Timepoint (hr) Value: 6
  misc_feature: MA Experiment 20000111 PARAMETER Experiment Name: At_42deg_Heat_cDNA_P Parameter: Tissue Value: Aerial
  misc_feature: MA Experiment ID: 20000113 Result: Down-regulated in Transcription
  misc_feature: MA Experiment 20000113 PARAMETER Experiment Name: At_42deg_Heat_cDNA_P Parameter: Temperature (deg C) Value: 42 vs. 22
  misc_feature: MA Experiment 20000113 PARAMETER Experiment Name: At_42deg_Heat_cDNA_P Parameter: Timepoint (hr) Value: 8
  misc_feature: MA Experiment 20000113 PARAMETER Experiment Name: At_42deg_Heat_cDNA_P Parameter: Tissue Value: Aerial
  misc_feature: MA Experiment ID: 20000144 Result: Down-regulated in Transcription
  misc_feature: MA Experiment 20000144 PARAMETER Experiment Name: At_42deg_Heat_cDNA_P Parameter: Temperature (deg C) Value: 42 vs. 22
  misc_feature: MA Experiment 20000144 PARAMETER Experiment Name: At_42deg_Heat_cDNA_P Parameter: Timepoint (hr) Value: 1
  misc_feature: MA Experiment 20000144 PARAMETER Experiment Name: At_42deg_Heat_cDNA_P Parameter: Tissue Value: Aerial
  misc_feature: MA Experiment ID: 20000171 Result: Down-regulated in Transcription
  misc_feature: MA Experiment 20000171 PARAMETER Experiment Name: At_42deg_Heat_P Parameter: Age (day) Value: 14
  misc_feature: MA Experiment 20000171 PARAMETER Experiment Name: At_42deg_Heat_P Parameter: Organism Value: A. thaliana
  misc_feature: MA Experiment 20000171 PARAMETER Experiment Name: At_42deg_Heat_P Parameter: Plant Line Value: WS
  misc_feature: MA Experiment 20000171 PARAMETER Experiment Name: At_42deg_Heat_P Parameter: Temperature (deg C) Value: 42 vs. 22
  misc_feature: MA Experiment 20000171 PARAMETER Experiment Name: At_42deg_Heat_P Parameter: Timepoint (hr) Value: 1
  misc_feature: MA Experiment 20000171 PARAMETER Experiment Name: At_42deg_Heat_P Parameter: Tissue Value: Aerial
  misc_feature: MA Experiment ID: 20000173 Result: Down-regulated in Transcription
  misc_feature: MA Experiment 20000173 PARAMETER Experiment Name: At_42deg_Heat_P Parameter: Age (day) Value: 14
  misc_feature: MA Experiment 20000173 PARAMETER Experiment Name: At_42deg_Heat_P Parameter: Organism Value: A. thaliana
  misc_feature: MA Experiment 20000173 PARAMETER Experiment Name: At_42deg_Heat_P Parameter: Plant Line Value: WS
  misc_feature: MA Experiment 20000173 PARAMETER Experiment Name: At_42deg_Heat_P Parameter: Temperature (deg C) Value: 42 vs. 22
  misc_feature: MA Experiment 20000173 PARAMETER Experiment Name: At_42deg_Heat_P Parameter: Timepoint (hr) Value: 6
  misc_feature: MA Experiment 20000173 PARAMETER Experiment Name: At_42deg_Heat_P Parameter: Tissue Value: Aerial
  misc_feature: MA Experiment ID: 20000180 Result: Up-regulated in Transcription
  misc_feature: MA Experiment 20000180 PARAMETER Experiment Name: At_Germinating_Seeds_P Parameter: Age (hr) Value: 24 vs. 0
  misc_feature: MA Experiment 20000180 PARAMETER Experiment Name: At_Germinating_Seeds_P Parameter: Tissue Value: Germinating Seeds
  misc_feature: MA Experiment ID: 20001906 Result: Down-regulated in Transcription
  misc_feature: MA Experiment 20001906 PARAMETER Experiment Name: At_Drought_Reproduction_P Parameter: Age (day) Value: 35
  misc_feature: MA Experiment 20001906 PARAMETER Experiment Name: At_Drought_Reproduction_P Parameter: Organism Value: A. thaliana
  misc_feature: MA Experiment 20001906 PARAMETER Experiment Name: At_Drought_Reproduction_P Parameter: Plant Line Value: WS
  misc_feature: MA Experiment 20001906 PARAMETER Experiment Name: At_Drought_Reproduction_P Parameter: Timepoint (day) Value: 5
  misc_feature: MA Experiment 20001906 PARAMETER Experiment Name: At_Drought_Reproduction_P Parameter: Tissue Value: Siliques
  misc_feature: MA Experiment 20001906 PARAMETER Experiment Name: At_Drought_Reproduction_P Parameter: Treatment Value: Drought vs. No Drought
gaccggatccgaataattggatccaccggatcggagggaaaaaaaacaaacccgtgacgccattaacgaaggtcgagcttccttgacaccacacaatgcattctcctcgtaagctatttcacgcgcggtcatcactcgccacgcgccgatcaacggctcttgtcgtattaacttccctagctattggaatcgccggtttcacatttggactcgccgtaattcttataccgggtctccgattaaccggtcgtaattgcttgacgaacactcctccgaagacggtgcgagtcgtttgggacgtcgccggaaatagtaatggcgttgttagtggcgaaaagaagaggcataaggttatgggattcgttggtattcaaaccggatttggatctgctggccggagacgatcacttagaaagacatggatgccgtcagatccagaaggtcttcgacgtttggaagaatctacggggttagccatcaggtttatgataggaaaaacgaaaagtgaggagaaaatggctcagctcagaagagaaatcgcagagtatgatgacttcgtactgctagatatcgaagaggagtacagtaagcttccttacaaaactttggctttcttcaaagctgcgtacgcgctttatgattctgagttctatgtcaaagctgatgatgatatatacttgaggccagatcgactctctctgctattggcgaaagagcggagtcactctcagacgtacctaggatgcttgaaaaagggtccggttttcacagatcctaagctcaaatggtatgaaccattgtctcatctgctgggaaaagagtactttcttcatgcttatggcccgatttatgctctctctgctgatgtggtagccagtttggttgccctcaagaataacagtttcaggatgtttaacaacgaggacgtaacaataggtgcgtggatgctggcaatgaatgtcaaccacgagaaccatcacatcctttgcgaaccagaatgctcaccttcttctgttgctgtttgggacatccctaaatgctcaggtctttgtaacccagagaaaaggatgttggaacttcacaagcaagaaagctgctcgaaaagcccaactttgccatcagatgatgaatgatattatttctcttatcaaatgtctttataaacctcttctcagtggtcgaagctctatcacttgcagattcatttcttcgagcgaacctgcaacgagattatttcacatagattcaagtttagagttcactt

SEQ ID NO: 74331 - protein, 345 aa, Arabidopsis thaliana; identical to SEQ ID NO: 27786
  peptide (1)..(345): Ceres Seq. ID no. 5002764
  misc_feature (100)..(295): Pfam Name: Galactosyltransferase Pfam Description: Galactosyltransferase
  misc_feature (1)..(345): Homolog of NCBI NO: 30695469 NR Description: galactosyltransferase family [Arabidopsis >gi|22135994|gb|AAM91579.1| unknown protein [Arabidopsis
  misc_feature (1)..(345): Homolog of NCBI NO: 25405979 NR Description: protein F12M16.19 [imported] - Arabidopsis >gi|7769857|gb|AAF69535.1|AC008007_10 F12M16.19 [Arabidopsis
  misc_feature (1)..(345): Homolog of NCBI NO: 15232447 NR Description: galactosyltransferase, putative; protein id: supported by cDNA: gi_17979336 [Arabidopsis thaliana] contains similarity to Avr9 elicitor response
  misc_feature (1)..(344): Homolog of NCBI NO: 30683005 NR Description: galactosyltransferase family [Arabidopsis
  misc_feature (141)..(345): Homolog of NCBI NO: 22553074 NR Description: beta 1,3-glycosyltransferase-like protein III
  misc_feature (1)..(230): Homolog of NCBI NO: 7487205 NR Description: hypothetical protein At2g26100 [imported] - thaliana >gi|3413704|gb|AAC31227.1| unknown protein [Arabidopsis
  misc_feature (235)..(344): Homolog of NCBI NO: 7487205 NR Description: hypothetical protein At2g26100 [imported] - thaliana >gi|3413704|gb|AAC31227.1| unknown protein [Arabidopsis
  misc_feature (56)..(329): Homolog of NCBI NO: 18395060 NR Description: Expressed protein; protein id: At1g22015.1, by cDNA: 115483. [Arabidopsis thaliana] >gi|25370622|pir||B86353
  misc_feature (72)..(336): Homolog of NCBI NO: 12323294 NR Description: putative (Avr9) elicitor response protein;
  misc_feature (80)..(339): Homolog of NCBI NO: 15217544 NR Description: elicitor response protein, putative; protein id: [Arabidopsis thaliana] >gi|25370623|pir||A86458 probasble

SEQ ID NO: 74332 - protein, 259 aa, Arabidopsis thaliana; identical to SEQ ID NO: 27787
  peptide (1)..(259): Ceres Seq. ID no. 5002765
  misc_feature (14)..(209): Pfam Name: Galactosyltransferase Pfam Description: Galactosyltransferase
  misc_feature (1)..(259): Homolog of NCBI NO: 30695469 NR Description: galactosyltransferase family [Arabidopsis >gi|22135994|gb|AAM91579.1| unknown protein [Arabidopsis
  misc_feature (1)..(259): Homolog of NCBI NO: 25405979 NR Description: protein F12M16.19 [imported] - Arabidopsis >gi|7769857|gb|AAF69535.1|AC008007_10 F12M16.19 [Arabidopsis
  misc_feature (1)..(259): Homolog of NCBI NO: 15232447 NR Description: galactosyltransferase, putative; protein id: supported by cDNA: gi_17979336 [Arabidopsis thaliana] contains similarity to Avr9 elicitor response
  misc_feature (1)..(258): Homolog of NCBI NO: 30683005 NR Description: galactosyltransferase family [Arabidopsis
  misc_feature (55)..(259): Homolog of NCBI NO: 22553074 NR Description: beta 1,3-glycosyltransferase-like protein III
  misc_feature (1)..(144): Homolog of NCBI NO: 7487205 NR Description: hypothetical protein At2g26100 [imported] - thaliana >gi|3413704|gb|AAC31227.1| unknown protein [Arabidopsis
  misc_feature (149)..(258): Homolog of NCBI NO: 7487205 NR Description: hypothetical protein At2g26100 [imported] - thaliana >gi|3413704|gb|AAC31227.1| unknown protein [Arabidopsis
  misc_feature (1)..(243): Homolog of NCBI NO: 18395060 NR Description: Expressed protein; protein id: At1g22015.1, by cDNA: 115483. [Arabidopsis thaliana] >gi|25370622|pir||B86353
  misc_feature (1)..(250): Homolog of NCBI NO: 12323294 NR Description: putative (Avr9) elicitor response protein;
  misc_feature (1)..(253): Homolog of NCBI NO: 15217544 NR Description: elicitor response protein, putative; protein id: [Arabidopsis thaliana] >gi|25370623|pir||A86458 probasble

SEQ ID NO: 74333 - protein, 236 aa, Arabidopsis thaliana; identical to SEQ ID NO: 27788
  peptide (1)..(236): Ceres Seq. ID no. 5002766
  misc_feature (1)..(186): Pfam Name: Galactosyltransferase Pfam Description: Galactosyltransferase
  misc_feature (1)..(236): Homolog of NCBI NO: 30695469 NR Description: galactosyltransferase family [Arabidopsis >gi|22135994|gb|AAM91579.1| unknown protein [Arabidopsis
  misc_feature (1)..(236): Homolog of NCBI NO: 25405979 NR Description: protein F12M16.19 [imported] - Arabidopsis >gi|7769857|gb|AAF69535.1|AC008007_10 F12M16.19 [Arabidopsis
  misc_feature (1)..(236): Homolog of NCBI NO: 15232447 NR Description: galactosyltransferase, putative; protein id: supported by cDNA: gi_17979336 [Arabidopsis thaliana] contains similarity to Avr9 elicitor response
  misc_feature (1)..(235): Homolog of NCBI NO: 30683005 NR Description: galactosyltransferase family [Arabidopsis
  misc_feature (32)..(236): Homolog of NCBI NO: 22553074 NR Description: beta 1,3-glycosyltransferase-like protein III
  misc_feature (1)..(121): Homolog of NCBI NO: 7487205 NR Description: hypothetical protein At2g26100 [imported] - thaliana >gi|3413704|gb|AAC31227.1| unknown protein [Arabidopsis
  misc_feature (126)..(235): Homolog of NCBI NO: 7487205 NR Description: hypothetical protein At2g26100 [imported] - thaliana >gi|3413704|gb|AAC31227.1| unknown protein [Arabidopsis
  misc_feature (1)..(220): Homolog of NCBI NO: 18395060 NR Description: Expressed protein; protein id: At1g22015.1, by cDNA: 115483. [Arabidopsis thaliana] >gi|25370622|pir||B86353
  misc_feature (1)..(227): Homolog of NCBI NO: 12323294 NR Description: putative (Avr9) elicitor response protein;
  misc_feature (1)..(230): Homolog of NCBI NO: 15217544 NR Description: elicitor response protein, putative; protein id: [Arabidopsis thaliana] >gi|25370623|pir||A86458 probasble

SEQ ID NO: 74334 - DNA, 1121 bp, Arabidopsis thaliana
  misc_feature (1)..(1121): Ceres Seq. ID no. 5002819
  misc_feature: MA Experiment ID: 20000169 Result: Up-regulated in Transcription
  misc_feature: MA Experiment 20000169 PARAMETER Experiment Name: At_100uM_ABA_P Parameter: Age (day) Value: 14
  misc_feature: MA Experiment 20000169 PARAMETER Experiment Name: At_100uM_ABA_P Parameter: Organism Value: A. thaliana
  misc_feature: MA Experiment 20000169 PARAMETER Experiment Name: At_100uM_ABA_P Parameter: Plant Line Value: WS
  misc_feature: MA Experiment 20000169 PARAMETER Experiment Name: At_100uM_ABA_P Parameter: Timepoint (hr) Value: 6
  misc_feature: MA Experiment 20000169 PARAMETER Experiment Name: At_100uM_ABA_P Parameter: Tissue Value: Aerial
  misc_feature: MA Experiment 20000169 PARAMETER Experiment Name: At_100uM_ABA_P Parameter: Treatment Value: 100uM ABA vs. No Treatment
  misc_feature: MA Experiment ID: 20000173 Result: Down-regulated in Transcription
  misc_feature: MA Experiment 20000173 PARAMETER Experiment Name: At_42deg_Heat_P Parameter: Age (day) Value: 14
  misc_feature: MA Experiment 20000173 PARAMETER Experiment Name: At_42deg_Heat_P Parameter: Organism Value: A. thaliana
  misc_feature: MA Experiment 20000173 PARAMETER Experiment Name: At_42deg_Heat_P Parameter: Plant Line Value: WS
  misc_feature: MA Experiment 20000173 PARAMETER Experiment Name: At_42deg_Heat_P Parameter: Temperature (deg C) Value: 42 vs. 22
  misc_feature: MA Experiment 20000173 PARAMETER Experiment Name: At_42deg_Heat_P Parameter: Timepoint (hr) Value: 6
  misc_feature: MA Experiment 20000173 PARAMETER Experiment Name: At_42deg_Heat_P Parameter: Tissue Value: Aerial
  misc_feature: MA Experiment ID: 20000185 Result: Down-regulated in Transcription
  misc_feature: MA Experiment 20000185 PARAMETER Experiment Name: At_Roots__P Parameter: Age (day) Value: 7 vs. 21
  misc_feature: MA Experiment 20000185 PARAMETER Experiment Name: At_Roots__P Parameter: Organism Value: A. thaliana
  misc_feature: MA Experiment 20000185 PARAMETER Experiment Name: At_Roots__P Parameter: Tissue Value: Roots vs. Whole Plant
  misc_feature: MA Experiment ID: 20000234 Result: Down-regulated in Transcription
  misc_feature: MA Experiment 20000234 PARAMETER Experiment Name: At_Siliques_P Parameter: Age (day) Value: 21
  misc_feature: MA Experiment 20000234 PARAMETER Experiment Name: At_Siliques_P Parameter: Organism Value: A. thaliana
  misc_feature: MA Experiment 20000234 PARAMETER Experiment Name: At_Siliques_P Parameter: Plant Line Value: WS
  misc_feature: MA Experiment 20000234 PARAMETER Experiment Name: At_Siliques_P Parameter: Tissue Value: Less Than 5mm Siliques vs. Whole Plant
  misc_feature: MA Experiment ID: 20000235 Result: Down-regulated in Transcription
  misc_feature: MA Experiment 20000235 PARAMETER Experiment Name: At_Siliques_P Parameter: Age (day) Value: 21
  misc_feature: MA Experiment 20000235 PARAMETER Experiment Name: At_Siliques_P Parameter: Organism Value: A. thaliana
  misc_feature: MA Experiment 20000235 PARAMETER Experiment Name: At_Siliques_P Parameter: Plant Line Value: WS
  misc_feature: MA Experiment 20000235 PARAMETER Experiment Name: At_Siliques_P Parameter: Tissue Value: 5-10mm Siliques vs. Whole Plant
  misc_feature: MA Experiment ID: 20000265 Result: Down-regulated in Transcription
  misc_feature: MA Experiment 20000265 PARAMETER Experiment Name: At_Open_Flower_P Parameter: Age (day) Value: 21
  misc_feature: MA Experiment 20000265 PARAMETER Experiment Name: At_Open_Flower_P Parameter: Plant Line Value: WS
  misc_feature: MA Experiment 20000265 PARAMETER Experiment Name: At_Open_Flower_P Parameter: Tissue Value: Closed Flower vs. Whole Plant
  misc_feature: MA Experiment ID: 20000267 Result: Up-regulated in Transcription
  misc_feature: MA Experiment 20000267 PARAMETER Experiment Name: At_Drought_P Parameter: Age (day) Value: 7
  misc_feature: MA Experiment 20000267 PARAMETER Experiment Name: At_Drought_P Parameter: Organism Value: A. thaliana
  misc_feature: MA Experiment 20000267 PARAMETER Experiment Name: At_Drought_P Parameter: Plant Line Value: WS
  misc_feature: MA Experiment 20000267 PARAMETER Experiment Name: At_Drought_P Parameter: Timepoint (hr) Value: 6
  misc_feature: MA Experiment 20000267 PARAMETER Experiment Name: At_Drought_P Parameter: Tissue Value: Whole Plant
  misc_feature: MA Experiment 20000267 PARAMETER Experiment Name: At_Drought_P Parameter: Treatment Value: Drought vs. No Drought
  misc_feature: MA Experiment ID: 20000286 Result: Down-regulated in Transcription
  misc_feature: MA Experiment 20000286 PARAMETER Experiment Name: At_Open_Flower_P Parameter: Age (day) Value: 21
  misc_feature: MA Experiment 20000286 PARAMETER Experiment Name: At_Open_Flower_P Parameter: Plant Line Value: WS
  misc_feature: MA Experiment 20000286 PARAMETER Experiment Name: At_Open_Flower_P Parameter: Tissue Value: Half Open vs. Whole Plant
  misc_feature: MA Experiment ID: 20000436 Result: Up-regulated in Transcription
  misc_feature: MA Experiment 20000436 PARAMETER Experiment Name: At_Drought_P Parameter: Age (day) Value: 7
  misc_feature: MA Experiment 20000436 PARAMETER Experiment Name: At_Drought_P Parameter: Organism Value: A. thaliana
  misc_feature: MA Experiment 20000436 PARAMETER Experiment Name: At_Drought_P Parameter: Plant Line Value: WS
  misc_feature: MA Experiment 20000436 PARAMETER Experiment Name: At_Drought_P Parameter: Timepoint (hr) Value: 12
  misc_feature: MA Experiment 20000436 PARAMETER Experiment Name: At_Drought_P Parameter: Tissue Value: Whole Plant
  misc_feature: MA Experiment 20000436 PARAMETER Experiment Name: At_Drought_P Parameter: Treatment Value: Drought vs. No Drought
  misc_feature: MA Experiment ID: 20000437 Result: Up-regulated in Transcription
  misc_feature: MA Experiment 20000437 PARAMETER Experiment Name: At_Drought_P Parameter: Age (day) Value: 8
  misc_feature: MA Experiment 20000437 PARAMETER Experiment Name: At_Drought_P Parameter: Organism Value: A. thaliana
  misc_feature: MA Experiment 20000437 PARAMETER Experiment Name: At_Drought_P Parameter: Plant Line Value: WS
  misc_feature: MA Experiment 20000437 PARAMETER Experiment Name: At_Drought_P Parameter: Timepoint (hr) Value: 24
  misc_feature: MA Experiment 20000437 PARAMETER Experiment Name: At_Drought_P Parameter: Tissue Value: Whole Plant
  misc_feature: MA Experiment 20000437 PARAMETER Experiment Name: At_Drought_P Parameter: Treatment Value: Drought vs. No Drought
  misc_feature: MA Experiment ID: 20000438 Result: Down-regulated in Transcription
  misc_feature: MA Experiment 20000438 PARAMETER Experiment Name: At_Shoots__P Parameter: Age (day) Value: 14
  misc_feature: MA Experiment 20000438 PARAMETER Experiment Name: At_Shoots__P Parameter: Tissue Value: Shoots vs. Whole Plant
  misc_feature: MA Experiment ID: 20000439 Result: Down-regulated in Transcription
  misc_feature: MA Experiment 20000439 PARAMETER Experiment Name: At_Roots__P Parameter: Age (day) Value: 14 vs. 21
  misc_feature: MA Experiment 20000439 PARAMETER Experiment Name: At_Roots__P Parameter: Organism Value: A. thaliana
  misc_feature: MA Experiment 20000439 PARAMETER Experiment Name: At_Roots__P Parameter: Tissue Value: Roots vs. Whole Plant
  misc_feature: MA Experiment ID: 20000453 Result: Up-regulated in Transcription
  misc_feature: MA Experiment 20000453 PARAMETER Experiment Name: At_100uM_ABA_P Parameter: Age (day) Value: 15
  misc_feature: MA Experiment 20000453 PARAMETER Experiment Name: At_100uM_ABA_P Parameter: Organism Value: A. thaliana
  misc_feature: MA Experiment 20000453 PARAMETER Experiment Name: At_100uM_ABA_P Parameter: Plant Line Value: WS
  misc_feature: MA Experiment 20000453 PARAMETER Experiment Name: At_100uM_ABA_P Parameter: Timepoint (hr) Value: 24
  misc_feature: MA Experiment 20000453 PARAMETER Experiment Name: At_100uM_ABA_P Parameter: Tissue Value: Aerial
  misc_feature: MA Experiment 20000453 PARAMETER Experiment Name: At_100uM_ABA_P Parameter: Treatment Value: 100uM ABA vs. No Treatment
  misc_feature: MA Experiment ID: 20000527 Result: Down-regulated in Transcription
  misc_feature: MA Experiment 20000527 PARAMETER Experiment Name: At_10percent_PEG_P Parameter: Age (day) Value: 20
  misc_feature: MA Experiment 20000527 PARAMETER Experiment Name: At_10percent_PEG_P Parameter: Organism Value: A. thaliana
  misc_feature: MA Experiment 20000527 PARAMETER Experiment Name: At_10percent_PEG_P Parameter: Plant Line Value: WS
  misc_feature: MA Experiment 20000527 PARAMETER Experiment Name: At_10percent_PEG_P Parameter: Timepoint (day) Value: 20
  misc_feature: MA Experiment 20000527 PARAMETER Experiment Name: At_10percent_PEG_P Parameter: Tissue Value: Whole Plant
  misc_feature: MA Experiment 20000527 PARAMETER Experiment Name: At_10percent_PEG_P Parameter: Treatment Value: 10percent PEG vs. No Treatment
  misc_feature: MA Experiment ID: 20000573 Result: Up-regulated in Transcription
  misc_feature: MA Experiment 20000573 PARAMETER Experiment Name: At_100uM_ABA_Mutants__P Parameter: Organism Value: A. thaliana
  misc_feature: MA Experiment 20000573 PARAMETER Experiment Name: At_100uM_ABA_Mutants__P Parameter: Plant Line Value: CS22 vs. Ler wt
  misc_feature: MA Experiment 20000573 PARAMETER Experiment Name: At_100uM_ABA_Mutants__P Parameter: Timepoint (hr) Value: N/A
  misc_feature: MA Experiment 20000573 PARAMETER Experiment Name: At_100uM_ABA_Mutants__P Parameter: Tissue Value: Whole Plant
  misc_feature: MA Experiment 20000573 PARAMETER Experiment Name: At_100uM_ABA_Mutants__P Parameter: Treatment Value: None
  misc_feature: MA Experiment ID: 20000709 Result: Down-regulated in Transcription
  misc_feature: MA Experiment 20000709 PARAMETER Experiment Name: At_15mM_NH4NO3_L-to-H_P Parameter: Age (hr) Value: 14
  misc_feature: MA Experiment 20000709 PARAMETER Experiment Name: At_15mM_NH4NO3_L-to-H_P Parameter: Organism Value: A. thaliana
  misc_feature: MA Experiment 20000709 PARAMETER Experiment Name: At_15mM_NH4NO3_L-to-H_P Parameter: Plant Line Value: WS
  misc_feature: MA Experiment 20000709 PARAMETER Experiment Name: At_15mM_NH4NO3_L-to-H_P Parameter: Timepoint (hr) Value: 4
  misc_feature: MA Experiment 20000709 PARAMETER Experiment Name: At_15mM_NH4NO3_L-to-H_P Parameter: Tissue Value: Aerial
  misc_feature: MA Experiment 20000709 PARAMETER Experiment Name: At_15mM_NH4NO3_L-to-H_P Parameter: Treatment Value: 15mM NH4NO3 vs. 30mM Mannitol
  misc_feature: MA Experiment ID: 20000794 Result: Up-regulated in Transcription
  misc_feature: MA Experiment 20000794 PARAMETER Experiment Name: At_Petals_P Parameter: Age (day) Value: 23-25 days
  misc_feature: MA Experiment 20000794 PARAMETER Experiment Name: At_Petals_P Parameter: Plant Line Value: WS
  misc_feature: MA Experiment 20000794 PARAMETER Experiment Name: At_Petals_P Parameter: Tissue Value: Petals vs. Whole plant
  misc_feature: MA Experiment ID: 20001450 Result: Up-regulated in Transcription
  misc_feature: MA Experiment 20001450 PARAMETER Experiment Name: At_Far-red-induction_P Parameter: Age (day) Value: 7
  misc_feature: MA Experiment 20001450 PARAMETER Experiment Name: At_Far-red-induction_P Parameter: Light Value: Far-red vs. White
  misc_feature: MA Experiment 20001450 PARAMETER Experiment Name: At_Far-red-induction_P Parameter: Organism Value: A. thaliana
  misc_feature: MA Experiment 20001450 PARAMETER Experiment Name: At_Far-red-induction_P Parameter: Plant Line Value: Columbia
  misc_feature: MA Experiment 20001450 PARAMETER Experiment Name: At_Far-red-induction_P Parameter: Timepoint (hr) Value: 8
  misc_feature: MA Experiment 20001450 PARAMETER Experiment Name: At_Far-red-induction_P Parameter: Tissue Value: Whole Plant
  misc_feature: MA Experiment ID: 20001451 Result: Up-regulated in Transcription
  misc_feature: MA Experiment 20001451 PARAMETER Experiment Name: At_Far-red-induction_P Parameter: Age (day) Value: 7
  misc_feature: MA Experiment 20001451 PARAMETER Experiment Name: At_Far-red-induction_P Parameter: Light Value: Far-red vs. White
  misc_feature: MA Experiment 20001451 PARAMETER Experiment Name: At_Far-red-induction_P Parameter: Organism Value: A. thaliana
  misc_feature: MA Experiment 20001451 PARAMETER Experiment Name: At_Far-red-induction_P Parameter: Plant Line Value: Columbia
  misc_feature: MA Experiment 20001451 PARAMETER Experiment Name: At_Far-red-induction_P Parameter: Timepoint (hr) Value: 24
  misc_feature: MA Experiment 20001451 PARAMETER Experiment Name: At_Far-red-induction_P Parameter: Tissue Value: Whole Plant
  misc_feature: MA Experiment ID: 20001554 Result: Up-regulated in Transcription
  misc_feature: MA Experiment 20001554 PARAMETER Experiment Name: At_Drought_Soil_Dry_P Parameter: Age (day) Value: 21
  misc_feature: MA Experiment 20001554 PARAMETER Experiment Name: At_Drought_Soil_Dry_P Parameter: Organism Value: A. thaliana
  misc_feature: MA Experiment 20001554 PARAMETER Experiment Name: At_Drought_Soil_Dry_P Parameter: Plant Line Value: WS
  misc_feature: MA Experiment 20001554 PARAMETER Experiment Name: At_Drought_Soil_Dry_P Parameter: Post Timepoint (hr) Value: None
  misc_feature: MA Experiment 20001554 PARAMETER Experiment Name: At_Drought_Soil_Dry_P Parameter: Post-Treatment Value: None
  misc_feature: MA Experiment 20001554 PARAMETER Experiment Name: At_Drought_Soil_Dry_P Parameter: Timepoint (day) Value: 7
  misc_feature: MA Experiment 20001554 PARAMETER Experiment Name: At_Drought_Soil_Dry_P Parameter: Treatment Value: Drought vs. No Drought
  misc_feature: MA Experiment ID: 20001555 Result: Up-regulated in Transcription
  misc_feature: MA Experiment 20001555 PARAMETER Experiment Name: At_Drought_Soil_Dry_P Parameter: Age (day) Value: 24
  misc_feature: MA Experiment 20001555 PARAMETER Experiment Name: At_Drought_Soil_Dry_P Parameter: Organism Value: A. thaliana
  misc_feature: MA Experiment 20001555 PARAMETER Experiment Name: At_Drought_Soil_Dry_P Parameter: Plant Line Value: WS
  misc_feature: MA Experiment 20001555 PARAMETER Experiment Name: At_Drought_Soil_Dry_P Parameter: Post Timepoint (hr) Value: None
  misc_feature: MA Experiment 20001555 PARAMETER Experiment Name: At_Drought_Soil_Dry_P Parameter: Post-Treatment Value: None
  misc_feature: MA Experiment 20001555 PARAMETER Experiment Name: At_Drought_Soil_Dry_P Parameter: Timepoint (day) Value: 10
  misc_feature: MA Experiment 20001555 PARAMETER Experiment Name: At_Drought_Soil_Dry_P Parameter: Treatment Value: Drought vs. No Drought
  misc_feature: MA Experiment ID: 20001558 Result: Down-regulated in Transcription
  misc_feature: MA Experiment 20001558 PARAMETER Experiment Name: At_Drought_Soil_Dry_P Parameter: Age (day) Value: 27
  misc_feature: MA Experiment 20001558 PARAMETER Experiment Name: At_Drought_Soil_Dry_P Parameter: Organism Value: A. thaliana
  misc_feature: MA Experiment 20001558 PARAMETER Experiment Name: At_Drought_Soil_Dry_P Parameter: Plant Line Value: WS
  misc_feature: MA Experiment 20001558 PARAMETER Experiment Name: At_Drought_Soil_Dry_P Parameter: Post Timepoint (hr) Value: 6
  misc_feature: MA Experiment 20001558 PARAMETER Experiment Name: At_Drought_Soil_Dry_P Parameter: Post-Treatment Value: Re-Water vs. No Drought
  misc_feature: MA Experiment 20001558 PARAMETER Experiment Name: At_Drought_Soil_Dry_P Parameter: Timepoint (day) Value: 13
  misc_feature: MA Experiment 20001558 PARAMETER Experiment Name: At_Drought_Soil_Dry_P Parameter: Treatment Value: Drought vs. No Drought
  misc_feature: MA Experiment ID: 20001904 Result: Up-regulated in Transcription
  misc_feature: MA Experiment 20001904 PARAMETER Experiment Name: At_Drought_Reproduction_P Parameter: Age (day) Value: 37
  misc_feature: MA Experiment 20001904 PARAMETER Experiment Name: At_Drought_Reproduction_P Parameter: Organism Value: A. thaliana
  misc_feature: MA Experiment 20001904 PARAMETER Experiment Name: At_Drought_Reproduction_P Parameter: Plant Line Value: WS
  misc_feature: MA Experiment 20001904 PARAMETER Experiment Name: At_Drought_Reproduction_P Parameter: Timepoint (day) Value: 7
  misc_feature: MA Experiment 20001904 PARAMETER Experiment Name: At_Drought_Reproduction_P Parameter: Tissue Value: Rosettes
  misc_feature: MA Experiment 20001904 PARAMETER Experiment Name: At_Drought_Reproduction_P Parameter: Treatment Value: Drought vs. No Drought
  misc_feature: MA Experiment ID: 20001906 Result: Up-regulated in Transcription
  misc_feature: MA Experiment 20001906 PARAMETER Experiment Name: At_Drought_Reproduction_P Parameter: Age (day) Value: 35
  misc_feature: MA Experiment 20001906 PARAMETER Experiment Name: At_Drought_Reproduction_P Parameter: Organism Value: A. thaliana
  misc_feature: MA Experiment 20001906 PARAMETER Experiment Name: At_Drought_Reproduction_P Parameter: Plant Line Value: WS
  misc_feature: MA Experiment 20001906 PARAMETER Experiment Name: At_Drought_Reproduction_P Parameter: Timepoint (day) Value: 5
  misc_feature: MA Experiment 20001906 PARAMETER Experiment Name: At_Drought_Reproduction_P Parameter: Tissue Value: Siliques
  misc_feature: MA Experiment 20001906 PARAMETER Experiment Name: At_Drought_Reproduction_P Parameter: Treatment Value: Drought vs. No Drought
  misc_feature: MA Experiment ID: 20001907 Result: Up-regulated in Transcription
  misc_feature: MA Experiment 20001907 PARAMETER Experiment Name: At_Drought_Reproduction_P Parameter: Age (day) Value: 37
  misc_feature: MA Experiment 20001907 PARAMETER Experiment Name: At_Drought_Reproduction_P Parameter: Organism Value: A. thaliana
  misc_feature: MA Experiment 20001907 PARAMETER Experiment Name: At_Drought_Reproduction_P Parameter: Plant Line Value: WS
  misc_feature: MA Experiment 20001907 PARAMETER Experiment Name: At_Drought_Reproduction_P Parameter: Timepoint (day) Value: 7
  misc_feature: MA Experiment 20001907 PARAMETER Experiment Name: At_Drought_Reproduction_P Parameter: Tissue Value: Siliques
  misc_feature: MA Experiment 20001907 PARAMETER Experiment Name: At_Drought_Reproduction_P Parameter: Treatment Value: Drought vs. No Drought
  misc_feature: MA Experiment ID: 20001908 Result: Up-regulated in Transcription
  misc_feature: MA Experiment 20001908 PARAMETER Experiment Name: At_Drought_Reproduction_P Parameter: Age (day) Value: 40
  misc_feature: MA Experiment 20001908 PARAMETER Experiment Name: At_Drought_Reproduction_P Parameter: Organism Value: A. thaliana
  misc_feature: MA Experiment 20001908 PARAMETER Experiment Name: At_Drought_Reproduction_P Parameter: Plant Line Value: WS
  misc_feature: MA Experiment 20001908 PARAMETER Experiment Name: At_Drought_Reproduction_P Parameter: Timepoint (day) Value: 10
  misc_feature: MA Experiment 20001908 PARAMETER Experiment Name: At_Drought_Reproduction_P Parameter: Tissue Value: Siliques
  misc_feature: MA Experiment 20001908 PARAMETER Experiment Name: At_Drought_Reproduction_P Parameter: Treatment Value: Drought vs. No Drought
gagatcttgattagagagagttcttgcaaaaagggtctctgtatttagttattaaattcttcaatcttgtttctgtaaatttcggatatttttgagaacaagcaaagatgtgtagtttggctacaaatctgttactaccatcgaagatgaaaccagtttttccagagaaactgagcactagctcactctgtgtcaccactagaagatctaagatgaagaaccgatctattgttcctgttgcaagattgtttggaccggcgatttttgaagcctccaaattgaaagtgttattcttaggagttgatgagaagaagcatccagcaaaacttccaagaacttacactcttactcacagtgacataaccgctaaattaactttagctatatctcaatccattaataactctcagttgcaaggatgggcaaataaattgttccgggacgaagtagtgggcgagtggaagaaagtgaaaggtaaaatgtcgcttcatgttcattgccacattagcggaggccacttcttcttgaatctcatcgcgaagcttcggtactacatcttttgcaaagaattacctgtggtactggaagcttttgcccatggagatgagtatttgttaaataatcaccccgagctacaagaatctcctgtttgggtttatttccattccaacatcccggagtacaacaaggtcgaatgttggggaccgctttgggaggccatgtcgcagcaccagcacgacggaaggacccacaagaagagtgaaactctaccggagctaccttgtcctgatgagtgcaagtgttgctttccgacggttagcacgattccgtggtctcatcgtcattatcaacataccgcagcggatgagaatgttgcggatggcctgttggaaatacctaaccctgggaaatcaaagggatagatctaatgtaaatgtgttttttctttttctttggtggttaggaatgttagaaggagcatgaaaatctatttggtcggtgttaatagggagtgacaattgtataacataagtttcagtattttacaaattccttatatattagttttataaggtgattagttacccatccacgtgttatacatgtctttttattgtatg

SEQ ID NO: 74335 - protein, 271 aa, Arabidopsis thaliana
  peptide (1)..(271): Ceres Seq. ID no. 5002820
  misc_feature (1)..(240): Homolog of NCBI NO: 15234348 NR Description: putative protein; protein id: At4g11910.1
  misc_feature (1)..(244): Homolog of NCBI NO: 18416035 NR Description: expressed protein; protein id: At4g22920.1, by cDNA: 29391., supported by cDNA: gi_17380887, supported by
  misc_feature (1)..(244): Homolog of NCBI NO: 21592527 NR Description: unknown [Arabidopsis thaliana]
  misc_feature (44)..(257): Homolog of NCBI NO: 15234348 NR Description: putative protein; protein id: At4g11910.1
  misc_feature (38)..(212): Homolog of NCBI NO: 8778672 NR Description: F9C16.20 [Arabidopsis thaliana]
  misc_feature (38)..(212): Homolog of NCBI NO: 18401163 NR Description: expressed protein; protein id: At1g44000.1, by cDNA: gi_15028026, supported by cDNA: gi_20259312 [Arabidopsis >gi|15028027|gb|AAK76544.1| unknown protein [Arabidopsis
  misc_feature (45)..(179): Homolog of NCBI NO: 38567838 NR Description: OSJNBb0020J19.16 [Oryza sativa (japonica
  misc_feature (52)..(199): Homolog of NCBI NO: 15896657 NR Description: Uncharacterized protein, homolog of YYBI fused to uncharacterized domain similar to A.thaliana (gi:3292817
  misc_feature (52)..(201): Homolog of NCBI NO: 18311568 NR Description: hypothetical protein [Clostridium perfringens]
MCSLATNLLLPSKMKPVFPEKLSTSSLCVTTRRSKMKNRSIVPVARLFGPAIFEASKLKVLFLGVDEKKHPAKLPRTYTLTHSDITAKLTLAISQSINNSQLQGWANKLFRDEVVGEWKKVKGKMSLHVHCHISGGHFFLNLIAKLRYYIFCKELPVVLEAFAHGDEYLLNNHPELQESPVWVYFHSNIPEYNKVECWGPLWEAMSQHQHDGRTHKKSETLPELPCPDECKCCFPTVSTIPWSHRHYQHTAADENVADGLLEIPNPGKSKG

SEQ ID NO: 74336 - protein, 258 aa, Arabidopsis thaliana
  peptide (1)..(258): Ceres Seq. ID no. 5002821
  misc_feature (1)..(227): Homolog of NCBI NO: 15234348 NR Description: putative protein; protein id: At4g11910.1
  misc_feature (1)..(231): Homolog of NCBI NO: 18416035 NR Description: expressed protein; protein id: At4g22920.1, by cDNA: 29391., supported by cDNA: gi_17380887, supported by
  misc_feature (1)..(231): Homolog of NCBI NO: 21592527 NR Description: unknown [Arabidopsis thaliana]
  misc_feature (31)..(244): Homolog of NCBI NO: 15234348 NR Description: putative protein; protein id: At4g11910.1
  misc_feature (25)..(199): Homolog of NCBI NO: 8778672 NR Description: F9C16.20 [Arabidopsis thaliana]
  misc_feature (25)..(199): Homolog of NCBI NO: 18401163 NR Description: expressed protein; protein id: At1g44000.1, by cDNA: gi_15028026, supported by cDNA: gi_20259312 [Arabidopsis >gi|15028027|gb|AAK76544.1| unknown protein [Arabidopsis
  misc_feature (32)..(166): Homolog of NCBI NO: 38567838 NR Description: OSJNBb0020J19.16 [Oryza sativa (japonica
  misc_feature (39)..(186): Homolog of NCBI NO: 15896657 NR Description: Uncharacterized protein, homolog of YYBI fused to uncharacterized domain similar to A.thaliana (gi:3292817
  misc_feature (39)..(188): Homolog of NCBI NO: 18311568 NR Description: hypothetical protein [Clostridium perfringens]
MKPVFPEKLSTSSLCVTTRRSKMKNRSIVPVARLFGPAIFEASKLKVLFLGVDEKKHPAKLPRTYTLTHSDITAKLTLAISQSINNSQLQGWANKLFRDEVVGEWKKVKGKMSLHVHCHISGGHFFLNLIAKLRYYIFCKELPVVLEAFAHGDEYLLNNHPELQESPVWVYFHSNIPEYNKVECWGPLWEAMSQHQHDGRTHKKSETLPELPCPDECKCCFPTVSTIPWSHRHYQHTAADENVADGLLEIPNPGKSKG

SEQ ID NO: 74337 - protein, 236 aa, Arabidopsis thaliana
  peptide (1)..(236): Ceres Seq. ID no. 5002822
  misc_feature (1)..(205): Homolog of NCBI NO: 15234348 NR Description: putative protein; protein id: At4g11910.1
  misc_feature (1)..(209): Homolog of NCBI NO: 18416035 NR Description: expressed protein; protein id: At4g22920.1, by cDNA: 29391., supported by cDNA: gi_17380887, supported by
  misc_feature (1)..(209): Homolog of NCBI NO: 21592527 NR Description: unknown [Arabidopsis thaliana]
  misc_feature (9)..(222): Homolog of NCBI NO: 15234348 NR Description: putative protein; protein id: At4g11910.1
  misc_feature (3)..(177): Homolog of NCBI NO: 8778672 NR Description: F9C16.20 [Arabidopsis thaliana]
  misc_feature (3)..(177): Homolog of NCBI NO: 18401163 NR Description: expressed protein; protein id: At1g44000.1, by cDNA: gi_15028026, supported by cDNA: gi_20259312 [Arabidopsis >gi|15028027|gb|AAK76544.1| unknown protein [Arabidopsis
  misc_feature (10)..(144): Homolog of NCBI NO: 38567838 NR Description: OSJNBb0020J19.16 [Oryza sativa (japonica
  misc_feature (17)..(164): Homolog of NCBI NO: 15896657 NR Description: Uncharacterized protein, homolog of YYBI fused to uncharacterized domain similar to A.thaliana (gi:3292817
  misc_feature (17)..(166): Homolog of NCBI NO: 18311568 NR Description: hypothetical protein [Clostridium perfringens]
MKNRSIVPVARLFGPAIFEASKLKVLFLGVDEKKHPAKLPRTYTLTHSDITAKLTLAISQSINNSQLQGWANKLFRDEVVGEWKKVKGKMSLHVHCHISGGHFFLNLIAKLRYYIFCKELPVVLEAFAHGDEYLLNNHPELQESPVWVYFHSNIPEYNKVECWGPLWEAMSQHQHDGRTHKKSETLPELPCPDECKCCFPTVSTIPWSHRHYQHTAADENVADGLLEIPNPGKSKG

SEQ ID NO: 74338 - DNA, 1442 bp, Arabidopsis thaliana
  misc_feature (1)..(1442): Ceres Seq. ID no. 5002869
  misc_feature: MA Experiment ID: 108434 Result: Down-regulated in Transcription
  misc_feature: MA Experiment 108434 PARAMETER Experiment Name: At_Root_Tips_cDNA_P Parameter: Tissue Value: Root Tips
  misc_feature: MA Experiment ID: 108488 Result: Down-regulated in Transcription
  misc_feature: MA Experiment ID: 108573 Result: Up-regulated in Transcription
  misc_feature: MA Experiment 108573 PARAMETER Experiment Name: At_Drought_cDNA_P Parameter: Timepoint (hr) Value: 6
  misc_feature: MA Experiment 108573 PARAMETER Experiment Name: At_Drought_cDNA_P Parameter: Tissue Value: Aerial
  misc_feature: MA Experiment 108573 PARAMETER Experiment Name: At_Drought_cDNA_P Parameter: Treatment Value: Drought vs. No Drought
  misc_feature: MA Experiment ID: 108585 Result: Up-regulated in Transcription
  misc_feature: MA Experiment 108585 PARAMETER Experiment Name: At_5mM_NaNP_cDNA_P Parameter: Timepoint (hr) Value: 6
  misc_feature: MA Experiment 108585 PARAMETER Experiment Name: At_5mM_NaNP_cDNA_P Parameter: Tissue Value: Aerial
  misc_feature: MA Experiment 108585 PARAMETER Experiment Name: At_5mM_NaNP_cDNA_P Parameter: Treatment Value: null
  misc_feature: MA Experiment ID: 20000182 Result: Up-regulated in Transcription
  misc_feature: MA Experiment 20000182 PARAMETER Experiment Name: At_2mM_SA_P Parameter: Age (day) Value: 14
  misc_feature: MA Experiment 20000182 PARAMETER Experiment Name: At_2mM_SA_P Parameter: Organism Value: A. thaliana
  misc_feature: MA Experiment 20000182 PARAMETER Experiment Name: At_2mM_SA_P Parameter: Plant Line Value: WS
  misc_feature: MA Experiment 20000182 PARAMETER Experiment Name: At_2mM_SA_P Parameter: Timepoint (hr) Value: 6
  misc_feature: MA Experiment 20000182 PARAMETER Experiment Name: At_2mM_SA_P Parameter: Tissue Value: Aerial
  misc_feature: MA Experiment 20000182 PARAMETER Experiment Name: At_2mM_SA_P Parameter: Treatment Value: 2mM SA vs. No Treatment
  misc_feature: MA Experiment ID: 20000265 Result: Down-regulated in Transcription
  misc_feature: MA Experiment 20000265 PARAMETER Experiment Name: At_Open_Flower_P Parameter: Age (day) Value: 21
  misc_feature: MA Experiment 20000265 PARAMETER Experiment Name: At_Open_Flower_P Parameter: Plant Line Value: WS
  misc_feature: MA Experiment 20000265 PARAMETER Experiment Name: At_Open_Flower_P Parameter: Tissue Value: Closed Flower vs. Whole Plant
  misc_feature: MA Experiment ID: 20001558 Result: Down-regulated in Transcription
  misc_feature: MA Experiment 20001558 PARAMETER Experiment Name: At_Drought_Soil_Dry_P Parameter: Age (day) Value: 27
  misc_feature: MA Experiment 20001558 PARAMETER Experiment Name: At_Drought_Soil_Dry_P Parameter: Organism Value: A. thaliana
  misc_feature: MA Experiment 20001558 PARAMETER Experiment Name: At_Drought_Soil_Dry_P Parameter: Plant Line Value: WS
  misc_feature: MA Experiment 20001558 PARAMETER Experiment Name: At_Drought_Soil_Dry_P Parameter: Post Timepoint (hr) Value: 6
  misc_feature: MA Experiment 20001558 PARAMETER Experiment Name: At_Drought_Soil_Dry_P Parameter: Post-Treatment Value: Re-Water vs. No Drought
  misc_feature: MA Experiment 20001558 PARAMETER Experiment Name: At_Drought_Soil_Dry_P Parameter: Timepoint (day) Value: 13
  misc_feature: MA Experiment 20001558 PARAMETER Experiment Name: At_Drought_Soil_Dry_P Parameter: Treatment Value: Drought vs. No Drought
  misc_feature: MA Experiment ID: 20001560 Result: Down-regulated in Transcription
  misc_feature: MA Experiment 20001560 PARAMETER Experiment Name: At_Drought_Soil_Dry_P Parameter: Age (day) Value: 28
  misc_feature: MA Experiment 20001560 PARAMETER Experiment Name: At_Drought_Soil_Dry_P Parameter: Organism Value: A. thaliana
  misc_feature: MA Experiment 20001560 PARAMETER Experiment Name: At_Drought_Soil_Dry_P Parameter: Plant Line Value: WS
  misc_feature: MA Experiment 20001560 PARAMETER Experiment Name: At_Drought_Soil_Dry_P Parameter: Post Timepoint (hr) Value: None
  misc_feature: MA Experiment 20001560 PARAMETER Experiment Name: At_Drought_Soil_Dry_P Parameter: Post-Treatment Value: None
  misc_feature: MA Experiment 20001560 PARAMETER Experiment Name: At_Drought_Soil_Dry_P Parameter: Timepoint (day) Value: 14
  misc_feature: MA Experiment 20001560 PARAMETER Experiment Name: At_Drought_Soil_Dry_P Parameter: Treatment Value: Drought vs. No Drought
gacacgatccatcctaagaaacttcaattttggggtttctcttcgtcttcttcttcttcttcttctagatcgagagggacatgggtcttaccagccgccgttgacgactacgacgaccattctcttcctcttcatcttctctccttctgcttttctctatttcctattctctccaaattcaccatttccttccaccactcagagatctccctttcttattagctatgtcttcttctaacacgccatcttctagcgccgccgctgccggatcgatagattcttccgccgcccggagaaattccaagagacccaagtattcgaaatttactcagcaggagcttcctgcttgcaaaccaattcttacgcctggttgggtgatttcaacgtttttgatcattagtgttatcttcattccccttggtgttatttctctctttgcttctcaggatgttgttgagatcgttgatcggtatgatagtgcatgcatacctctatctgatagggctaacaaggttgcatacattcaaggaactggaaataaatcttgtacccggacgctaattgtgcctaagcgtatgaagcagcctatctacgtatattaccagcttgagaacttctaccagaatcaccgcaggtatgtgaaaagccgaagtgattcgcaattgagaagtgtgaaagatgagaatcaaatagacgcatgcaagcctgaggatgattttggtgggcagccaattgtgccatgtggtctaattgcttggagtctctttaatgacacatacgttctatcaagaaataaccagggtttaacggtaaacaagaaaggaattgcatggaagagcgacaaggaacacaagtttgggaaaaatgtgtttcccaagaactttcagaagggcaatctcactggtggtgccagtctagatccaaataaaccattgagtgatcaagaggatctgatcgtgtggatgaggactgctgcgttgccaacatttagaaaattatacgggaagatagagagtgacttggagaagggtgagaacatacaagtgactctgcagaacaactacaacacatacagtttcagtgggaagaagaagcttgttctgtcaacaacaagttggcttggtggaaagaacgacttcctcggcattgcttacctcaccgttgggggaatctgtttcgtcttggcacttgcatttaccgtcatgtatcttgtgaaacccaggcgactcggtgatcctacctacttgtcgtggaacagaattcctggaggtcgttaaacagatgactgcatcatctgcgtatataaatctacttatctctggttgtaatttgatccaaaattgaaagtgatgatctttttttttttaatatagatgtgaaatgtatgtatgatgttacagttggaatatgctcattacatagaatgattgatgcttcctatc

SEQ ID NO: 74339 - protein, 350 aa, Arabidopsis thaliana; identical to SEQ ID NO: 23752
  peptide (1)..(350): Ceres Seq. ID no. 5002870
  misc_feature (69)..(339): Pfam Name: LEM3 (ligand-effect modulator 3) family / CDC50 family Pfam Description: LEM3 (ligand-effect modulator 3) family / CDC50
  misc_feature (1)..(350): Homolog of NCBI NO: 18399730 NR Description: membrane protein common family; protein id: supported by cDNA: 37019., supported by cDNA: gi_15028094, by cDNA: gi_15294235, supported by cDNA: gi_20258910 [Arabidopsis
  misc_feature (3)..(350): Homolog of NCBI NO: 18404877 NR Description: membrane protein common family; protein id: supported by cDNA: gi_15010741, supported by cDNA: gi_15450728, by cDNA: gi_17386111 [Arabidopsis thaliana]
  misc_feature (3)..(349): Homolog of NCBI NO: 18412377 NR Description: membrane protein common family; protein id: supported by cDNA: 94828. [Arabidopsis thaliana]
  misc_feature (76)..(349): Homolog of NCBI NO: 25347303 NR Description: protein F3O9.16 [imported] - Arabidopsis thaliana
  misc_feature (32)..(76): Homolog of NCBI NO: 25347303 NR Description: protein F3O9.16 [imported] - Arabidopsis thaliana
  misc_feature (34)..(349): Homolog of NCBI NO: 25347301 NR Description: T8K14.13 [imported] - Arabidopsis thaliana
  misc_feature (46)..(349): Homolog of NCBI NO: 15219220 NR Description: membrane protein common family; protein id:
  misc_feature (18)..(345): Homolog of NCBI NO: 18422638 NR Description: membrane protein common family; protein id:
  misc_feature (18)..(345): Homolog of NCBI NO: 21554054 NR Description: unknown [Arabidopsis thaliana]
  misc_feature (18)..(333): Homolog of NCBI NO: 9757735 NR Description: gb|AAD25612.1~gene_id:MCL19.21~similar to unknown

SEQ ID NO: 74340 - protein, 233 aa, Arabidopsis thaliana; identical to SEQ ID NO: 23753
  peptide (1)..(233): Ceres Seq. ID no. 5002871
  misc_feature (1)..(222): Pfam Name: LEM3 (ligand-effect modulator 3) family / CDC50 family Pfam Description: LEM3 (ligand-effect modulator 3) family / CDC50
  misc_feature (1)..(233): Homolog of NCBI NO: 18399730 NR Description: membrane protein common family; protein id: supported by cDNA: 37019., supported by cDNA: gi_15028094, by cDNA: gi_15294235, supported by cDNA: gi_20258910 [Arabidopsis
  misc_feature (1)..(233): Homolog of NCBI NO: 18404877 NR Description: membrane protein common family; protein id: supported by cDNA: gi_15010741, supported by cDNA: gi_15450728, by cDNA: gi_17386111 [Arabidopsis thaliana]
  misc_feature (1)..(232): Homolog of NCBI NO: 18412377 NR Description: membrane protein common family; protein id: supported by cDNA: 94828. [Arabidopsis thaliana]
  misc_feature (1)..(232): Homolog of NCBI NO: 25347303 NR Description: protein F3O9.16 [imported] - Arabidopsis thaliana
  misc_feature (1)..(232): Homolog of NCBI NO: 25347301 NR Description: T8K14.13 [imported] - Arabidopsis thaliana
  misc_feature (1)..(232): Homolog of NCBI NO: 15219220 NR Description: membrane protein common family; protein id:
  misc_feature (1)..(228): Homolog of NCBI NO: 18422638 NR Description: membrane protein common family; protein id:
  misc_feature (1)..(228): Homolog of NCBI NO: 21554054 NR Description: unknown [Arabidopsis thaliana]
  misc_feature (1)..(216): Homolog of NCBI NO: 9757735 NR Description: gb|AAD25612.1~gene_id:MCL19.21~similar to unknown
  misc_feature (1)..(225): Homolog of NCBI NO: 19570056 NR Description: similar to membrane protein common family; id: At3g12740.1, supported by cDNA: 37019., supported by cDNA: supported by cDNA: gi_15294235, supported by cDNA: gi_20258910

SEQ ID NO: 74341 - DNA, 590 bp, Arabidopsis thaliana
  misc_feature (1)..(590): Ceres Seq. ID no. 5002934
  misc_feature: MA Experiment ID: 20000307 Result: Down-regulated in Transcription
  misc_feature: MA Experiment 20000307 PARAMETER Experiment Name: At_Germinating_Seeds_Sub_P Parameter: Age (hr) Value: 24 vs. 0
  misc_feature: MA Experiment 20000307 PARAMETER Experiment Name: At_Germinating_Seeds_Sub_P Parameter: Organism Value: A. thaliana
  misc_feature: MA Experiment 20000307 PARAMETER Experiment Name: At_Germinating_Seeds_Sub_P Parameter: Plant Line Value: WS
  misc_feature: MA Experiment 20000307 PARAMETER Experiment Name: At_Germinating_Seeds_Sub_P Parameter: Tissue Value: Germinating Seeds
  misc_feature: MA Experiment ID: 20000440 Result: Up-regulated in Transcription
  misc_feature: MA Experiment 20000440 PARAMETER Experiment Name: At_Closed-Flower__Sub_P Parameter: Tissue Value: Closed Flower vs. Whole Plant
attctacatttcctctgcctctttctcagatcacaaaaccctaatttcgaatctttattcttcagaatggctttctgtaacaaactcggtggtctattgagacagaacatttcttctaacggaaatgttccggttacgtctatgctcggatctctccggttgatgtctaccaagcttttcatcggaggtctctcatggggaaccgatgacgcatccttaagggatgcttttgctcacttcggtgacgttgttgatgctaaagttatcgttgatagagagacaggaagatcaagggggtttggatttgtcaacttcaatgatgagggtgctgcaactgctgccatatcagagatggacggaaaggaactgaatggtcgtcacatccgagtgaatcctgctaatgatagaccagtggaggctacggtggtgatggtggtggtggtttctaaacagaggaggtgcttgtgaagaagaagagttaatggttctgtttagttggtttcttctattgaatcttatgttagtacaaaacctgaatgggatttgctgaaaactctttactctttttttggttaccaatcaattcggtt

SEQ ID NO: 74342 - protein, 155 aa, Arabidopsis thaliana
  peptide (1)..(155): Ceres Seq. ID no. 5002935
  misc_feature (59)..(130): Pfam Name: RNA recognition motif. (a.k.a. RRM, RBD, or RNP domain) Pfam Description: RNA recognition motif. (a.k.a. RRM, RBD, or RNP
  misc_feature (23)..(137): Homolog of NCBI NO: 2826811 NR Description: AtGRP2 [Arabidopsis thaliana]
  misc_feature (23)..(137): Homolog of NCBI NO: 15236359 NR Description: glycine-rich RNA-binding protein AtGRP2; protein At4g13850.1, supported by cDNA: 16314., supported by cDNA:
  misc_feature (23)..(137): Homolog of NCBI NO: 30682622 NR Description: glycine-rich RNA-binding protein (AtGRP2)
  misc_feature (42)..(137): Homolog of NCBI NO: 322514 NR Description: glycine-rich RNA-binding protein (clone A81) -
  misc_feature (23)..(136): Homolog of NCBI NO: 15229525 NR Description: glycine-rich RNA-binding protein; protein id: supported by cDNA: 18903., supported by cDNA: gi_17979515,
  misc_feature (23)..(136): Homolog of NCBI NO: 21553972 NR Description: glycine-rich RNA binding protein, putative
  misc_feature (23)..(136): Homolog of NCBI NO: 7439995 NR Description: RNA binding protein 3 - wood tobacco
  misc_feature (23)..(136): Homolog of NCBI NO: 7489099 NR Description: RNA-binding protein RGP-3 - wood tobacco
  misc_feature (23)..(137): Homolog of NCBI NO: 7439994 NR Description: glycine-rich RNA-binding protein - garden pea
  misc_feature (23)..(137): Homolog of NCBI NO: 2129722 NR Description: ribosomal protein S19 precursor, mitochondrial - thaliana >gi|457760|emb|CAA54951.1| ribosomal protein S19
ILHFLCLFLRSQNPNFESLFFRMAFCNKLGGLLRQNISSNGNVPVTSMLGSLRLMSTKLFIGGLSWGTDDASLRDAFAHFGDVVDAKVIVDRETGRSRGFGFVNFNDEGAATAAISEMDGKELNGRHIRVNPANDRPVEATVVMVVVVSKQRRCL

SEQ ID NO: 74343 - protein, 133 aa, Arabidopsis thaliana
  peptide (1)..(133): Ceres Seq. ID no. 5002936
  misc_feature (37)..(108): Pfam Name: RNA recognition motif. (a.k.a. RRM, RBD, or RNP domain) Pfam Description: RNA recognition motif. (a.k.a. RRM, RBD, or RNP
  misc_feature (1)..(115): Homolog of NCBI NO: 2826811 NR Description: AtGRP2 [Arabidopsis thaliana]
  misc_feature (1)..(115): Homolog of NCBI NO: 15236359 NR Description: glycine-rich RNA-binding protein AtGRP2; protein At4g13850.1, supported by cDNA: 16314., supported by cDNA:
  misc_feature (1)..(115): Homolog of NCBI NO: 30682622 NR Description: glycine-rich RNA-binding protein (AtGRP2)
  misc_feature (20)..(115): Homolog of NCBI NO: 322514 NR Description: glycine-rich RNA-binding protein (clone A81) -
  misc_feature (1)..(114): Homolog of NCBI NO: 15229525 NR Description: glycine-rich RNA-binding protein; protein id: supported by cDNA: 18903., supported by cDNA: gi_17979515,
  misc_feature (1)..(114): Homolog of NCBI NO: 21553972 NR Description: glycine-rich RNA binding protein, putative
  misc_feature (1)..(114): Homolog of NCBI NO: 7439995 NR Description: RNA binding protein 3 - wood tobacco
  misc_feature (1)..(114): Homolog of NCBI NO: 7489099 NR Description: RNA-binding protein RGP-3 - wood tobacco
  misc_feature (1)..(115): Homolog of NCBI NO: 7439994 NR Description: glycine-rich RNA-binding protein - garden pea
  misc_feature (1)..(115): Homolog of NCBI NO: 2129722 NR Description: ribosomal protein S19 precursor, mitochondrial - thaliana >gi|457760|emb|CAA54951.1| ribosomal protein S19
MAFCNKLGGLLRQNISSNGNVPVTSMLGSLRLMSTKLFIGGLSWGTDDASLRDAFAHFGDVVDAKVIVDRETGRSRGFGFVNFNDEGAATAAISEMDGKELNGRHIRVNPANDRPVEATVVMVVVVSKQRRCL

SEQ ID NO: 74344 - protein, 108 aa, Arabidopsis thaliana
  peptide (1)..(108): Ceres Seq. ID no. 5002937
  misc_feature (12)..(83): Pfam Name: RNA recognition motif. (a.k.a. RRM, RBD, or RNP domain) Pfam Description: RNA recognition motif. (a.k.a. RRM, RBD, or RNP
  misc_feature (1)..(90): Homolog of NCBI NO: 2826811 NR Description: AtGRP2 [Arabidopsis thaliana]
  misc_feature (1)..(90): Homolog of NCBI NO: 15236359 NR Description: glycine-rich RNA-binding protein AtGRP2; protein At4g13850.1, supported by cDNA: 16314., supported by cDNA:
  misc_feature (1)..(90): Homolog of NCBI NO: 30682622 NR Description: glycine-rich RNA-binding protein (AtGRP2)
  misc_feature (1)..(90): Homolog of NCBI NO: 322514 NR Description: glycine-rich RNA-binding protein (clone A81) -
  misc_feature (1)..(89): Homolog of NCBI NO: 15229525 NR Description: glycine-rich RNA-binding protein; protein id: supported by cDNA: 18903., supported by cDNA: gi_17979515,
  misc_feature (1)..(89): Homolog of NCBI NO: 21553972 NR Description: glycine-rich RNA binding protein, putative
  misc_feature (1)..(89): Homolog of NCBI NO: 7439995 NR Description: RNA binding protein 3 - wood tobacco
  misc_feature (1)..(89): Homolog of NCBI NO: 7489099 NR Description: RNA-binding protein RGP-3 - wood tobacco
  misc_feature (1)..(90): Homolog of NCBI NO: 7439994 NR Description: glycine-rich RNA-binding protein - garden pea
  misc_feature (1)..(90): Homolog of NCBI NO: 2129722 NR Description: ribosomal protein S19 precursor, mitochondrial - thaliana >gi|457760|emb|CAA54951.1| ribosomal protein S19
MLGSLRLMSTKLFIGGLSWGTDDASLRDAFAHFGDVVDAKVIVDRETGRSRGFGFVNFNDEGAATAAISEMDGKELNGRHIRVNPANDRPVEATVVMVVVVSKQRRCL

SEQ ID NO: 74345 - DNA, 1667 bp, Arabidopsis thaliana
  misc_feature (1)..(1667): Ceres Seq. ID no. 5003066
  misc_feature: MA Experiment ID: 20000180 Result: Up-regulated in Transcription
  misc_feature: MA Experiment 20000180 PARAMETER Experiment Name: At_Germinating_Seeds_P Parameter: Age (hr) Value: 24 vs. 0
  misc_feature: MA Experiment 20000180 PARAMETER Experiment Name: At_Germinating_Seeds_P Parameter: Tissue Value: Germinating Seeds
  misc_feature: MA Experiment ID: 20000182 Result: Up-regulated in Transcription
  misc_feature: MA Experiment 20000182 PARAMETER Experiment Name: At_2mM_SA_P Parameter: Age (day) Value: 14
  misc_feature: MA Experiment 20000182 PARAMETER Experiment Name: At_2mM_SA_P Parameter: Organism Value: A. thaliana
  misc_feature: MA Experiment 20000182 PARAMETER Experiment Name: At_2mM_SA_P Parameter: Plant Line Value: WS
  misc_feature: MA Experiment 20000182 PARAMETER Experiment Name: At_2mM_SA_P Parameter: Timepoint (hr) Value: 6
  misc_feature: MA Experiment 20000182 PARAMETER Experiment Name: At_2mM_SA_P Parameter: Tissue Value: Aerial
  misc_feature: MA Experiment 20000182 PARAMETER Experiment Name: At_2mM_SA_P Parameter: Treatment Value: 2mM SA vs. No Treatment
  misc_feature: MA Experiment ID: 20000185 Result: Up-regulated in Transcription
  misc_feature: MA Experiment 20000185 PARAMETER Experiment Name: At_Roots__P Parameter: Age (day) Value: 7 vs. 21
  misc_feature: MA Experiment 20000185 PARAMETER Experiment Name: At_Roots__P Parameter: Organism Value: A. thaliana
  misc_feature: MA Experiment 20000185 PARAMETER Experiment Name: At_Roots__P Parameter: Tissue Value: Roots vs. Whole Plant
  misc_feature: MA Experiment ID: 20000227 Result: Up-regulated in Transcription
  misc_feature: MA Experiment 20000227 PARAMETER Experiment Name: At_Root-Tips-vs-Tops_P Parameter: Tissue Value: Root Tips vs. Root Tops
  misc_feature: MA Experiment ID: 20000439 Result: Up-regulated in Transcription
  misc_feature: MA Experiment 20000439 PARAMETER Experiment Name: At_Roots__P Parameter: Age (day) Value: 14 vs. 21
  misc_feature: MA Experiment 20000439 PARAMETER Experiment Name: At_Roots__P Parameter: Organism Value: A. thaliana
  misc_feature: MA Experiment 20000439 PARAMETER Experiment Name: At_Roots__P Parameter: Tissue Value: Roots vs. Whole Plant
  misc_feature: MA Experiment ID: 20000495 Result: Up-regulated in Transcription
  misc_feature: MA Experiment 20000495 PARAMETER Experiment Name: At_Guard_Cells_P Parameter: Harvest Date Value: 8/2/2002
  misc_feature: MA Experiment 20000495 PARAMETER Experiment Name: At_Guard_Cells_P Parameter: Organism Value: A. thaliana
  misc_feature: MA Experiment 20000495 PARAMETER Experiment Name: At_Guard_Cells_P Parameter: Tissue Value: Guard Cells vs. Leaves
  misc_feature: Pfam Name: p450 Pfam Description: Cytochrome P450
atcacaaccaaattccttagagaaaaaggaagagaaaggtcaaagatgttttactatgtgattgtccttcctttagctctctttctcttggcttacaaattattcttcacctccaaaacgaagcgtttcaacctccctccctctccaccttactctctcccaatcctaggccaccacaacctcctcaagccgccggtccaccgtctcttccaccgcctctccaaaacacacggcccaatcttctccctccaatttggctcccgccgtgccgtcgtaatctcctcctcctcactcgcaacacaatgcttcacaggccaaaacgacatcattctctcaaaccggccttgtttcctaaccgctaaatacgtcgcttacaactacacaaccgtaggaaccgcgccttatggcgaccactggcgtaacctccgccgcatttgctccctggaaatcctctcctcgaaccgtctcacaaacttcctccacatccgtaaagacgaaatccaccgcatgctcacgagactctcacgcgacgtcaacaaagagatcgagctcgagccgctcttgtccgatctaacgttcaacaacatagtaagaatggttacagggaagagatactacggcgacgaagtccataacgaagaagaggcaaatgttttcaagaaactcgtcgccgatatcaacgactgtagcggcgcgagacatcccggagattacttgcccttcatgaagatgttcggagggagctttgagaagaaagtgaaagctcttgcggaagccatggatgagatcttgcagcgtttgcttgaagaatgcaagagagataaagatggtaacactatggttaatcatttgctctctctgcaacaaaatgaaccagagtattacactgacgtcactatcaaaggcctaatgctgggcatgatgatcgccggaacagacacttccgctgtgacgctggagtgggcgatgtcgagcttgctaaatcatcccgaggctttggaaaaagcaaaactagagattgacgagaaaatcggacaagaacgtttgatcgatgaaccagacatcgcaaacttgccttaccttcaaaacatagtgtcggaaacattccgattatatccagcggcaccgcttctagtaccaagatcaccaacagaggatattaaagtcggaggatacgatgtgccacgtggcacaatggtgatggttaatgcgtgggctatacacagagatccagagctctggaacgaaccggagaagtttaaaccagagaggtttaatggcggagaaggtggaggaagaggagaagacgttcataagctgatgccgtttgggaatggacggagatcgtgtcccggcgccggactagggcagaagatcgtgacattagcgttaggttcgttgatccaatgctttgactggcaaaaagtcaacggcgaagcaatcgatatgacggagactccggggatggcaatgcgtaagaaaatacctctatctgctttgtgtcaatctcggcccattatgagtaagcttcaggcccatttaaaaggttaggtttgttttcttcttaaagttctttttagttttctgttttctatgcatggagatgtgagattttgctgcgtttgtgtaacgaaggatatttgtgtaatgcgaacaaatgaaattcc

SEQ ID NO: 74346 - protein, 516 aa, Arabidopsis thaliana
  peptide (1)..(516): Ceres Seq. ID no. 5003067
  misc_feature: Pfam Name: p450 Pfam Description: Cytochrome P450
  misc_feature (16)..(516): Homolog of NCBI NO: 18420031 NR Description: cytochrome p450 family; protein id: At4g37400.1,
  misc_feature (16)..(516): Homolog of NCBI NO: 21618287 NR Description: cytochrome P450 monooxygenase-like protein
  misc_feature (16)..(515): Homolog of NCBI NO: 15235541 NR Description: cytochrome p450, putative; protein id: supported by cDNA: 102007. [Arabidopsis thaliana]
  misc_feature (16)..(512): Homolog of NCBI NO: 15242068 NR Description: cytochrome p450 family; protein id: At5g57220.1, by cDNA: gi_17528949, supported by cDNA: gi_20465950 [Arabidopsis >gi|8777355|dbj|BAA96945.1| cytochrome P450 [Arabidopsis
  misc_feature (16)..(472): Homolog of NCBI NO: 18252165 NR Description: cytochrome P450 monooxygenase - like protein
  misc_feature (19)..(510): Homolog of NCBI NO: 15235559 NR Description: cytochrome p450 family; protein id: At4g37430.1, by cDNA: 33365., supported by cDNA: gi_14532439, supported by gi_3164143 [Arabidopsis thaliana]
  misc_feature (19)..(510): Homolog of NCBI NO: 21618274 NR Description: cytochrome P450 monooxygenase CYP91A2
  misc_feature (19)..(510): Homolog of NCBI NO: 18491105 NR Description: AT4g37430/F6G17_80 [Arabidopsis thaliana]
  misc_feature (19)..(510): Homolog of NCBI NO: 25282605 NR Description: cytochrome P450 monooxygenase [imported] - thaliana >gi|3164144|dbj|BAA28539.1| cytochrome P450
  misc_feature (19)..(496): Homolog of NCBI NO: 23397303 NR Description: putative cytochrome P450 monooxygenase (CYP91A2)
ITTKFLREKGRERSKMFYYVIVLPLALFLLAYKLFFTSKTKRFNLPPSPPYSLPILGHHNLLKPPVHRLFHRLSKTHGPIFSLQFGSRRAVVISSSSLATQCFTGQNDIILSNRPCFLTAKYVAYNYTTVGTAPYGDHWRNLRRICSLEILSSNRLTNFLHIRKDEIHRMLTRLSRDVNKEIELEPLLSDLTFNNIVRMVTGKRYYGDEVHNEEEANVFKKLVADINDCSGARHPGDYLPFMKMFGGSFEKKVKALAEAMDEILQRLLEECKRDKDGNTMVNHLLSLQQNEPEYYTDVTIKGLMLGMMIAGTDTSAVTLEWAMSSLLNHPEALEKAKLEIDEKIGQERLIDEPDIANLPYLQNIVSETFRLYPAAPLLVPRSPTEDIKVGGYDVPRGTMVMVNAWAIHRDPELWNEPEKFKPERFNGGEGGGRGEDVHKLMPFGNGRRSCPGAGLGQKIVTLALGSLIQCFDWQKVNGEAIDMTETPGMAMRKKIPLSALCQSRPIMSKLQAHLKG

SEQ ID NO: 74347 - protein, 501 aa, Arabidopsis thaliana
  peptide (1)..(501): Ceres Seq. ID no. 5003068
  misc_feature: Pfam Name: p450 Pfam Description: Cytochrome P450
  misc_feature (1)..(501): Homolog of NCBI NO: 18420031 NR Description: cytochrome p450 family; protein id: At4g37400.1,
  misc_feature (1)..(501): Homolog of NCBI NO: 21618287 NR Description: cytochrome P450 monooxygenase-like protein
  misc_feature (1)..(500): Homolog of NCBI NO: 15235541 NR Description: cytochrome p450, putative; protein id: supported by cDNA: 102007. [Arabidopsis thaliana]
  misc_feature (1)..(497): Homolog of NCBI NO: 15242068 NR Description: cytochrome p450 family; protein id: At5g57220.1, by cDNA: gi_17528949, supported by cDNA: gi_20465950 [Arabidopsis >gi|8777355|dbj|BAA96945.1| cytochrome P450 [Arabidopsis
  misc_feature (1)..(457): Homolog of NCBI NO: 18252165 NR Description: cytochrome P450 monooxygenase - like protein
  misc_feature (4)..(495): Homolog of NCBI NO: 15235559 NR Description: cytochrome p450 family; protein id: At4g37430.1, by cDNA: 33365., supported by cDNA: gi_14532439, supported by gi_3164143 [Arabidopsis thaliana]
  misc_feature (4)..(495): Homolog of NCBI NO: 21618274 NR Description: cytochrome P450 monooxygenase CYP91A2
  misc_feature (4)..(495): Homolog of NCBI NO: 18491105 NR Description: AT4g37430/F6G17_80 [Arabidopsis thaliana]
  misc_feature (4)..(495): Homolog of NCBI NO: 25282605 NR Description: cytochrome P450 monooxygenase [imported] - thaliana >gi|3164144|dbj|BAA28539.1| cytochrome P450
  misc_feature (4)..(481): Homolog of NCBI NO: 23397303 NR Description: putative cytochrome P450 monooxygenase (CYP91A2)
MFYYVIVLPLALFLLAYKLFFTSKTKRFNLPPSPPYSLPILGHHNLLKPPVHRLFHRLSKTHGPIFSLQFGSRRAVVISSSSLATQCFTGQNDIILSNRPCFLTAKYVAYNYTTVGTAPYGDHWRNLRRICSLEILSSNRLTNFLHIRKDEIHRMLTRLSRDVNKEIELEPLLSDLTFNNIVRMVTGKRYYGDEVHNEEEANVFKKLVADINDCSGARHPGDYLPFMKMFGGSFEKKVKALAEAMDEILQRLLEECKRDKDGNTMVNHLLSLQQNEPEYYTDVTIKGLMLGMMIAGTDTSAVTLEWAMSSLLNHPEALEKAKLEIDEKIGQERLIDEPDIANLPYLQNIVSETFRLYPAAPLLVPRSPTEDIKVGGYDVPRGTMVMVNAWAIHRDPELWNEPEKFKPERFNGGEGGGRGEDVHKLMPFGNGRRSCPGAGLGQKIVTLALGSLIQCFDWQKVNGEAIDMTETPGMAMRKKIPLSALCQSRPIMSKLQAHLKG

SEQ ID NO: 74348 - protein, 347 aa, Arabidopsis thaliana
  peptide (1)..(347): Ceres Seq. ID no. 5003069
  misc_feature: Pfam Name: p450 Pfam Description: Cytochrome P450
  misc_feature (1)..(347): Homolog of NCBI NO: 18420031 NR Description: cytochrome p450 family; protein id: At4g37400.1,
  misc_feature (1)..(347): Homolog of NCBI NO: 21618287 NR Description: cytochrome P450 monooxygenase-like protein
  misc_feature (1)..(346): Homolog of NCBI NO: 15235541 NR Description: cytochrome p450, putative; protein id: supported by cDNA: 102007. [Arabidopsis thaliana]
  misc_feature (1)..(343): Homolog of NCBI NO: 15242068 NR Description: cytochrome p450 family; protein id: At5g57220.1, by cDNA: gi_17528949, supported by cDNA: gi_20465950 [Arabidopsis >gi|8777355|dbj|BAA96945.1| cytochrome P450 [Arabidopsis
  misc_feature (1)..(303): Homolog of NCBI NO: 18252165 NR Description: cytochrome P450 monooxygenase - like protein
  misc_feature (1)..(341): Homolog of NCBI NO: 15235559 NR Description: cytochrome p450 family; protein id: At4g37430.1, by cDNA: 33365., supported by cDNA: gi_14532439, supported by gi_3164143 [Arabidopsis thaliana]
  misc_feature (1)..(341): Homolog of NCBI NO: 21618274 NR Description: cytochrome P450 monooxygenase CYP91A2
  misc_feature (1)..(341): Homolog of NCBI NO: 18491105 NR Description: AT4g37430/F6G17_80 [Arabidopsis thaliana]
  misc_feature (1)..(341): Homolog of NCBI NO: 25282605 NR Description: cytochrome P450 monooxygenase [imported] - thaliana >gi|3164144|dbj|BAA28539.1| cytochrome P450
  misc_feature (1)..(327): Homolog of NCBI NO: 23397303 NR Description: putative cytochrome P450 monooxygenase (CYP91A2)
MLTRLSRDVNKEIELEPLLSDLTFNNIVRMVTGKRYYGDEVHNEEEANVFKKLVADINDCSGARHPGDYLPFMKMFGGSFEKKVKALAEAMDEILQRLLEECKRDKDGNTMVNHLLSLQQNEPEYYTDVTIKGLMLGMMIAGTDTSAVTLEWAMSSLLNHPEALEKAKLEIDEKIGQERLIDEPDIANLPYLQNIVSETFRLYPAAPLLVPRSPTEDIKVGGYDVPRGTMVMVNAWAIHRDPELWNEPEKFKPERFNGGEGGGRGEDVHKLMPFGNGRRSCPGAGLGQKIVTLALGSLIQCFDWQKVNGEAIDMTETPGMAMRKKIPLSALCQSRPIMSKLQAHLKG

SEQ ID NO: 74349 - DNA, 1059 bp, Arabidopsis thaliana
  misc_feature (1)..(1059): Ceres Seq. ID no. 5665864
  misc_feature: MA Experiment ID: 108461 Result: Up-regulated in Transcription
  misc_feature: MA Experiment 108461 PARAMETER Experiment Name: At_Germinating_Seeds_cDNA_P Parameter: Age (day) Value: 1 vs. 0
  misc_feature: MA Experiment 108461 PARAMETER Experiment Name: At_Germinating_Seeds_cDNA_P Parameter: Tissue Value: Germinating Seeds
  misc_feature: MA Experiment ID: 108462 Result: Up-regulated in Transcription
  misc_feature: MA Experiment 108462 PARAMETER Experiment Name: At_Germinating_Seeds_cDNA_P Parameter: Age (day) Value: 2 vs. 0
  misc_feature: MA Experiment 108462 PARAMETER Experiment Name: At_Germinating_Seeds_cDNA_P Parameter: Tissue Value: Germinating Seeds
  misc_feature: MA Experiment ID: 108463 Result: Up-regulated in Transcription
  misc_feature: MA Experiment 108463 PARAMETER Experiment Name: At_Germinating_Seeds_cDNA_P Parameter: Age (day) Value: 3 vs. 0
  misc_feature: MA Experiment 108463 PARAMETER Experiment Name: At_Germinating_Seeds_cDNA_P Parameter: Tissue Value: Germinating Seeds
  misc_feature: MA Experiment ID: 108464 Result: Up-regulated in Transcription
  misc_feature: MA Experiment 108464 PARAMETER Experiment Name: At_Germinating_Seeds_cDNA_P Parameter: Age (day) Value: 4 vs. 0
  misc_feature: MA Experiment 108464 PARAMETER Experiment Name: At_Germinating_Seeds_cDNA_P Parameter: Tissue Value: Germinating Seeds
  misc_feature: MA Experiment ID: 108488 Result: Down-regulated in Transcription
  misc_feature: MA Experiment ID: 108668 Result: Up-regulated in Transcription
  misc_feature: MA Experiment 108668 PARAMETER Experiment Name: At_2mM_SA_cDNA_P Parameter: Plant Line Value: WS
  misc_feature: MA Experiment 108668 PARAMETER Experiment Name: At_2mM_SA_cDNA_P Parameter: Timepoint (hr) Value: 6
  misc_feature: MA Experiment 108668 PARAMETER Experiment Name: At_2mM_SA_cDNA_P Parameter: Treatment Value: 2mM SA vs. No Treatment
  misc_feature: MA Experiment ID: 20000089 Result: Down-regulated in Transcription
  misc_feature: MA Experiment ID: 20000113 Result: Down-regulated in Transcription
  misc_feature: MA Experiment 20000113 PARAMETER Experiment Name: At_42deg_Heat_cDNA_P Parameter: Temperature (deg C) Value: 42 vs. 22
  misc_feature: MA Experiment 20000113 PARAMETER Experiment Name: At_42deg_Heat_cDNA_P Parameter: Timepoint (hr) Value: 8
  misc_feature: MA Experiment 20000113 PARAMETER Experiment Name: At_42deg_Heat_cDNA_P Parameter: Tissue Value: Aerial
cataaacatcaaatggttctaattggtctttgatcttaaacccatttgattatggtatctaaagtttgatccttttgatgcactctcatcgcagtttctcgtgattttaatattattgaactcttttgatttgtggtgaagcaaaccttctctgtcacaactagctccattagaagccattctgtttgatgttgatggaacactctgtgactcagatcccatccaccttattgccttccaagaactgcttcaagagattggttttaacaatggtgtcccaatcgatgagaaattctttgttgagaacattgctggaaaacacaattctgaaattgctctacttctgttccctgatgatgtttcaagagggttaaaattctgtgatgaaaaggaagctctttaccgcaaaattgttgcagagaagataaagccacttgatgggcttataaaactgaccaaatggatcgaagatcgtggattgaaacgagctgcggtaacaaacgctccaaaagaaaacgcagagctcatgatatcgaaacttggtctgactgatttctttcaagcagtgattcttggctctgaatgtgaatttcccaaaccacaccctggaccttacttgaaggctcttgaagtgcttaacgtgtcaaaggagcacacgctagttttcgaagactcgatctctgggataaaagctggagttgcagctggaatgccagtgattggactgactacagggaatccagcaagcctgcttatgcaagcaaaacccgcttttctcatcgagaactatgcggatccaaaactgtgggctgtgttggaagaacttgataacaagtcttaagtctcacttgtttggcttatggaaacccacacatgcatgagcagcctctgaagtttaccttatgtcttagatgatcattgttgaataattcattgggagtttatgacaatgggagctttcaaatatctgattattttgtattgatacatgcacaatgctagatttgtatccaggagatagttgcataaaccaatatactataccctcggatcttagct

SEQ ID NO: 74350 - protein, 104 aa, Arabidopsis thaliana; identical to SEQ ID NO: 36387
  peptide (1)..(104): Ceres Seq. ID no. 5665865
  misc_feature (1)..(70): Pfam Name: haloacid dehalogenase-like hydrolase Pfam Description: haloacid dehalogenase-like hydrolase
  misc_feature (1)..(104): Homolog of NCBI NO: 18404847 NR Description: expressed protein; protein id: At2g38740.1, by cDNA: 40283., supported by cDNA: gi_15912256, supported by gi_19547992 [Arabidopsis thaliana] >gi|15912257|gb|AAL08262.1|
  misc_feature (1)..(104): Homolog of NCBI NO: 25408616 NR Description: hypothetical protein At2g38740 [imported] -
  misc_feature (1)..(101): Homolog of NCBI NO: 37536998 NR Description: putative beta-phosphoglucomutase [Oryza sativa
  misc_feature (1)..(100): Homolog of NCBI NO: 34897820 NR Description: P0514G12.30 [Oryza sativa (japonica
  misc_feature (1)..(101): Homolog of NCBI NO: 37700485 NR Description: putative beta-phosphoglucomutase [Oryza sativa]
  misc_feature (1)..(100): Homolog of NCBI NO: 23127812 NR Description: hypothetical protein [Nostoc punctiforme]
  misc_feature (1)..(100): Homolog of NCBI NO: 17228223 NR Description: hypothetical protein [Nostoc sp. PCC 7120]
  misc_feature (1)..(97): Homolog of NCBI NO: 37521914 NR Description: hypothetical protein glr2345 [Gloeobacter
  misc_feature (1)..(93): Homolog of NCBI NO: 23042473 NR Description: hypothetical protein [Trichodesmium erythraeum
  misc_feature (1)..(97): Homolog of NCBI NO: 27377543 NR Description: blr2432 [Bradyrhizobium japonicum]

SEQ ID NO: 74351 - protein, 61 aa, Arabidopsis thaliana
  peptide (1)..(61): Ceres Seq. ID no. 5665866
MLMEHSVTQIPSTLLPSKNCFKRLVLTMVSQSMRNSLLRTLLENTILKLLYFCSLMMFQEG

SEQ ID NO: 74352 - protein, 59 aa, Arabidopsis thaliana
  peptide (1)..(59): Ceres Seq. ID no. 5665867
MEHSVTQIPSTLLPSKNCFKRLVLTMVSQSMRNSLLRTLLENTILKLLYFCSLMMFQEG

SEQ ID NO: 74353 - DNA, 1227 bp, Arabidopsis thaliana
  misc_feature (1)..(1227): Ceres Seq. ID no. 5666068
  misc_feature: MA Experiment ID: 108569 Result: Up-regulated in Transcription
  misc_feature: MA Experiment 108569 PARAMETER Experiment Name: At_0.001%_MeJA__cDNA_P Parameter: Timepoint (hr) Value: 6
  misc_feature: MA Experiment 108569 PARAMETER Experiment Name: At_0.001%_MeJA__cDNA_P Parameter: Tissue Value: Aerial
  misc_feature: MA Experiment 108569 PARAMETER Experiment Name: At_0.001%_MeJA__cDNA_P Parameter: Treatment Value: 0.001% MeJA vs. No Treatment
  misc_feature: MA Experiment ID: 108573 Result: Up-regulated in Transcription
  misc_feature: MA Experiment 108573 PARAMETER Experiment Name: At_Drought_cDNA_P Parameter: Timepoint (hr) Value: 6
  misc_feature: MA Experiment 108573 PARAMETER Experiment Name: At_Drought_cDNA_P Parameter: Tissue Value: Aerial
  misc_feature: MA Experiment 108573 PARAMETER Experiment Name: At_Drought_cDNA_P Parameter: Treatment Value: Drought vs. No Drought
  misc_feature: MA Experiment ID: 108579 Result: Down-regulated in Transcription
  misc_feature: MA Experiment 108579 PARAMETER Experiment Name: At_4deg_Cold_cDNA_P Parameter: Temperature (deg C) Value: 4 vs. 22
  misc_feature: MA Experiment 108579 PARAMETER Experiment Name: At_4deg_Cold_cDNA_P Parameter: Timepoint (hr) Value: 6
  misc_feature: MA Experiment 108579 PARAMETER Experiment Name: At_4deg_Cold_cDNA_P Parameter: Tissue Value: Aerial
  misc_feature: MA Experiment ID: 108595 Result: Down-regulated in Transcription
  misc_feature: MA Experiment 108595 PARAMETER Experiment Name: At_Ler-pi_Ovule_cDNA_P Parameter: Plant Line Value: null
  misc_feature: MA Experiment ID: 20000224 Result: Down-regulated in Transcription
  misc_feature: MA Experiment ID: 20001450 Result: Up-regulated in Transcription
  misc_feature: MA Experiment 20001450 PARAMETER Experiment Name: At_Far-red-induction_P Parameter: Age (day) Value: 7
  misc_feature: MA Experiment 20001450 PARAMETER Experiment Name: At_Far-red-induction_P Parameter: Light Value: Far-red vs. White
  misc_feature: MA Experiment 20001450 PARAMETER Experiment Name: At_Far-red-induction_P Parameter: Organism Value: A. thaliana
  misc_feature: MA Experiment 20001450 PARAMETER Experiment Name: At_Far-red-induction_P Parameter: Plant Line Value: Columbia
  misc_feature: MA Experiment 20001450 PARAMETER Experiment Name: At_Far-red-induction_P Parameter: Timepoint (hr) Value: 8
  misc_feature: MA Experiment 20001450 PARAMETER Experiment Name: At_Far-red-induction_P Parameter: Tissue Value: Whole Plant
  misc_feature: Pfam Name: DUF1004 Pfam Description: GAGA binding protein-like family
atctctctctctctctaccctttggatctttcttctcgatcaattatccattttgcccagattttttccagaagctcatcgaattcatcgaatcacaatgtttgaaatttggtttcactgttgctgagtgtgtttggaggagaagcttgattggttcggtgtttcactgtttgaagattataagagttatggagaatggtggtcagtatgataatgcgcggttcaagcccgattacttcaaaggtgcacaatctatgtggaatatgattccccagcatcagattaaggaacaacataatgcgttggtgatgaataagaagatcatgtccatccttgctgagagagacgctgctgtacatgaaagaaatcaagctgtctctgctaaaaaggaagctgtcgctgctcgggacgaagcgcttcagcaacgtgacaaagctctttctgagagagataaagctttgatagagagagataatgcttatgctgctcttcaacaccatgaaaatagtctcaactttgctttgtctggtgggaagtgtgttgatggagatgattgttttggtattggggaaccccacaaacttgaagtcttccctttgtcaactattccgcctgaggttacaaacacgaaggtggtgaacaaaaggaagaaagagaacaagcagggactatcaaaggtgaaaaaagtgggtgaagatctgaaccgtcgagttcctgctcctggaaagaaatctagaacagattgggacagtcaagatgtcggtttgaacttagtcaccttcgatgagacgacaatgcctgtacccatgtgttcgtgcacaggctctacgcgtcagtgttacaaatggggaaatggcggctggcaatcgtcttgctgcacaaccaccttatcccagtatccattaccgcagatgccaaacaagaggcattctcggatgggcggtaggaaaatgagcggaaacgttttctcgagattactcagccgtttatcagcagaaggatatgatctctcgtgtcctgttgatcttaaagactattgggctaggcacgggacaaaccgctacatcactatcaagtagcctctgttgtttacacagtccaagtatgtttctctcgtcttcttaagattaggtgttgtctttgtctttattgtccatagtttgttctttgttgtgtatggtaaaaccattgttatgtgtatcttttggatgggcaaaaatggtttgc

SEQ ID NO: 74354 - protein, 358 aa, Arabidopsis thaliana
  peptide (1)..(358): Ceres Seq. ID no. 5666069
  misc_feature: Pfam Name: DUF1004 Pfam Description: GAGA binding protein-like family
  misc_feature (63)..(358): Homolog of NCBI NO: 18399638 NR Description: expressed protein; protein id: At2g21240.1, by cDNA: 111536. [Arabidopsis thaliana] >gi|25412022|pir||H84598
  misc_feature (63)..(330): Homolog of NCBI NO: 15234867 NR Description: putative protein; protein id: At4g38910.1
  misc_feature (63)..(358): Homolog of NCBI NO: 9759488 NR Description: gb|AAF18661.1~gene_id:MDH9.22~similar to unknown
  misc_feature (202)..(358): Homolog of NCBI NO: 18422219 NR Description: putative protein; protein id: At5g42520.1, by cDNA: 7878. [Arabidopsis thaliana] >gi|21618292|gb|AAM67342.1|
LSLSLPFGSFFSINYPFCPDFFQKLIEFIESQCLKFGFTVAECVWRRSLIGSVFHCLKIIRVMENGGQYDNARFKPDYFKGAQSMWNMIPQHQIKEQHNALVMNKKIMSILAERDAAVHERNQAVSAKKEAVAARDEALQQRDKALSERDKALIERDNAYAALQHHENSLNFALSGGKCVDGDDCFGIGEPHKLEVFPLSTIPPEVTNTKVVNKRKKENKQGLSKVKKVGEDLNRRVPAPGKKSRTDWDSQDVGLNLVTFDETTMPVPMCSCTGSTRQCYKWGNGGWQSSCCTTTLSQYPLPQMPNKRHSRMGGRKMSGNVFSRLLSRLSAEGYDLSCPVDLKDYWARHGTNRYITIK

SEQ ID NO: 74355 - protein, 296 aa, Arabidopsis thaliana; identical to SEQ ID NO: 39962
  peptide (1)..(296): Ceres Seq. ID no. 5666070
  misc_feature: Pfam Name: DUF1004 Pfam Description: GAGA binding protein-like family
  misc_feature (1)..(296): Homolog of NCBI NO: 18399638 NR Description: expressed protein; protein id: At2g21240.1, by cDNA: 111536. [Arabidopsis thaliana] >gi|25412022|pir||H84598
  misc_feature (1)..(268): Homolog of NCBI NO: 15234867 NR Description: putative protein; protein id: At4g38910.1
  misc_feature (1)..(296): Homolog of NCBI NO: 9759488 NR Description: gb|AAF18661.1~gene_id:MDH9.22~similar to unknown
  misc_feature (140)..(296): Homolog of NCBI NO: 18422219 NR Description: putative protein; protein id: At5g42520.1, by cDNA: 7878. [Arabidopsis thaliana] >gi|21618292|gb|AAM67342.1|

SEQ ID NO: 74356 - protein, 274 aa, Arabidopsis thaliana; identical to SEQ ID NO: 39963
  peptide (1)..(274): Ceres Seq. ID no. 5666071
  misc_feature: Pfam Name: DUF1004 Pfam Description: GAGA binding protein-like family
  misc_feature (1)..(274): Homolog of NCBI NO: 18399638 NR Description: expressed protein; protein id: At2g21240.1, by cDNA: 111536. [Arabidopsis thaliana] >gi|25412022|pir||H84598
  misc_feature (1)..(246): Homolog of NCBI NO: 15234867 NR Description: putative protein; protein id: At4g38910.1
  misc_feature (1)..(274): Homolog of NCBI NO: 9759488 NR Description: gb|AAF18661.1~gene_id:MDH9.22~similar to unknown
  misc_feature (118)..(274): Homolog of NCBI NO: 18422219 NR Description: putative protein; protein id: At5g42520.1, by cDNA: 7878. [Arabidopsis thaliana] >gi|21618292|gb|AAM67342.1|

SEQ ID NO: 74357 - DNA, 883 bp, Arabidopsis thaliana
  misc_feature (1)..(883): Ceres Seq. ID no. 5666180
  misc_feature: MA Experiment ID: 108434 Result: Up-regulated in Transcription
  misc_feature: MA Experiment 108434 PARAMETER Experiment Name: At_Root_Tips_cDNA_P Parameter: Tissue Value: Root Tips
  misc_feature: MA Experiment ID: 108462 Result: Up-regulated in Transcription
  misc_feature: MA Experiment 108462 PARAMETER Experiment Name: At_Germinating_Seeds_cDNA_P Parameter: Age (day) Value: 2 vs. 0
  misc_feature: MA Experiment 108462 PARAMETER Experiment Name: At_Germinating_Seeds_cDNA_P Parameter: Tissue Value: Germinating Seeds
  misc_feature: MA Experiment ID: 108608 Result: Up-regulated in Transcription
  misc_feature: MA Experiment 108608 PARAMETER Experiment Name: At_100uM_ABA_cDNA_P Parameter: Timepoint (hr) Value: 1
  misc_feature: MA Experiment 108608 PARAMETER Experiment Name: At_100uM_ABA_cDNA_P Parameter: Tissue Value: Aerial
  misc_feature: MA Experiment 108608 PARAMETER Experiment Name: At_100uM_ABA_cDNA_P Parameter: Treatment Value: 100uM ABA vs. No Treatment
  misc_feature: MA Experiment ID: 20000087 Result: Down-regulated in Transcription
  misc_feature: MA Experiment 20000087 PARAMETER Experiment Name: At_100uM_ABA_Mutants_cDNA_P Parameter: Plant Line Value: WS
  misc_feature: MA Experiment 20000087 PARAMETER Experiment Name: At_100uM_ABA_Mutants_cDNA_P Parameter: Timepoint (hr) Value: 6
  misc_feature: MA Experiment 20000087 PARAMETER Experiment Name: At_100uM_ABA_Mutants_cDNA_P Parameter: Tissue Value: Aerial
  misc_feature: MA Experiment 20000087 PARAMETER Experiment Name: At_100uM_ABA_Mutants_cDNA_P Parameter: Treatment Value: 100uM ABA vs. No Treatment
  misc_feature: MA Experiment ID: 20000090 Result: Down-regulated in Transcription
  misc_feature: MA Experiment ID: 20000166 Result: Up-regulated in Transcription
  misc_feature: MA Experiment 20000166 PARAMETER Experiment Name: At_100uM_ABA_P Parameter: Age (day) Value: 14
  misc_feature: MA Experiment 20000166 PARAMETER Experiment Name: At_100uM_ABA_P Parameter: Organism Value: A. thaliana
  misc_feature: MA Experiment 20000166 PARAMETER Experiment Name: At_100uM_ABA_P Parameter: Plant Line Value: WS
  misc_feature: MA Experiment 20000166 PARAMETER Experiment Name: At_100uM_ABA_P Parameter: Timepoint (hr) Value: 1
  misc_feature: MA Experiment 20000166 PARAMETER Experiment Name: At_100uM_ABA_P Parameter: Tissue Value: Aerial
  misc_feature: MA Experiment 20000166 PARAMETER Experiment Name: At_100uM_ABA_P Parameter: Treatment Value: 100uM ABA vs. No Treatment
  misc_feature: MA Experiment ID: 20000179 Result: Up-regulated in Transcription
  misc_feature: MA Experiment 20000179 PARAMETER Experiment Name: At_Germinating_Seeds_P Parameter: Age (hr) Value: 6 vs. 0
  misc_feature: MA Experiment 20000179 PARAMETER Experiment Name: At_Germinating_Seeds_P Parameter: Tissue Value: Germinating Seeds
  misc_feature: MA Experiment ID: 20000180 Result: Up-regulated in Transcription
  misc_feature: MA Experiment 20000180 PARAMETER Experiment Name: At_Germinating_Seeds_P Parameter: Age (hr) Value: 24 vs. 0
  misc_feature: MA Experiment 20000180 PARAMETER Experiment Name: At_Germinating_Seeds_P Parameter: Tissue Value: Germinating Seeds
  misc_feature: MA Experiment ID: 20000213 Result: Up-regulated in Transcription
  misc_feature: MA Experiment 20000213 PARAMETER Experiment Name: At_4deg_Cold_P Parameter: Timepoint (hr) Value: 2
  misc_feature: MA Experiment ID: 20000224 Result: Up-regulated in Transcription
  misc_feature: MA Experiment ID: 20000235 Result: Up-regulated in Transcription
  misc_feature: MA Experiment 20000235 PARAMETER Experiment Name: At_Siliques_P Parameter: Age (day) Value: 21
  misc_feature: MA Experiment 20000235 PARAMETER Experiment Name: At_Siliques_P Parameter: Organism Value: A. thaliana
  misc_feature: MA Experiment 20000235 PARAMETER Experiment Name: At_Siliques_P Parameter: Plant Line Value: WS
  misc_feature: MA Experiment 20000235 PARAMETER Experiment Name: At_Siliques_P Parameter: Tissue Value: 5-10mm Siliques vs. Whole Plant
  misc_feature: MA Experiment ID: 20000794 Result: Down-regulated in Transcription
  misc_feature: MA Experiment 20000794 PARAMETER Experiment Name: At_Petals_P Parameter: Age (day) Value: 23-25 days
  misc_feature: MA Experiment 20000794 PARAMETER Experiment Name: At_Petals_P Parameter: Plant Line Value: WS
  misc_feature: MA Experiment 20000794 PARAMETER Experiment Name: At_Petals_P Parameter: Tissue Value: Petals vs. Whole plant
  misc_feature: MA Experiment ID: 20001248 Result: Down-regulated in Transcription
  misc_feature: MA Experiment 20001248 PARAMETER Experiment Name: At_Far-red-induction_P Parameter: Age (day) Value: 7
  misc_feature: MA Experiment 20001248 PARAMETER Experiment Name: At_Far-red-induction_P Parameter: Light Value: Far-red vs. White
  misc_feature: MA Experiment 20001248 PARAMETER Experiment Name: At_Far-red-induction_P Parameter: Organism Value: A. thaliana
  misc_feature: MA Experiment 20001248 PARAMETER Experiment Name: At_Far-red-induction_P Parameter: Plant Line Value: Columbia
  misc_feature: MA Experiment 20001248 PARAMETER Experiment Name: At_Far-red-induction_P Parameter: Timepoint (hr) Value: 4
  misc_feature: MA Experiment 20001248 PARAMETER Experiment Name: At_Far-red-induction_P Parameter: Tissue Value: Whole Plant
  misc_feature: Pfam Name: DUF1685 Pfam Description: Protein of unknown function (DUF1685)
ctcccgacacaacacaaagttcatataataagaaaaacagagagaaacacacagagagctagaggagagtgagtgtcatgggttgtgttcgctgcaaatcatcagatccatggcaaacatctgccaatgcctttgaatccgtcgatgaatccggaatcaacgaagcctgggttgagatctccagccgcagatcatttgtcgccggcgaaggtagtcggaagaagctagagaggaagaagagccaagtgttactggaaggttacgttgagactgcttcttcttcctcggtggatgatcaaaaggacgatctgacgagatccaagagtttgacggatgacgacctcgaagatcttagaggttgtttagatctagggtttggttttagctacgacgagatccctgagctctgcaacactttacctgctttggagctttgctattcaatgagccagaagttcttagacgataagcaaaataaatcaccggaaacttcgtcggtggaagattgtccgtcgcctccactggtcaccgccactccgattgccaattggaagatctctagtcccggtgataatccggatgatgtgaaagctaggctcaaatactgggcacaagccgttgcctgtactgtccaattgtgcagctgaatgaatcattgtcacgtctgaaccaggaatactagcgaatgagcaatatctcaagcattggtagcggaggaggagatttcagaaagtggcattggaaggtctaaaattgaactgaatatcaacaatggttctcacttaattccatgtatgtgtactagtagttagtagtatctagtctaatgattttatgaacggaaataaaagatatcacttgaataaaaccatcaaattctttc

SEQ ID NO: 74358 - protein, 189 aa, Arabidopsis thaliana
  peptide (1)..(189): Ceres Seq. ID no. 5666181
  misc_feature: Pfam Name: DUF1685 Pfam Description: Protein of unknown function (DUF1685)
  misc_feature (1)..(189): Homolog of NCBI NO: 25406874 NR Description: hypothetical protein [imported] - Arabidopsis >gi|6850316|gb|AAF29393.1|AC009999_13 Contains similarity to an protein from Arabidopsis thaliana gb|AC002335.2. ESTs
  misc_feature (1)..(182): Homolog of NCBI NO: 15221309 NR Description: unknown protein; protein id: At1g05870.1
  misc_feature (24)..(189): Homolog of NCBI NO: 30684991 NR Description: expressed protein [Arabidopsis thaliana]
  misc_feature (13)..(189): Homolog of NCBI NO: 30689349 NR Description: expressed protein [Arabidopsis thaliana]
  misc_feature (13)..(186): Homolog of NCBI NO: 25408860 NR Description: hypothetical protein At2g43340 [imported] - thaliana >gi|2289002|gb|AAB64331.1| unknown protein [Arabidopsis
  misc_feature (24)..(165): Homolog of NCBI NO: 25408168 NR Description: hypothetical protein At2g31560 [imported] - thaliana >gi|4582451|gb|AAD24835.1| unknown protein [Arabidopsis
  misc_feature (123)..(189): Homolog of NCBI NO: 26451183 NR Description: unknown protein [Arabidopsis thaliana]
  misc_feature (42)..(164): Homolog of NCBI NO: 34907664 NR Description: P0506A10.18 [Oryza sativa (japonica
  misc_feature (84)..(185): Homolog of NCBI NO: 15228829 NR Description: hypothetical protein; protein id: At3g22690.1
  misc_feature (51)..(185): Homolog of NCBI NO: 15241882 NR Description: putative protein; protein id: At5g28690.1
MGCVRCKSSDPWQTSANAFESVDESGINEAWVEISSRRSFVAGEGSRKKLERKKSQVLLEGYVETASSSSVDDQKDDLTRSKSLTDDDLEDLRGCLDLGFGFSYDEIPELCNTLPALELCYSMSQKFLDDKQNKSPETSSVEDCPSPPLVTATPIANWKISSPGDNPDDVKARLKYWAQAVACTVQLCS

SEQ ID NO: 74359 - DNA, 1357 bp, Arabidopsis thaliana
  misc_feature (1)..(1357): Ceres Seq. ID no. 5666551
  misc_feature: MA Experiment ID: 108474 Result: Down-regulated in Transcription
  misc_feature: MA Experiment 108474 PARAMETER Experiment Name: At_Drought_Flowers_cDNA_P Parameter: Timepoint (hr) Value: null
  misc_feature: MA Experiment 108474 PARAMETER Experiment Name: At_Drought_Flowers_cDNA_P Parameter: Treatment Value: Drought vs. No Drought
  misc_feature: MA Experiment ID: 20000171 Result: Up-regulated in Transcription
  misc_feature: MA Experiment 20000171 PARAMETER Experiment Name: At_42deg_Heat_P Parameter: Age (day) Value: 14
  misc_feature: MA Experiment 20000171 PARAMETER Experiment Name: At_42deg_Heat_P Parameter: Organism Value: A. thaliana
  misc_feature: MA Experiment 20000171 PARAMETER Experiment Name: At_42deg_Heat_P Parameter: Plant Line Value: WS
  misc_feature: MA Experiment 20000171 PARAMETER Experiment Name: At_42deg_Heat_P Parameter: Temperature (deg C) Value: 42 vs. 22
  misc_feature: MA Experiment 20000171 PARAMETER Experiment Name: At_42deg_Heat_P Parameter: Timepoint (hr) Value: 1
  misc_feature: MA Experiment 20000171 PARAMETER Experiment Name: At_42deg_Heat_P Parameter: Tissue Value: Aerial
  misc_feature: MA Experiment ID: 20000173 Result: Up-regulated in Transcription
  misc_feature: MA Experiment 20000173 PARAMETER Experiment Name: At_42deg_Heat_P Parameter: Age (day) Value: 14
  misc_feature: MA Experiment 20000173 PARAMETER Experiment Name: At_42deg_Heat_P Parameter: Organism Value: A. thaliana
  misc_feature: MA Experiment 20000173 PARAMETER Experiment Name: At_42deg_Heat_P Parameter: Plant Line Value: WS
  misc_feature: MA Experiment 20000173 PARAMETER Experiment Name: At_42deg_Heat_P Parameter: Temperature (deg C) Value: 42 vs. 22
  misc_feature: MA Experiment 20000173 PARAMETER Experiment Name: At_42deg_Heat_P Parameter: Timepoint (hr) Value: 6
  misc_feature: MA Experiment 20000173 PARAMETER Experiment Name: At_42deg_Heat_P Parameter: Tissue Value: Aerial
  misc_feature: MA Experiment ID: 20000180 Result: Up-regulated in Transcription
  misc_feature: MA Experiment 20000180 PARAMETER Experiment Name: At_Germinating_Seeds_P Parameter: Age (hr) Value: 24 vs. 0
  misc_feature: MA Experiment 20000180 PARAMETER Experiment Name: At_Germinating_Seeds_P Parameter: Tissue Value: Germinating Seeds
  misc_feature: MA Experiment ID: 20000185 Result: Up-regulated in Transcription
  misc_feature: MA Experiment 20000185 PARAMETER Experiment Name: At_Roots__P Parameter: Age (day) Value: 7 vs. 21
  misc_feature: MA Experiment 20000185 PARAMETER Experiment Name: At_Roots__P Parameter: Organism Value: A. thaliana
  misc_feature: MA Experiment 20000185 PARAMETER Experiment Name: At_Roots__P Parameter: Tissue Value: Roots vs. Whole Plant
  misc_feature: MA Experiment ID: 20000227 Result: Down-regulated in Transcription
  misc_feature: MA Experiment 20000227 PARAMETER Experiment Name: At_Root-Tips-vs-Tops_P Parameter: Tissue Value: Root Tips vs. Root Tops
  misc_feature: MA Experiment ID: 20000265 Result: Up-regulated in Transcription
  misc_feature: MA Experiment 20000265 PARAMETER Experiment Name: At_Open_Flower_P Parameter: Age (day) Value: 21
  misc_feature: MA Experiment 20000265 PARAMETER Experiment Name: At_Open_Flower_P Parameter: Plant Line Value: WS
  misc_feature: MA Experiment 20000265 PARAMETER Experiment Name: At_Open_Flower_P Parameter: Tissue Value: Closed Flower vs. Whole Plant
  misc_feature: MA Experiment ID: 20000286 Result: Up-regulated in Transcription
  misc_feature: MA Experiment 20000286 PARAMETER Experiment Name: At_Open_Flower_P Parameter: Age (day) Value: 21
  misc_feature: MA Experiment 20000286 PARAMETER Experiment Name: At_Open_Flower_P Parameter: Plant Line Value: WS
  misc_feature: MA Experiment 20000286 PARAMETER Experiment Name: At_Open_Flower_P Parameter: Tissue Value: Half Open vs. Whole Plant
  misc_feature: MA Experiment ID: 20000439 Result: Up-regulated in Transcription
  misc_feature: MA Experiment 20000439 PARAMETER Experiment Name: At_Roots__P Parameter: Age (day) Value: 14 vs. 21
  misc_feature: MA Experiment 20000439 PARAMETER Experiment Name: At_Roots__P Parameter: Organism Value: A. thaliana
  misc_feature: MA Experiment 20000439 PARAMETER Experiment Name: At_Roots__P Parameter: Tissue Value: Roots vs. Whole Plant
  misc_feature: MA Experiment ID: 20000451 Result: Up-regulated in Transcription
  misc_feature: MA Experiment 20000451 PARAMETER Experiment Name: At_CS6879_Shoots-Roots_P Parameter: Age (day) Value: 14
  misc_feature: MA Experiment 20000451 PARAMETER Experiment Name: At_CS6879_Shoots-Roots_P Parameter: Organism Value: A. thaliana
  misc_feature: MA Experiment 20000451 PARAMETER Experiment Name: At_CS6879_Shoots-Roots_P Parameter: Plant Line Value: CS6879 vs. WS
  misc_feature: MA Experiment 20000451 PARAMETER Experiment Name: At_CS6879_Shoots-Roots_P Parameter: Tissue Value: Roots
  misc_feature: MA Experiment ID: 20001556 Result: Up-regulated in Transcription
  misc_feature: MA Experiment 20001556 PARAMETER Experiment Name: At_Drought_Soil_Dry_P Parameter: Age (day) Value: 26
  misc_feature: MA Experiment 20001556 PARAMETER Experiment Name: At_Drought_Soil_Dry_P Parameter: Organism Value: A. thaliana
  misc_feature: MA Experiment 20001556 PARAMETER Experiment Name: At_Drought_Soil_Dry_P Parameter: Plant Line Value: WS
  misc_feature: MA Experiment 20001556 PARAMETER Experiment Name: At_Drought_Soil_Dry_P Parameter: Post Timepoint (hr) Value: None
  misc_feature: MA Experiment 20001556 PARAMETER Experiment Name: At_Drought_Soil_Dry_P Parameter: Post-Treatment Value: None
  misc_feature: MA Experiment 20001556 PARAMETER Experiment Name: At_Drought_Soil_Dry_P Parameter: Timepoint (day) Value: 12
  misc_feature: MA Experiment 20001556 PARAMETER Experiment Name: At_Drought_Soil_Dry_P Parameter: Treatment Value: Drought vs. No Drought
  misc_feature: MA Experiment ID: 20001904 Result: Up-regulated in Transcription
  misc_feature: MA Experiment 20001904 PARAMETER Experiment Name: At_Drought_Reproduction_P Parameter: Age (day) Value: 37
  misc_feature: MA Experiment 20001904 PARAMETER Experiment Name: At_Drought_Reproduction_P Parameter: Organism Value: A. thaliana
  misc_feature: MA Experiment 20001904 PARAMETER Experiment Name: At_Drought_Reproduction_P Parameter: Plant Line Value: WS
  misc_feature: MA Experiment 20001904 PARAMETER Experiment Name: At_Drought_Reproduction_P Parameter: Timepoint (day) Value: 7
  misc_feature: MA Experiment 20001904 PARAMETER Experiment Name: At_Drought_Reproduction_P Parameter: Tissue Value: Rosettes
  misc_feature: MA Experiment 20001904 PARAMETER Experiment Name: At_Drought_Reproduction_P Parameter: Treatment Value: Drought vs. No Drought
  misc_feature: MA Experiment ID: 20001905 Result: Up-regulated in Transcription
  misc_feature: MA Experiment 20001905 PARAMETER Experiment Name: At_Drought_Reproduction_P Parameter: Age (day) Value: 40
  misc_feature: MA Experiment 20001905 PARAMETER Experiment Name: At_Drought_Reproduction_P Parameter: Organism Value: A. thaliana
  misc_feature: MA Experiment 20001905 PARAMETER Experiment Name: At_Drought_Reproduction_P Parameter: Plant Line Value: WS
  misc_feature: MA Experiment 20001905 PARAMETER Experiment Name: At_Drought_Reproduction_P Parameter: Timepoint (day) Value: 10
  misc_feature: MA Experiment 20001905 PARAMETER Experiment Name: At_Drought_Reproduction_P Parameter: Tissue Value: Rosettes
  misc_feature: MA Experiment 20001905 PARAMETER Experiment Name: At_Drought_Reproduction_P Parameter: Treatment Value: Drought vs. No Drought
  misc_feature: MA Experiment ID: 20001906 Result: Up-regulated in Transcription
  misc_feature: MA Experiment 20001906 PARAMETER Experiment Name: At_Drought_Reproduction_P Parameter: Age (day) Value: 35
  misc_feature: MA Experiment 20001906 PARAMETER Experiment Name: At_Drought_Reproduction_P Parameter: Organism Value: A. thaliana
  misc_feature: MA Experiment 20001906 PARAMETER Experiment Name: At_Drought_Reproduction_P Parameter: Plant Line Value: WS
  misc_feature: MA Experiment 20001906 PARAMETER Experiment Name: At_Drought_Reproduction_P Parameter: Timepoint (day) Value: 5
  misc_feature: MA Experiment 20001906 PARAMETER Experiment Name: At_Drought_Reproduction_P Parameter: Tissue Value: Siliques
  misc_feature: MA Experiment 20001906 PARAMETER Experiment Name: At_Drought_Reproduction_P Parameter: Treatment Value: Drought vs. No Drought
ctaacttctctgttcatctttttctctctttatttataaatttatctgcatagtactctctgaatctatatcttcaaaaaaaaaaaacgtccaagatcaaatcaagaaacccattaaaaaaaaaaatcaggttttggtttcagttttaagggtttaaggtttcttggggaagaaacgatggagactttttgtgggtttcaaaaggaggaagagcagatggatttacctcctgggttcaggtttcatccaacagatgaagaactcataactcactatctccataagaaggttcttgacaccagcttctcagctaaagctatcggtgaagttgatttaaacaaatcagagccatgggagttaccatggatggcaaaaatgggtgagaaagaatggtattttttctgtgtgagagacagaaagtatcccaccggtttaagaactaaccgagcaactgaagccggttattggaaggcgaccgggaaggataaagagatataccgaggcaaatcacttgttgggatgaagaagacacttgttttctatagaggaagagctcctaaaggtcagaaaaccaactgggtgatgcatgagtacaggcttgaaggaaaattctctgcccataacttgccgaaaaccgcaaagaatgaatgggtgatatgcagggtgttccaaaagagtgctggagggaagaagatcccgatttcgagtctaatccgaatcggttcactcggaaccgactttaacccttcgcttttgccctctttaaccgattcttcgccttacaacgataaaaccaaaacagaaccggtctacgtgccctgcttctccaaccaaacggatcaaaaccaaggaaccacactcaattgcttcagcagccctgttcttaactcgatccaagccgacatttttcacaggattccactctatcaaactcagtccctccaggtttctatgaatctacagagcccggttctcacgcaagaacactcagttctacatgctatgatcgagaacaacagaagacaaagtctcaaaacgatgagtgtctcacaagaaaccggagtttcaactgacatgaacactgatatctcatcggattttgaatttggtaagagacggtttgattctcaagaagatccgtcttcctctactggaccggttgatcttgaacctttctggaattactgaagatgattcaagattctcatgtccattaatttactgtggtgtgttaaagtttgtataggctattgtcatatactctcatatcaacttccactatatattataacaatttaaagaaacttaaaaatatgatttgatatatgactaaagtattataatacaattttgtacc

SEQ ID NO: 74360 - protein, 336 aa, Arabidopsis thaliana; identical to SEQ ID NO: 29064
  peptide (1)..(336): Ceres Seq. ID no. 5666552
  misc_feature (16)..(142): Pfam Name: No apical meristem (NAM) protein Pfam Description: No apical meristem (NAM) protein
  misc_feature (1)..(336): Homolog of NCBI NO: 15240252 NR Description: NAM, no apical meristem, - like protein; protein At5g61430.1, supported by cDNA: 12970., supported by cDNA:
  misc_feature (14)..(336): Homolog of NCBI NO: 21537315 NR Description: NAM, no apical meristem,-like protein
  misc_feature (1)..(336): Homolog of NCBI NO: 30682048 NR Description: NAM (no apical meristem)-related protein
  misc_feature (14)..(336): Homolog of NCBI NO: 30682054 NR Description: NAM (no apical meristem)-related protein

SEQ ID NO: 74361 - protein, 323 aa, Arabidopsis thaliana; identical to SEQ ID NO: 29065
  peptide (1)..(323): Ceres Seq. ID no. 5666553
  misc_feature (3)..(129): Pfam Name: No apical meristem (NAM) protein Pfam Description: No apical meristem (NAM) protein
  misc_feature (1)..(323): Homolog of NCBI NO: 15240252 NR Description: NAM, no apical meristem, - like protein; protein At5g61430.1, supported by cDNA: 12970., supported by cDNA:
  misc_feature (1)..(323): Homolog of NCBI NO: 21537315 NR Description: NAM, no apical meristem,-like protein
  misc_feature (1)..(323): Homolog of NCBI NO: 30682048 NR Description: NAM (no apical meristem)-related protein
  misc_feature (1)..(323): Homolog of NCBI NO: 30682054 NR Description: NAM (no apical meristem)-related protein

SEQ ID NO: 74362 - protein, 273 aa, Arabidopsis thaliana; identical to SEQ ID NO: 40495
  peptide (1)..(273): Ceres Seq. ID no. 5666554
  misc_feature (1)..(79): Pfam Name: No apical meristem (NAM) protein Pfam Description: No apical meristem (NAM) protein
  misc_feature (1)..(273): Homolog of NCBI NO: 15240252 NR Description: NAM, no apical meristem, - like protein; protein At5g61430.1, supported by cDNA: 12970., supported by cDNA:
  misc_feature (1)..(273): Homolog of NCBI NO: 21537315 NR Description: NAM, no apical meristem,-like protein
  misc_feature (1)..(273): Homolog of NCBI NO: 30682048 NR Description: NAM (no apical meristem)-related protein
  misc_feature (1)..(273): Homolog of NCBI NO: 30682054 NR Description: NAM (no apical meristem)-related protein

SEQ ID NO: 74363 - DNA, 1359 bp, Arabidopsis thaliana
  misc_feature (1)..(1359): Ceres Seq. ID no. 5666952
  misc_feature: MA Experiment ID: 108434 Result: Down-regulated in Transcription
  misc_feature: MA Experiment 108434 PARAMETER Experiment Name: At_Root_Tips_cDNA_P Parameter: Tissue Value: Root Tips
  misc_feature: MA Experiment ID: 108462 Result: Up-regulated in Transcription
  misc_feature: MA Experiment 108462 PARAMETER Experiment Name: At_Germinating_Seeds_cDNA_P Parameter: Age (day) Value: 2 vs. 0
  misc_feature: MA Experiment 108462 PARAMETER Experiment Name: At_Germinating_Seeds_cDNA_P Parameter: Tissue Value: Germinating Seeds
  misc_feature: MA Experiment ID: 108463 Result: Up-regulated in Transcription
  misc_feature: MA Experiment 108463 PARAMETER Experiment Name: At_Germinating_Seeds_cDNA_P Parameter: Age (day) Value: 3 vs. 0
  misc_feature: MA Experiment 108463 PARAMETER Experiment Name: At_Germinating_Seeds_cDNA_P Parameter: Tissue Value: Germinating Seeds
  misc_feature: MA Experiment ID: 108464 Result: Up-regulated in Transcription
  misc_feature: MA Experiment 108464 PARAMETER Experiment Name: At_Germinating_Seeds_cDNA_P Parameter: Age (day) Value: 4 vs. 0
  misc_feature: MA Experiment 108464 PARAMETER Experiment Name: At_Germinating_Seeds_cDNA_P Parameter: Tissue Value: Germinating Seeds
  misc_feature: MA Experiment ID: 108488 Result: Down-regulated in Transcription
  misc_feature: MA Experiment ID: 108573 Result: Up-regulated in Transcription
  misc_feature: MA Experiment 108573 PARAMETER Experiment Name: At_Drought_cDNA_P Parameter: Timepoint (hr) Value: 6
  misc_feature: MA Experiment 108573 PARAMETER Experiment Name: At_Drought_cDNA_P Parameter: Tissue Value: Aerial
  misc_feature: MA Experiment 108573 PARAMETER Experiment Name: At_Drought_cDNA_P Parameter: Treatment Value: Drought vs. No Drought
  misc_feature: MA Experiment ID: 108574 Result: Down-regulated in Transcription
  misc_feature: MA Experiment 108574 PARAMETER Experiment Name: At_Wounding__cDNA_P Parameter: Timepoint (hr) Value: 1
  misc_feature: MA Experiment 108574 PARAMETER Experiment Name: At_Wounding__cDNA_P Parameter: Tissue Value: Aerial
  misc_feature: MA Experiment 108574 PARAMETER Experiment Name: At_Wounding__cDNA_P Parameter: Treatment Value: Wounding vs. No Wounding
  misc_feature: MA Experiment ID: 108577 Result: Down-regulated in Transcription
  misc_feature: MA Experiment 108577 PARAMETER Experiment Name: At_42deg_Heat_cDNA_P Parameter: Temperature (deg C) Value: 42 vs. 22
  misc_feature: MA Experiment 108577 PARAMETER Experiment Name: At_42deg_Heat_cDNA_P Parameter: Timepoint (hr) Value: 6
  misc_feature: MA Experiment 108577 PARAMETER Experiment Name: At_42deg_Heat_cDNA_P Parameter: Tissue Value: Aerial
  misc_feature: MA Experiment ID: 108579 Result: Down-regulated in Transcription
  misc_feature: MA Experiment 108579 PARAMETER Experiment Name: At_4deg_Cold_cDNA_P Parameter: Temperature (deg C) Value: 4 vs. 22
  misc_feature: MA Experiment 108579 PARAMETER Experiment Name: At_4deg_Cold_cDNA_P Parameter: Timepoint (hr) Value: 6
  misc_feature: MA Experiment 108579 PARAMETER Experiment Name: At_4deg_Cold_cDNA_P Parameter: Tissue Value: Aerial
  misc_feature: MA Experiment ID: 108595 Result: Down-regulated in Transcription
  misc_feature: MA Experiment 108595 PARAMETER Experiment Name: At_Ler-pi_Ovule_cDNA_P Parameter: Plant Line Value: null
  misc_feature: MA Experiment ID: 20000030 Result: Up-regulated in Transcription
  misc_feature: MA Experiment 20000030 PARAMETER Experiment Name: At_CS6630_Roots_cDNA_P Parameter: Plant Line Value: CS6630 vs. WS
  misc_feature: MA Experiment 20000030 PARAMETER Experiment Name: At_CS6630_Roots_cDNA_P Parameter: Tissue Value: Roots
  misc_feature: MA Experiment ID: 20000068 Result: Up-regulated in Transcription
  misc_feature: MA Experiment ID: 20000069 Result: Up-regulated in Transcription
  misc_feature: MA Experiment 20000069 PARAMETER Experiment Name: At_100uM_ABA_Mutants_cDNA_P Parameter: Plant Line Value: CS23
  misc_feature: MA Experiment 20000069 PARAMETER Experiment Name: At_100uM_ABA_Mutants_cDNA_P Parameter: Timepoint (hr) Value: 6
  misc_feature: MA Experiment 20000069 PARAMETER Experiment Name: At_100uM_ABA_Mutants_cDNA_P Parameter: Tissue Value: Aerial
  misc_feature: MA Experiment 20000069 PARAMETER Experiment Name: At_100uM_ABA_Mutants_cDNA_P Parameter: Treatment Value: 100uM ABA vs. No Treatment
  misc_feature: MA Experiment ID: 20000070 Result: Up-regulated in Transcription
  misc_feature: MA Experiment 20000070 PARAMETER Experiment Name: At_100uM_ABA_Mutants_cDNA_P Parameter: Plant Line Value: CS24
  misc_feature: MA Experiment 20000070 PARAMETER Experiment Name: At_100uM_ABA_Mutants_cDNA_P Parameter: Timepoint (hr) Value: 6
  misc_feature: MA Experiment 20000070 PARAMETER Experiment Name: At_100uM_ABA_Mutants_cDNA_P Parameter: Tissue Value: Aerial
  misc_feature: MA Experiment 20000070 PARAMETER Experiment Name: At_100uM_ABA_Mutants_cDNA_P Parameter: Treatment Value: 100uM ABA vs. No Treatment
  misc_feature: MA Experiment ID: 20000071 Result: Up-regulated in Transcription
  misc_feature: MA Experiment 20000071 PARAMETER Experiment Name: At_100uM_ABA_Mutants_cDNA_P Parameter: Plant Line Value: CS8104
  misc_feature: MA Experiment 20000071 PARAMETER Experiment Name: At_100uM_ABA_Mutants_cDNA_P Parameter: Timepoint (hr) Value: 6
  misc_feature: MA Experiment 20000071 PARAMETER Experiment Name: At_100uM_ABA_Mutants_cDNA_P Parameter: Tissue Value: Aerial
  misc_feature: MA Experiment 20000071 PARAMETER Experiment Name: At_100uM_ABA_Mutants_cDNA_P Parameter: Treatment Value: 100uM ABA vs. No Treatment
  misc_feature: MA Experiment ID: 20000072 Result: Up-regulated in Transcription
  misc_feature: MA Experiment 20000072 PARAMETER Experiment Name: At_100uM_ABA_Mutants_cDNA_P Parameter: Plant Line Value: CS8105
  misc_feature: MA Experiment 20000072 PARAMETER Experiment Name: At_100uM_ABA_Mutants_cDNA_P Parameter: Timepoint (hr) Value: 6
  misc_feature: MA Experiment 20000072 PARAMETER Experiment Name: At_100uM_ABA_Mutants_cDNA_P Parameter: Tissue Value: Aerial
  misc_feature: MA Experiment 20000072 PARAMETER Experiment Name: At_100uM_ABA_Mutants_cDNA_P Parameter: Treatment Value: 100uM ABA vs. No Treatment
  misc_feature: MA Experiment ID: 20000086 Result: Up-regulated in Transcription
  misc_feature: MA Experiment 20000086 PARAMETER Experiment Name: At_100uM_ABA_Mutants_cDNA_P Parameter: Plant Line Value: CS22
  misc_feature: MA Experiment 20000086 PARAMETER Experiment Name: At_100uM_ABA_Mutants_cDNA_P Parameter: Timepoint (hr) Value: 6
  misc_feature: MA Experiment 20000086 PARAMETER Experiment Name: At_100uM_ABA_Mutants_cDNA_P Parameter: Tissue Value: Aerial
  misc_feature: MA Experiment 20000086 PARAMETER Experiment Name: At_100uM_ABA_Mutants_cDNA_P Parameter: Treatment Value: 100uM ABA vs. No Treatment
  misc_feature: MA Experiment ID: 20000088 Result: Up-regulated in Transcription
  misc_feature: MA Experiment 20000088 PARAMETER Experiment Name: At_100uM_ABA_Mutants_cDNA_P Parameter: Plant Line Value: Landsberg
  misc_feature: MA Experiment 20000088 PARAMETER Experiment Name: At_100uM_ABA_Mutants_cDNA_P Parameter: Timepoint (hr) Value: 6
  misc_feature: MA Experiment 20000088 PARAMETER Experiment Name: At_100uM_ABA_Mutants_cDNA_P Parameter: Tissue Value: Aerial
  misc_feature: MA Experiment 20000088 PARAMETER Experiment Name: At_100uM_ABA_Mutants_cDNA_P Parameter: Treatment Value: 100uM ABA vs. No Treatment
  misc_feature: MA Experiment ID: 20000089 Result: Up-regulated in Transcription
  misc_feature: MA Experiment ID: 20000090 Result: Up-regulated in Transcription
  misc_feature: MA Experiment ID: 20000111 Result: Down-regulated in Transcription
  misc_feature: MA Experiment 20000111 PARAMETER Experiment Name: At_42deg_Heat_cDNA_P Parameter: Temperature (deg C) Value: 42 vs. 22
  misc_feature: MA Experiment 20000111 PARAMETER Experiment Name: At_42deg_Heat_cDNA_P Parameter: Timepoint (hr) Value: 6
  misc_feature: MA Experiment 20000111 PARAMETER Experiment Name: At_42deg_Heat_cDNA_P Parameter: Tissue Value: Aerial
  misc_feature: MA Experiment ID: 20000113 Result: Down-regulated in Transcription
  misc_feature: MA Experiment 20000113 PARAMETER Experiment Name: At_42deg_Heat_cDNA_P Parameter: Temperature (deg C) Value: 42 vs. 22
  misc_feature: MA Experiment 20000113 PARAMETER Experiment Name: At_42deg_Heat_cDNA_P Parameter: Timepoint (hr) Value: 8
  misc_feature: MA Experiment 20000113 PARAMETER Experiment Name: At_42deg_Heat_cDNA_P Parameter: Tissue Value: Aerial
  misc_feature: MA Experiment ID: 20000117 Result: Up-regulated in Transcription
  misc_feature: MA Experiment 20000117 PARAMETER Experiment Name: At_100uM_ABA_Mutants_cDNA_P Parameter: Plant Line Value: Columbia
  misc_feature: MA Experiment 20000117 PARAMETER Experiment Name: At_100uM_ABA_Mutants_cDNA_P Parameter: Timepoint (hr) Value: 6
  misc_feature: MA Experiment 20000117 PARAMETER Experiment Name: At_100uM_ABA_Mutants_cDNA_P Parameter: Tissue Value: Aerial
  misc_feature: MA Experiment 20000117 PARAMETER Experiment Name: At_100uM_ABA_Mutants_cDNA_P Parameter: Treatment Value: 100uM ABA vs. No Treatment
  misc_feature: MA Experiment ID: 20000184 Result: Down-regulated in Transcription
  misc_feature: MA Experiment 20000184 PARAMETER Experiment Name: At_Shoots__P Parameter: Age (day) Value: 7
  misc_feature: MA Experiment 20000184 PARAMETER Experiment Name: At_Shoots__P Parameter: Tissue Value: Shoots vs. Whole Plant
  misc_feature: MA Experiment ID: 20000185 Result: Down-regulated in Transcription
  misc_feature: MA Experiment 20000185 PARAMETER Experiment Name: At_Roots__P Parameter: Age (day) Value: 7 vs. 21
  misc_feature: MA Experiment 20000185 PARAMETER Experiment Name: At_Roots__P Parameter: Organism Value: A. thaliana
  misc_feature: MA Experiment 20000185 PARAMETER Experiment Name: At_Roots__P Parameter: Tissue Value: Roots vs. Whole Plant
  misc_feature: MA Experiment ID: 20000235 Result: Down-regulated in Transcription
  misc_feature: MA Experiment 20000235 PARAMETER Experiment Name: At_Siliques_P Parameter: Age (day) Value: 21
  misc_feature: MA Experiment 20000235 PARAMETER Experiment Name: At_Siliques_P Parameter: Organism Value: A. thaliana
  misc_feature: MA Experiment 20000235 PARAMETER Experiment Name: At_Siliques_P Parameter: Plant Line Value: WS
  misc_feature: MA Experiment 20000235 PARAMETER Experiment Name: At_Siliques_P Parameter: Tissue Value: 5-10mm Siliques vs. Whole Plant
  misc_feature: MA Experiment ID: 20000264 Result: Down-regulated in Transcription
  misc_feature: MA Experiment 20000264 PARAMETER Experiment Name: At_Open_Flower_P Parameter: Age (day) Value: 21
  misc_feature: MA Experiment 20000264 PARAMETER Experiment Name: At_Open_Flower_P Parameter: Plant Line Value: WS
  misc_feature: MA Experiment 20000264 PARAMETER Experiment Name: At_Open_Flower_P Parameter: Tissue Value: Open Flower vs. Whole Plant
  misc_feature: MA Experiment ID: 20000265 Result: Down-regulated in Transcription
  misc_feature: MA Experiment 20000265 PARAMETER Experiment Name: At_Open_Flower_P Parameter: Age (day) Value: 21
  misc_feature: MA Experiment 20000265 PARAMETER Experiment Name: At_Open_Flower_P Parameter: Plant Line Value: WS
  misc_feature: MA Experiment 20000265 PARAMETER Experiment Name: At_Open_Flower_P Parameter: Tissue Value: Closed Flower vs. Whole Plant
  misc_feature: MA Experiment ID: 20000286 Result: Down-regulated in Transcription
  misc_feature: MA Experiment 20000286 PARAMETER Experiment Name: At_Open_Flower_P Parameter: Age (day) Value: 21
  misc_feature: MA Experiment 20000286 PARAMETER Experiment Name: At_Open_Flower_P Parameter: Plant Line Value: WS
  misc_feature: MA Experiment 20000286 PARAMETER Experiment Name: At_Open_Flower_P Parameter: Tissue Value: Half Open vs. Whole Plant
  misc_feature: MA Experiment ID: 20000439 Result: Down-regulated in Transcription
  misc_feature: MA Experiment 20000439 PARAMETER Experiment Name: At_Roots__P Parameter: Age (day) Value: 14 vs. 21
  misc_feature: MA Experiment 20000439 PARAMETER Experiment Name: At_Roots__P Parameter: Organism Value: A. thaliana
  misc_feature: MA Experiment 20000439 PARAMETER Experiment Name: At_Roots__P Parameter: Tissue Value: Roots vs. Whole Plant
  misc_feature: MA Experiment ID: 20000573 Result: Down-regulated in Transcription
  misc_feature: MA Experiment 20000573 PARAMETER Experiment Name: At_100uM_ABA_Mutants__P Parameter: Organism Value: A. thaliana
  misc_feature: MA Experiment 20000573 PARAMETER Experiment Name: At_100uM_ABA_Mutants__P Parameter: Plant Line Value: CS22 vs. Ler wt
  misc_feature: MA Experiment 20000573 PARAMETER Experiment Name: At_100uM_ABA_Mutants__P Parameter: Timepoint (hr) Value: N/A
  misc_feature: MA Experiment 20000573 PARAMETER Experiment Name: At_100uM_ABA_Mutants__P Parameter: Tissue Value: Whole Plant
  misc_feature: MA Experiment 20000573 PARAMETER Experiment Name: At_100uM_ABA_Mutants__P Parameter: Treatment Value: None
  misc_feature: MA Experiment ID: 20000574 Result: Down-regulated in Transcription
  misc_feature: MA Experiment 20000574 PARAMETER Experiment Name: At_100uM_ABA_Mutants__P Parameter: Organism Value: A. thaliana
  misc_feature: MA Experiment 20000574 PARAMETER Experiment Name: At_100uM_ABA_Mutants__P Parameter: Plant Line Value: CS23 vs. Ler wt
  misc_feature: MA Experiment 20000574 PARAMETER Experiment Name: At_100uM_ABA_Mutants__P Parameter: Timepoint (hr) Value: N/A
  misc_feature: MA Experiment 20000574 PARAMETER Experiment Name: At_100uM_ABA_Mutants__P Parameter: Tissue Value: Whole Plant
  misc_feature: MA Experiment 20000574 PARAMETER Experiment Name: At_100uM_ABA_Mutants__P Parameter: Treatment Value: None
  misc_feature: MA Experiment ID: 20001247 Result: Down-regulated in Transcription
  misc_feature: MA Experiment 20001247 PARAMETER Experiment Name: At_Far-red-induction_P Parameter: Age (day) Value: 7
  misc_feature: MA Experiment 20001247 PARAMETER Experiment Name: At_Far-red-induction_P Parameter: Light Value: Far-red vs. White
  misc_feature: MA Experiment 20001247 PARAMETER Experiment Name: At_Far-red-induction_P Parameter: Organism Value: A. thaliana
  misc_feature: MA Experiment 20001247 PARAMETER Experiment Name: At_Far-red-induction_P Parameter: Plant Line Value: Columbia
  misc_feature: MA Experiment 20001247 PARAMETER Experiment Name: At_Far-red-induction_P Parameter: Timepoint (hr) Value: 1
  misc_feature: MA Experiment 20001247 PARAMETER Experiment Name: At_Far-red-induction_P Parameter: Tissue Value: Whole Plant
  misc_feature: MA Experiment ID: 20001557 Result: Down-regulated in Transcription
  misc_feature: MA Experiment 20001557 PARAMETER Experiment Name: At_Drought_Soil_Dry_P Parameter: Age (day) Value: 27
  misc_feature: MA Experiment 20001557 PARAMETER Experiment Name: At_Drought_Soil_Dry_P Parameter: Organism Value: A. thaliana
  misc_feature: MA Experiment 20001557 PARAMETER Experiment Name: At_Drought_Soil_Dry_P Parameter: Plant Line Value: WS
  misc_feature: MA Experiment 20001557 PARAMETER Experiment Name: At_Drought_Soil_Dry_P Parameter: Post Timepoint (hr) Value: 3
  misc_feature: MA Experiment 20001557 PARAMETER Experiment Name: At_Drought_Soil_Dry_P Parameter: Post-Treatment Value: Re-Water vs. No Drought
  misc_feature: MA Experiment 20001557 PARAMETER Experiment Name: At_Drought_Soil_Dry_P Parameter: Timepoint (day) Value: 13
  misc_feature: MA Experiment 20001557 PARAMETER Experiment Name: At_Drought_Soil_Dry_P Parameter: Treatment Value: Drought vs. No Drought
  misc_feature: MA Experiment ID: 20001558 Result: Down-regulated in Transcription
  misc_feature: MA Experiment 20001558 PARAMETER Experiment Name: At_Drought_Soil_Dry_P Parameter: Age (day) Value: 27
  misc_feature: MA Experiment 20001558 PARAMETER Experiment Name: At_Drought_Soil_Dry_P Parameter: Organism Value: A. thaliana
  misc_feature: MA Experiment 20001558 PARAMETER Experiment Name: At_Drought_Soil_Dry_P Parameter: Plant Line Value: WS
  misc_feature: MA Experiment 20001558 PARAMETER Experiment Name: At_Drought_Soil_Dry_P Parameter: Post Timepoint (hr) Value: 6
  misc_feature: MA Experiment 20001558 PARAMETER Experiment Name: At_Drought_Soil_Dry_P Parameter: Post-Treatment Value: Re-Water vs. No Drought
  misc_feature: MA Experiment 20001558 PARAMETER Experiment Name: At_Drought_Soil_Dry_P Parameter: Timepoint (day) Value: 13
  misc_feature: MA Experiment 20001558 PARAMETER Experiment Name: At_Drought_Soil_Dry_P Parameter: Treatment Value: Drought vs. No Drought
  misc_feature: MA Experiment ID: 20001560 Result: Down-regulated in Transcription
  misc_feature: MA Experiment 20001560 PARAMETER Experiment Name: At_Drought_Soil_Dry_P Parameter: Age (day) Value: 28
  misc_feature: MA Experiment 20001560 PARAMETER Experiment Name: At_Drought_Soil_Dry_P Parameter: Organism Value: A. thaliana
  misc_feature: MA Experiment 20001560 PARAMETER Experiment Name: At_Drought_Soil_Dry_P Parameter: Plant Line Value: WS
  misc_feature: MA Experiment 20001560 PARAMETER Experiment Name: At_Drought_Soil_Dry_P Parameter: Post Timepoint (hr) Value: None
  misc_feature: MA Experiment 20001560 PARAMETER Experiment Name: At_Drought_Soil_Dry_P Parameter: Post-Treatment Value: None
  misc_feature: MA Experiment 20001560 PARAMETER Experiment Name: At_Drought_Soil_Dry_P Parameter: Timepoint (day) Value: 14
  misc_feature: MA Experiment 20001560 PARAMETER Experiment Name: At_Drought_Soil_Dry_P Parameter: Treatment Value: Drought vs. No Drought
acgcttctgtctttacttcctctctcaacgtacgtagacagaaaaaaacaaaacatcatgacagaaaaatctgcagaactcgttcgtttgaacgaactcaaggcttttgtatcgacaaaagcaggtgtgaaaggacttgtcgataccaaaataaccgaagttcctcgaatcttccatatcccttcttcttcaactttatctaacaacaaaccttctgatatctttggcttaaacctcactgtcccaatcattgacctcggagatggtaacacatctgctgcaagaaacgtcctcgtttccaagattaaagaagcagctgagaattggggatttttccaagtaatcaatcatggtattcctttaactgttcttaaagatatcaaacaaggtgttcgaagatttcatgaggaagatccagaggtcaagaaacagtattttgctacagatttcaatacaagatttgcttacaacaccaacttcgatattcattattcttctcctatgaattggaaagactctttcacttgctacacttgtcctcaagatcctctaaagccagaggaaatcccactagcttgcagggatgttgtgattgaatactcgaagcatgtaatggaattaggaggtttactcttccaacttctctcagaagctttaggtttagactctgagattcttaagaacatggattgtctcaagggtttgcttatgctctgccattattatccaccttgtccacaacctgacctaactttgggcataagtaaacacaccgacaattccttcataacaattcttcttcaagatcaaatcggtggtcttcaagttcttcatcaagattcttgggttgatgtaactcctgttcctggagctcttgtcatcagtatcggtgatttcatgcaggcaagctcgattgatgcttccttttaactcaaaacagagtctttctttatcaatacacttgagtcattttgttttgcagctgatcacaaacgataagttcttaagtatggagcatagggtacgggcaaacagagatggaccgcggatttcagttgcttgcttcgttagctcgggagtgtttccaaattccactgtttatggaccgataaaagagcttctttctgatgaaaaccctgcaaagtacagagacatcactataccagaatacactgtaggatacctagcaagcatcttcgatggaaaatcgcatttgtctaagttccggatatgaagaaattacttgtatggcttagttaaaaacagatatgtgtgttttgctgctctcttctcgctcgagaggacatcaactattttgttaataagaaagaattttttacagtgaagacattgaattac

SEQ ID NO: 74364 - protein, 309 aa, Arabidopsis thaliana
  peptide (1)..(309): Ceres Seq. ID no. 5666953
  misc_feature (234)..(306): Pfam Name: 2OG-Fe(II) oxygenase superfamily Pfam Description: 2OG-Fe(II) oxygenase superfamily
  misc_feature (20)..(306): Homolog of NCBI NO: 15239868 NR Description: 1-aminocyclopropane-1-carboxylate oxidase; id: At5g43440.1, supported by cDNA: gi_15983808 [Arabidopsis
  misc_feature (20)..(306): Homolog of NCBI NO: 15239870 NR Description: 1-aminocyclopropane-1-carboxylate oxidase; id: At5g43450.1, supported by cDNA: gi_14596164 [Arabidopsis
  misc_feature (20)..(306): Homolog of NCBI NO: 14596165 NR Description: 1-aminocyclopropane-1-carboxylate oxidase
  misc_feature (20)..(306): Homolog of NCBI NO: 15238458 NR Description: 1-aminocyclopropane-1-carboxylate oxidase - like protein id: At5g59530.1 [Arabidopsis thaliana]
  misc_feature (19)..(306): Homolog of NCBI NO: 15238459 NR Description: 1-aminocyclopropane-1-carboxylate oxidase - like protein id: At5g59540.1, supported by cDNA: gi_15983482
  misc_feature (23)..(306): Homolog of NCBI NO: 15219715 NR Description: putative 1-aminocyclopropane-1-carboxylate protein id: At1g04350.1, supported by cDNA: gi_15292974, by cDNA: gi_21281120 [Arabidopsis thaliana]
  misc_feature (27)..(306): Homolog of NCBI NO: 15219718 NR Description: putative 1-aminocyclopropane-1-carboxylate protein id: At1g04380.1 [Arabidopsis thaliana]
  misc_feature (25)..(306): Homolog of NCBI NO: 30679748 NR Description: 2-oxoglutarate-dependent dioxygenase, putative thaliana] >gi|30102640|gb|AAP21238.1| At1g06620 [Arabidopsis
  misc_feature (29)..(306): Homolog of NCBI NO: 15221545 NR Description: oxidoreductase, putative; protein id: supported by cDNA: gi_13878118 [Arabidopsis thaliana]
  misc_feature (29)..(306): Homolog of NCBI NO: 13878119 NR Description: putative oxidoreductase [Arabidopsis thaliana]
TLLSLLPLSTYVDRKKQNIMTEKSAELVRLNELKAFVSTKAGVKGLVDTKITEVPRIFHIPSSSTLSNNKPSDIFGLNLTVPIIDLGDGNTSAARNVLVSKIKEAAENWGFFQVINHGIPLTVLKDIKQGVRRFHEEDPEVKKQYFATDFNTRFAYNTNFDIHYSSPMNWKDSFTCYTCPQDPLKPEEIPLACRDVVIEYSKHVMELGGLLFQLLSEALGLDSEILKNMDCLKGLLMLCHYYPPCPQPDLTLGISKHTDNSFITILLQDQIGGLQVLHQDSWVDVTPVPGALVISIGDFMQASSIDASF

SEQ ID NO: 74365 - protein, 290 aa, Arabidopsis thaliana
  peptide (1)..(290): Ceres Seq. ID no. 5666954
  misc_feature (215)..(287): Pfam Name: 2OG-Fe(II) oxygenase superfamily Pfam Description: 2OG-Fe(II) oxygenase superfamily
  misc_feature (1)..(287): Homolog of NCBI NO: 15239868 NR Description: 1-aminocyclopropane-1-carboxylate oxidase; id: At5g43440.1, supported by cDNA: gi_15983808 [Arabidopsis
  misc_feature (1)..(287): Homolog of NCBI NO: 15239870 NR Description: 1-aminocyclopropane-1-carboxylate oxidase; id: At5g43450.1, supported by cDNA: gi_14596164 [Arabidopsis
  misc_feature (1)..(287): Homolog of NCBI NO: 14596165 NR Description: 1-aminocyclopropane-1-carboxylate oxidase
  misc_feature (1)..(287): Homolog of NCBI NO: 15238458 NR Description: 1-aminocyclopropane-1-carboxylate oxidase - like protein id: At5g59530.1 [Arabidopsis thaliana]
  misc_feature (1)..(287): Homolog of NCBI NO: 15238459 NR Description: 1-aminocyclopropane-1-carboxylate oxidase - like protein id: At5g59540.1, supported by cDNA: gi_15983482
  misc_feature (4)..(287): Homolog of NCBI NO: 15219715 NR Description: putative 1-aminocyclopropane-1-carboxylate protein id: At1g04350.1, supported by cDNA: gi_15292974, by cDNA: gi_21281120 [Arabidopsis thaliana]
  misc_feature (8)..(287): Homolog of NCBI NO: 15219718 NR Description: putative 1-aminocyclopropane-1-carboxylate protein id: At1g04380.1 [Arabidopsis thaliana]
  misc_feature (6)..(287): Homolog of NCBI NO: 30679748 NR Description: 2-oxoglutarate-dependent dioxygenase, putative thaliana] >gi|30102640|gb|AAP21238.1| At1g06620 [Arabidopsis
  misc_feature (10)..(287): Homolog of NCBI NO: 15221545 NR Description: oxidoreductase, putative; protein id: supported by cDNA: gi_13878118 [Arabidopsis thaliana]
  misc_feature (10)..(287): Homolog of NCBI NO: 13878119 NR Description: putative oxidoreductase [Arabidopsis thaliana]
MTEKSAELVRLNELKAFVSTKAGVKGLVDTKITEVPRIFHIPSSSTLSNNKPSDIFGLNLTVPIIDLGDGNTSAARNVLVSKIKEAAENWGFFQVINHGIPLTVLKDIKQGVRRFHEEDPEVKKQYFATDFNTRFAYNTNFDIHYSSPMNWKDSFTCYTCPQDPLKPEEIPLACRDVVIEYSKHVMELGGLLFQLLSEALGLDSEILKNMDCLKGLLMLCHYYPPCPQPDLTLGISKHTDNSFITILLQDQIGGLQVLHQDSWVDVTPVPGALVISIGDFMQASSIDASF

SEQ ID NO: 74366 - DNA, 1047 bp, Arabidopsis thaliana
  misc_feature (1)..(1047): Ceres Seq. ID no. 5667048
  misc_feature: MA Experiment ID: 108433 Result: Up-regulated in Transcription
  misc_feature: MA Experiment 108433 PARAMETER Experiment Name: At_rhl_Mutant2_cDNA_P Parameter: Age (day) Value: 7
  misc_feature: MA Experiment 108433 PARAMETER Experiment Name: At_rhl_Mutant2_cDNA_P Parameter: Organism Value: A. thaliana
  misc_feature: MA Experiment 108433 PARAMETER Experiment Name: At_rhl_Mutant2_cDNA_P Parameter: Plant Line Value: rhl Mutant vs. wt landsburg
  misc_feature: MA Experiment 108433 PARAMETER Experiment Name: At_rhl_Mutant2_cDNA_P Parameter: Tissue Value: Roots
  misc_feature: MA Experiment ID: 108461 Result: Up-regulated in Transcription
  misc_feature: MA Experiment 108461 PARAMETER Experiment Name: At_Germinating_Seeds_cDNA_P Parameter: Age (day) Value: 1 vs. 0
  misc_feature: MA Experiment 108461 PARAMETER Experiment Name: At_Germinating_Seeds_cDNA_P Parameter: Tissue Value: Germinating Seeds
  misc_feature: MA Experiment ID: 108462 Result: Up-regulated in Transcription
  misc_feature: MA Experiment 108462 PARAMETER Experiment Name: At_Germinating_Seeds_cDNA_P Parameter: Age (day) Value: 2 vs. 0
  misc_feature: MA Experiment 108462 PARAMETER Experiment Name: At_Germinating_Seeds_cDNA_P Parameter: Tissue Value: Germinating Seeds
  misc_feature: MA Experiment ID: 108463 Result: Up-regulated in Transcription
  misc_feature: MA Experiment 108463 PARAMETER Experiment Name: At_Germinating_Seeds_cDNA_P Parameter: Age (day) Value: 3 vs. 0
  misc_feature: MA Experiment 108463 PARAMETER Experiment Name: At_Germinating_Seeds_cDNA_P Parameter: Tissue Value: Germinating Seeds
  misc_feature: MA Experiment ID: 108464 Result: Up-regulated in Transcription
  misc_feature: MA Experiment 108464 PARAMETER Experiment Name: At_Germinating_Seeds_cDNA_P Parameter: Age (day) Value: 4 vs. 0
  misc_feature: MA Experiment 108464 PARAMETER Experiment Name: At_Germinating_Seeds_cDNA_P Parameter: Tissue Value: Germinating Seeds
  misc_feature: MA Experiment ID: 108474 Result: Up-regulated in Transcription
  misc_feature: MA Experiment 108474 PARAMETER Experiment Name: At_Drought_Flowers_cDNA_P Parameter: Timepoint (hr) Value: null
  misc_feature: MA Experiment 108474 PARAMETER Experiment Name: At_Drought_Flowers_cDNA_P Parameter: Treatment Value: Drought vs. No Drought
  misc_feature: MA Experiment ID: 108501 Result: Up-regulated in Transcription
  misc_feature: MA Experiment 108501 PARAMETER Experiment Name: At_ap2_floral_buds_cDNA_P Parameter: Plant Line Value: ap2 (Ler.)
  misc_feature: MA Experiment 108501 PARAMETER Experiment Name: At_ap2_floral_buds_cDNA_P Parameter: Tissue Value: Closed Flower
  misc_feature: MA Experiment ID: 108573 Result: Up-regulated in Transcription
  misc_feature: MA Experiment 108573 PARAMETER Experiment Name: At_Drought_cDNA_P Parameter: Timepoint (hr) Value: 6
  misc_feature: MA Experiment 108573 PARAMETER Experiment Name: At_Drought_cDNA_P Parameter: Tissue Value: Aerial
  misc_feature: MA Experiment 108573 PARAMETER Experiment Name: At_Drought_cDNA_P Parameter: Treatment Value: Drought vs. No Drought
  misc_feature: MA Experiment ID: 108595 Result: Down-regulated in Transcription
  misc_feature: MA Experiment 108595 PARAMETER Experiment Name: At_Ler-pi_Ovule_cDNA_P Parameter: Plant Line Value: null
  misc_feature: MA Experiment ID: 20000068 Result: Up-regulated in Transcription
  misc_feature: MA Experiment ID: 20000070 Result: Down-regulated in Transcription
  misc_feature: MA Experiment 20000070 PARAMETER Experiment Name: At_100uM_ABA_Mutants_cDNA_P Parameter: Plant Line Value: CS24
  misc_feature: MA Experiment 20000070 PARAMETER Experiment Name: At_100uM_ABA_Mutants_cDNA_P Parameter: Timepoint (hr) Value: 6
  misc_feature: MA Experiment 20000070 PARAMETER Experiment Name: At_100uM_ABA_Mutants_cDNA_P Parameter: Tissue Value: Aerial
  misc_feature: MA Experiment 20000070 PARAMETER Experiment Name: At_100uM_ABA_Mutants_cDNA_P Parameter: Treatment Value: 100uM ABA vs. No Treatment
  misc_feature: MA Experiment ID: 20000088 Result: Down-regulated in Transcription
  misc_feature: MA Experiment 20000088 PARAMETER Experiment Name: At_100uM_ABA_Mutants_cDNA_P Parameter: Plant Line Value: Landsberg
  misc_feature: MA Experiment 20000088 PARAMETER Experiment Name: At_100uM_ABA_Mutants_cDNA_P Parameter: Timepoint (hr) Value: 6
  misc_feature: MA Experiment 20000088 PARAMETER Experiment Name: At_100uM_ABA_Mutants_cDNA_P Parameter: Tissue Value: Aerial
  misc_feature: MA Experiment 20000088 PARAMETER Experiment Name: At_100uM_ABA_Mutants_cDNA_P Parameter: Treatment Value: 100uM ABA vs. No Treatment
  misc_feature: MA Experiment ID: 20000113 Result: Up-regulated in Transcription
  misc_feature: MA Experiment 20000113 PARAMETER Experiment Name: At_42deg_Heat_cDNA_P Parameter: Temperature (deg C) Value: 42 vs. 22
  misc_feature: MA Experiment 20000113 PARAMETER Experiment Name: At_42deg_Heat_cDNA_P Parameter: Timepoint (hr) Value: 8
  misc_feature: MA Experiment 20000113 PARAMETER Experiment Name: At_42deg_Heat_cDNA_P Parameter: Tissue Value: Aerial
  misc_feature: MA Experiment ID: 20000117 Result: Down-regulated in Transcription
  misc_feature: MA Experiment 20000117 PARAMETER Experiment Name: At_100uM_ABA_Mutants_cDNA_P Parameter: Plant Line Value: Columbia
  misc_feature: MA Experiment 20000117 PARAMETER Experiment Name: At_100uM_ABA_Mutants_cDNA_P Parameter: Timepoint (hr) Value: 6
  misc_feature: MA Experiment 20000117 PARAMETER Experiment Name: At_100uM_ABA_Mutants_cDNA_P Parameter: Tissue Value: Aerial
  misc_feature: MA Experiment 20000117 PARAMETER Experiment Name: At_100uM_ABA_Mutants_cDNA_P Parameter: Treatment Value: 100uM ABA vs. No Treatment
  misc_feature: MA Experiment ID: 20000184 Result: Up-regulated in Transcription
  misc_feature: MA Experiment 20000184 PARAMETER Experiment Name: At_Shoots__P Parameter: Age (day) Value: 7
  misc_feature: MA Experiment 20000184 PARAMETER Experiment Name: At_Shoots__P Parameter: Tissue Value: Shoots vs. Whole Plant
  misc_feature: MA Experiment ID: 20000185 Result: Up-regulated in Transcription
  misc_feature: MA Experiment 20000185 PARAMETER Experiment Name: At_Roots__P Parameter: Age (day) Value: 7 vs. 21
  misc_feature: MA Experiment 20000185 PARAMETER Experiment Name: At_Roots__P Parameter: Organism Value: A. thaliana
  misc_feature: MA Experiment 20000185 PARAMETER Experiment Name: At_Roots__P Parameter: Tissue Value: Roots vs. Whole Plant
  misc_feature: MA Experiment ID: 20000224 Result: Down-regulated in Transcription
  misc_feature: MA Experiment ID: 20000234 Result: Up-regulated in Transcription
  misc_feature: MA Experiment 20000234 PARAMETER Experiment Name: At_Siliques_P Parameter: Age (day) Value: 21
  misc_feature: MA Experiment 20000234 PARAMETER Experiment Name: At_Siliques_P Parameter: Organism Value: A. thaliana
  misc_feature: MA Experiment 20000234 PARAMETER Experiment Name: At_Siliques_P Parameter: Plant Line Value: WS
  misc_feature: MA Experiment 20000234 PARAMETER Experiment Name: At_Siliques_P Parameter: Tissue Value: Less Than 5mm Siliques vs. Whole Plant
  misc_feature: MA Experiment ID: 20000235 Result: Up-regulated in Transcription
  misc_feature: MA Experiment 20000235 PARAMETER Experiment Name: At_Siliques_P Parameter: Age (day) Value: 21
  misc_feature: MA Experiment 20000235 PARAMETER Experiment Name: At_Siliques_P Parameter: Organism Value: A. thaliana
  misc_feature: MA Experiment 20000235 PARAMETER Experiment Name: At_Siliques_P Parameter: Plant Line Value: WS
  misc_feature: MA Experiment 20000235 PARAMETER Experiment Name: At_Siliques_P Parameter: Tissue Value: 5-10mm Siliques vs. Whole Plant
  misc_feature: MA Experiment ID: 20000264 Result: Up-regulated in Transcription
  misc_feature: MA Experiment 20000264 PARAMETER Experiment Name: At_Open_Flower_P Parameter: Age (day) Value: 21
  misc_feature: MA Experiment 20000264 PARAMETER Experiment Name: At_Open_Flower_P Parameter: Plant Line Value: WS
  misc_feature: MA Experiment 20000264 PARAMETER Experiment Name: At_Open_Flower_P Parameter: Tissue Value: Open Flower vs. Whole Plant
  misc_feature: MA Experiment ID: 20000265 Result: Up-regulated in Transcription
  misc_feature: MA Experiment 20000265 PARAMETER Experiment Name: At_Open_Flower_P Parameter: Age (day) Value: 21
  misc_feature: MA Experiment 20000265 PARAMETER Experiment Name: At_Open_Flower_P Parameter: Plant Line Value: WS
  misc_feature: MA Experiment 20000265 PARAMETER Experiment Name: At_Open_Flower_P Parameter: Tissue Value: Closed Flower vs. Whole Plant
  misc_feature: MA Experiment ID: 20000286 Result: Up-regulated in Transcription
  misc_feature: MA Experiment 20000286 PARAMETER Experiment Name: At_Open_Flower_P Parameter: Age (day) Value: 21
  misc_feature: MA Experiment 20000286 PARAMETER Experiment Name: At_Open_Flower_P Parameter: Plant Line Value: WS
  misc_feature: MA Experiment 20000286 PARAMETER Experiment Name: At_Open_Flower_P Parameter: Tissue Value: Half Open vs. Whole Plant
  misc_feature: MA Experiment ID: 20000438 Result: Up-regulated in Transcription
  misc_feature: MA Experiment 20000438 PARAMETER Experiment Name: At_Shoots__P Parameter: Age (day) Value: 14
  misc_feature: MA Experiment 20000438 PARAMETER Experiment Name: At_Shoots__P Parameter: Tissue Value: Shoots vs. Whole Plant
  misc_feature: MA Experiment ID: 20000439 Result: Up-regulated in Transcription
  misc_feature: MA Experiment 20000439 PARAMETER Experiment Name: At_Roots__P Parameter: Age (day) Value: 14 vs. 21
  misc_feature: MA Experiment 20000439 PARAMETER Experiment Name: At_Roots__P Parameter: Organism Value: A. thaliana
  misc_feature: MA Experiment 20000439 PARAMETER Experiment Name: At_Roots__P Parameter: Tissue Value: Roots vs. Whole Plant
  misc_feature: MA Experiment ID: 20000441 Result: Up-regulated in Transcription
  misc_feature: MA Experiment 20000441 PARAMETER Experiment Name: At_1uM_BR-BRZ__P Parameter: Tissue Value: Shoot Apices
  misc_feature: MA Experiment 20000441 PARAMETER Experiment Name: At_1uM_BR-BRZ__P Parameter: Treatment Value: 1uM BR vs. No Treatment
  misc_feature: MA Experiment ID: 20000443 Result: Up-regulated in Transcription
  misc_feature: MA Experiment 20000443 PARAMETER Experiment Name: At_1uM_BR-BRZ__P Parameter: Tissue Value: Shoot Apices
  misc_feature: MA Experiment 20000443 PARAMETER Experiment Name: At_1uM_BR-BRZ__P Parameter: Treatment Value: 1uM BRZ vs. No Treatment
  misc_feature: MA Experiment ID: 20000460 Result: Down-regulated in Transcription
  misc_feature: MA Experiment 20000460 PARAMETER Experiment Name: At_10percent_PEG_P Parameter: Age (day) Value: 12
  misc_feature: MA Experiment 20000460 PARAMETER Experiment Name: At_10percent_PEG_P Parameter: Organism Value: A. thaliana
  misc_feature: MA Experiment 20000460 PARAMETER Experiment Name: At_10percent_PEG_P Parameter: Plant Line Value: WS
  misc_feature: MA Experiment 20000460 PARAMETER Experiment Name: At_10percent_PEG_P Parameter: Timepoint (day) Value: 12
  misc_feature: MA Experiment 20000460 PARAMETER Experiment Name: At_10percent_PEG_P Parameter: Tissue Value: Whole Plant
  misc_feature: MA Experiment 20000460 PARAMETER Experiment Name: At_10percent_PEG_P Parameter: Treatment Value: 10percent PEG vs. No Treatment
  misc_feature: MA Experiment ID: 20000527 Result: Down-regulated in Transcription
  misc_feature: MA Experiment 20000527 PARAMETER Experiment Name: At_10percent_PEG_P Parameter: Age (day) Value: 20
  misc_feature: MA Experiment 20000527 PARAMETER Experiment Name: At_10percent_PEG_P Parameter: Organism Value: A. thaliana
  misc_feature: MA Experiment 20000527 PARAMETER Experiment Name: At_10percent_PEG_P Parameter: Plant Line Value: WS
  misc_feature: MA Experiment 20000527 PARAMETER Experiment Name: At_10percent_PEG_P Parameter: Timepoint (day) Value: 20
  misc_feature: MA Experiment 20000527 PARAMETER Experiment Name: At_10percent_PEG_P Parameter: Tissue Value: Whole Plant
  misc_feature: MA Experiment 20000527 PARAMETER Experiment Name: At_10percent_PEG_P Parameter: Treatment Value: 10percent PEG vs. No Treatment
  misc_feature: MA Experiment ID: 20000573 Result: Down-regulated in Transcription
  misc_feature: MA Experiment 20000573 PARAMETER Experiment Name: At_100uM_ABA_Mutants__P Parameter: Organism Value: A. thaliana
  misc_feature: MA Experiment 20000573 PARAMETER Experiment Name: At_100uM_ABA_Mutants__P Parameter: Plant Line Value: CS22 vs. Ler wt
  misc_feature: MA Experiment 20000573 PARAMETER Experiment Name: At_100uM_ABA_Mutants__P Parameter: Timepoint (hr) Value: N/A
  misc_feature: MA Experiment 20000573 PARAMETER Experiment Name: At_100uM_ABA_Mutants__P Parameter: Tissue Value: Whole Plant
  misc_feature: MA Experiment 20000573 PARAMETER Experiment Name: At_100uM_ABA_Mutants__P Parameter: Treatment Value: None
  misc_feature: MA Experiment ID: 20000574 Result: Down-regulated in Transcription
  misc_feature: MA Experiment 20000574 PARAMETER Experiment Name: At_100uM_ABA_Mutants__P Parameter: Organism Value: A. thaliana
  misc_feature: MA Experiment 20000574 PARAMETER Experiment Name: At_100uM_ABA_Mutants__P Parameter: Plant Line Value: CS23 vs. Ler wt
  misc_feature: MA Experiment 20000574 PARAMETER Experiment Name: At_100uM_ABA_Mutants__P Parameter: Timepoint (hr) Value: N/A
  misc_feature: MA Experiment 20000574 PARAMETER Experiment Name: At_100uM_ABA_Mutants__P Parameter: Tissue Value: Whole Plant
  misc_feature: MA Experiment 20000574 PARAMETER Experiment Name: At_100uM_ABA_Mutants__P Parameter: Treatment Value: None
  misc_feature: MA Experiment ID: 20000576 Result: Down-regulated in Transcription
  misc_feature: MA Experiment 20000576 PARAMETER Experiment Name: At_100uM_ABA_Mutants__P Parameter: Organism Value: A. thaliana
  misc_feature: MA Experiment 20000576 PARAMETER Experiment Name: At_100uM_ABA_Mutants__P Parameter: Plant Line Value: CS23
  misc_feature: MA Experiment 20000576 PARAMETER Experiment Name: At_100uM_ABA_Mutants__P Parameter: Timepoint (hr) Value: 6
  misc_feature: MA Experiment 20000576 PARAMETER Experiment Name: At_100uM_ABA_Mutants__P Parameter: Tissue Value: Whole Plant
  misc_feature: MA Experiment 20000576 PARAMETER Experiment Name: At_100uM_ABA_Mutants__P Parameter: Treatment Value: 1uM ABA vs. No Treatment
  misc_feature: MA Experiment ID: 20000794 Result: Up-regulated in Transcription
  misc_feature: MA Experiment 20000794 PARAMETER Experiment Name: At_Petals_P Parameter: Age (day) Value: 23-25 days
  misc_feature: MA Experiment 20000794 PARAMETER Experiment Name: At_Petals_P Parameter: Plant Line Value: WS
  misc_feature: MA Experiment 20000794 PARAMETER Experiment Name: At_Petals_P Parameter: Tissue Value: Petals vs. Whole plant
  misc_feature: MA Experiment ID: 20001247 Result: Up-regulated in Transcription
  misc_feature: MA Experiment 20001247 PARAMETER Experiment Name: At_Far-red-induction_P Parameter: Age (day) Value: 7
  misc_feature: MA Experiment 20001247 PARAMETER Experiment Name: At_Far-red-induction_P Parameter: Light Value: Far-red vs. White
  misc_feature: MA Experiment 20001247 PARAMETER Experiment Name: At_Far-red-induction_P Parameter: Organism Value: A. thaliana
  misc_feature: MA Experiment 20001247 PARAMETER Experiment Name: At_Far-red-induction_P Parameter: Plant Line Value: Columbia
  misc_feature: MA Experiment 20001247 PARAMETER Experiment Name: At_Far-red-induction_P Parameter: Timepoint (hr) Value: 1
  misc_feature: MA Experiment 20001247 PARAMETER Experiment Name: At_Far-red-induction_P Parameter: Tissue Value: Whole Plant
  misc_feature: MA Experiment ID: 20001557 Result: Down-regulated in Transcription
  misc_feature: MA Experiment 20001557 PARAMETER Experiment Name: At_Drought_Soil_Dry_P Parameter: Age (day) Value: 27
  misc_feature: MA Experiment 20001557 PARAMETER Experiment Name: At_Drought_Soil_Dry_P Parameter: Organism Value: A. thaliana
  misc_feature: MA Experiment 20001557 PARAMETER Experiment Name: At_Drought_Soil_Dry_P Parameter: Plant Line Value: WS
  misc_feature: MA Experiment 20001557 PARAMETER Experiment Name: At_Drought_Soil_Dry_P Parameter: Post Timepoint (hr) Value: 3
  misc_feature: MA Experiment 20001557 PARAMETER Experiment Name: At_Drought_Soil_Dry_P Parameter: Post-Treatment Value: Re-Water vs. No Drought
  misc_feature: MA Experiment 20001557 PARAMETER Experiment Name: At_Drought_Soil_Dry_P Parameter: Timepoint (day) Value: 13
  misc_feature: MA Experiment 20001557 PARAMETER Experiment Name: At_Drought_Soil_Dry_P Parameter: Treatment Value: Drought vs. No Drought
  misc_feature: MA Experiment ID: 20001560 Result: Down-regulated in Transcription
  misc_feature: MA Experiment 20001560 PARAMETER Experiment Name: At_Drought_Soil_Dry_P Parameter: Age (day) Value: 28
  misc_feature: MA Experiment 20001560 PARAMETER Experiment Name: At_Drought_Soil_Dry_P Parameter: Organism Value: A. thaliana
  misc_feature: MA Experiment 20001560 PARAMETER Experiment Name: At_Drought_Soil_Dry_P Parameter: Plant Line Value: WS
  misc_feature: MA Experiment 20001560 PARAMETER Experiment Name: At_Drought_Soil_Dry_P Parameter: Post Timepoint (hr) Value: None
  misc_feature: MA Experiment 20001560 PARAMETER Experiment Name: At_Drought_Soil_Dry_P Parameter: Post-Treatment Value: None
  misc_feature: MA Experiment 20001560 PARAMETER Experiment Name: At_Drought_Soil_Dry_P Parameter: Timepoint (day) Value: 14
  misc_feature: MA Experiment 20001560 PARAMETER Experiment Name: At_Drought_Soil_Dry_P Parameter: Treatment Value: Drought vs. No Drought
  misc_feature: MA Experiment ID: 20001906 Result: Down-regulated in Transcription
  misc_feature: MA Experiment 20001906 PARAMETER Experiment Name: At_Drought_Reproduction_P Parameter: Age (day) Value: 35
  misc_feature: MA Experiment 20001906 PARAMETER Experiment Name: At_Drought_Reproduction_P Parameter: Organism Value: A. thaliana
  misc_feature: MA Experiment 20001906 PARAMETER Experiment Name: At_Drought_Reproduction_P Parameter: Plant Line Value: WS
  misc_feature: MA Experiment 20001906 PARAMETER Experiment Name: At_Drought_Reproduction_P Parameter: Timepoint (day) Value: 5
  misc_feature: MA Experiment 20001906 PARAMETER Experiment Name: At_Drought_Reproduction_P Parameter: Tissue Value: Siliques
  misc_feature: MA Experiment 20001906 PARAMETER Experiment Name: At_Drought_Reproduction_P Parameter: Treatment Value: Drought vs. No Drought
  misc_feature: MA Experiment ID: 20001907 Result: Down-regulated in Transcription
  misc_feature: MA Experiment 20001907 PARAMETER Experiment Name: At_Drought_Reproduction_P Parameter: Age (day) Value: 37
  misc_feature: MA Experiment 20001907 PARAMETER Experiment Name: At_Drought_Reproduction_P Parameter: Organism Value: A. thaliana
  misc_feature: MA Experiment 20001907 PARAMETER Experiment Name: At_Drought_Reproduction_P Parameter: Plant Line Value: WS
  misc_feature: MA Experiment 20001907 PARAMETER Experiment Name: At_Drought_Reproduction_P Parameter: Timepoint (day) Value: 7
  misc_feature: MA Experiment 20001907 PARAMETER Experiment Name: At_Drought_Reproduction_P Parameter: Tissue Value: Siliques
  misc_feature: MA Experiment 20001907 PARAMETER Experiment Name: At_Drought_Reproduction_P Parameter: Treatment Value: Drought vs. No Drought
  misc_feature: MA Experiment ID: 20001908 Result: Down-regulated in Transcription
  misc_feature: MA Experiment 20001908 PARAMETER Experiment Name: At_Drought_Reproduction_P Parameter: Age (day) Value: 40
  misc_feature: MA Experiment 20001908 PARAMETER Experiment Name: At_Drought_Reproduction_P Parameter: Organism Value: A. thaliana
  misc_feature: MA Experiment 20001908 PARAMETER Experiment Name: At_Drought_Reproduction_P Parameter: Plant Line Value: WS
  misc_feature: MA Experiment 20001908 PARAMETER Experiment Name: At_Drought_Reproduction_P Parameter: Timepoint (day) Value: 10
  misc_feature: MA Experiment 20001908 PARAMETER Experiment Name: At_Drought_Reproduction_P Parameter: Tissue Value: Siliques
  misc_feature: MA Experiment 20001908 PARAMETER Experiment Name: At_Drought_Reproduction_P Parameter: Treatment Value: Drought vs. No Drought
  misc_feature: MA Experiment ID: 20001911 Result: Down-regulated in Transcription
  misc_feature: MA Experiment 20001911 PARAMETER Experiment Name: At_Drought_Reproduction_P Parameter: Age (day) Value: 40
  misc_feature: MA Experiment 20001911 PARAMETER Experiment Name: At_Drought_Reproduction_P Parameter: Organism Value: A. thaliana
  misc_feature: MA Experiment 20001911 PARAMETER Experiment Name: At_Drought_Reproduction_P Parameter: Plant Line Value: WS
  misc_feature: MA Experiment 20001911 PARAMETER Experiment Name: At_Drought_Reproduction_P Parameter: Timepoint (day) Value: 10
  misc_feature: MA Experiment 20001911 PARAMETER Experiment Name: At_Drought_Reproduction_P Parameter: Tissue Value: Flowers
  misc_feature: MA Experiment 20001911 PARAMETER Experiment Name: At_Drought_Reproduction_P Parameter: Treatment Value: Drought vs. No Drought
  misc_feature: Pfam Name: Sod_Fe_C Pfam Description: Iron/manganese superoxide dismutases, C-terminal domain
acatcttagttcatgttcgagtttctctggtctcttactctttcacctagaaatttgtttggtctcccaacaacataaacgcatgtatacattttcatgtgtctttgtaaggatattgattcatttttttgggcaaatagataatcaattcaatgctatgttttgtctgaaatgtgcagcttcaattacaaagaatggctgcttcaagtgctgtcaccgcaaactacgtcctcaagccacctccattcgcactggatgctttggagccgcatatgagcaaacaaactctggagtttcactggggaaaacatcacagagcttacgtggacaacctcaagaaacaggttcttggaaccgagcttgaaggcaagcccttagagcacattatccacagcacttacaacaatggtgatctcctccctgctttcaacaacgctgctcaggcgtggaaccacgagttcttctgggagtcaatgaaaccaggtggtggaggaaaaccatcaggagagcttcttgctttgcttgaaagagatttcacttcttatgagaagttctatgaagagttcaatgctgctgcagccactcagtttggagctggctgggcctggcttgcttattcaaatgaaaaactcaaagtagtgaaaactcccaatgctgtgaatccccttgtgctcggctctttcccattgcttaccattgatgtctgggagcatgcttactaccttgacttccagaaccgaagaccagattacataaagacattcatgaccaatcttgtgtcttgggaagctgtaagtgccagacttgaggccgccaaggctgcttctgcttaagcaaatttctgaacaatttgacttcagtgacagtgagttctgcatcaccgaagtctcttataaaatattggtcgctgtaataaggacacagctctcttgttgtgtatgtgtcacagagttcttcattttgcttgtgtaatgaacaattaaacatgctcttttctgagtgtgtgtgcgttttgtgtgtgtcaagtttttcatcgtctcctttatt

SEQ ID NO: 74367 - protein, 212 aa, Arabidopsis thaliana; identical to SEQ ID NO: 21185
  peptide (1)..(212): Ceres Seq. ID no. 5667049
  misc_feature: Pfam Name: Sod_Fe_C Pfam Description: Iron/manganese superoxide dismutases, C-terminal domain
  misc_feature (1)..(212): Homolog of NCBI NO: 166700 NR Description: Fe-superoxide dismutase
  misc_feature (1)..(212): Homolog of NCBI NO: 7433338 NR Description: superoxide dismutase (EC 1.15.1.1) (Fe) - thaliana (fragment) >gi|25285804|pir||G85289 hypothetical protein
  misc_feature (1)..(212): Homolog of NCBI NO: 99759 NR Description: superoxide dismutase (EC 1.15.1.1) (Fe) -
  misc_feature (1)..(212): Homolog of NCBI NO: 15234913 NR Description: iron superoxide dismutase (FSD1); protein id: supported by cDNA: 32935., supported by cDNA: gi_11908029, by cDNA: gi_12642849, supported by cDNA: gi_13265562, supported
  misc_feature (1)..(212): Homolog of NCBI NO: 3114705 NR Description: superoxide dismutase [Raphanus sativus]
  misc_feature (7)..(157): Homolog of NCBI NO: 6840824 NR Description: iron-superoxide dismutase precursor [Vigna
  misc_feature (140)..(212): Homolog of NCBI NO: 6840824 NR Description: iron-superoxide dismutase precursor [Vigna
  misc_feature (1)..(209): Homolog of NCBI NO: 33413303 NR Description: superoxide dismutase [Fe] [Lycopersicon
  misc_feature (1)..(209): Homolog of NCBI NO: 33439120 NR Description: iron superoxide dismutase [Lycopersicon
  misc_feature (1)..(158): Homolog of NCBI NO: 16974682 NR Description: Fe-superoxide dismutase precursor [Medicago

SEQ ID NO: 74368 - protein, 186 aa, Arabidopsis thaliana; identical to SEQ ID NO: 21186
  peptide (1)..(186): Ceres Seq. ID no. 5667050
  misc_feature: Pfam Name: Sod_Fe_C Pfam Description: Iron/manganese superoxide dismutases, C-terminal domain
  misc_feature (1)..(186): Homolog of NCBI NO: 166700 NR Description: Fe-superoxide dismutase
  misc_feature (1)..(186): Homolog of NCBI NO: 7433338 NR Description: superoxide dismutase (EC 1.15.1.1) (Fe) - thaliana (fragment) >gi|25285804|pir||G85289 hypothetical protein
  misc_feature (1)..(186): Homolog of NCBI NO: 99759 NR Description: superoxide dismutase (EC 1.15.1.1) (Fe) -
  misc_feature (1)..(186): Homolog of NCBI NO: 15234913 NR Description: iron superoxide dismutase (FSD1); protein id: supported by cDNA: 32935., supported by cDNA: gi_11908029, by cDNA: gi_12642849, supported by cDNA: gi_13265562, supported
  misc_feature (1)..(186): Homolog of NCBI NO: 3114705 NR Description: superoxide dismutase [Raphanus sativus]
  misc_feature (1)..(131): Homolog of NCBI NO: 6840824 NR Description: iron-superoxide dismutase precursor [Vigna
  misc_feature (114)..(186): Homolog of NCBI NO: 6840824 NR Description: iron-superoxide dismutase precursor [Vigna
  misc_feature (1)..(183): Homolog of NCBI NO: 33413303 NR Description: superoxide dismutase [Fe] [Lycopersicon
  misc_feature (1)..(183): Homolog of NCBI NO: 33439120 NR Description: iron superoxide dismutase [Lycopersicon
  misc_feature (1)..(132): Homolog of NCBI NO: 16974682 NR Description: Fe-superoxide dismutase precursor [Medicago

SEQ ID NO: 74369 - protein, 120 aa, Arabidopsis thaliana
  peptide (1)..(120): Ceres Seq. ID no. 5667051
  misc_feature: Pfam Name: Sod_Fe_C Pfam Description: Iron/manganese superoxide dismutases, C-terminal domain
HLSSCSSFSGLLLFHLEICLVSQQHKRMYTFSCVFVRILIHFFGQIDNQFNAMFCLKCAASITKNGCFKCCHRKLRPQATSIRTGCFGAAYEQTNSGVSLGKTSQSLRGQPQETGSWNRA

SEQ ID NO: 74370 - DNA, 1198 bp, Arabidopsis thaliana
  misc_feature (1)..(1198): Ceres Seq. ID no. 5667466
  misc_feature: MA Experiment ID: 20000184 Result: Up-regulated in Transcription
  misc_feature: MA Experiment 20000184 PARAMETER Experiment Name: At_Shoots__P Parameter: Age (day) Value: 7
  misc_feature: MA Experiment 20000184 PARAMETER Experiment Name: At_Shoots__P Parameter: Tissue Value: Shoots vs. Whole Plant
atcgactactctcactctctttctattctctcttccgccgctttttccatcgttcgaaagtaaagttgctcgctttactcgttcaagcattcaactttagaatccgatcgaatcctcctgtaacagcaatgatgaatcggatcctcttgtttatgatcctggcttttgtctcatctctttcagaagttgagccaatttcgttcaagatcacgaatcgttgccggaacacgatatggcccggtttgctctctggtgctaactcagcgccgctccccacaactggctttcgtctctctagaggaaaatctaaaaccgtcgcaataccagagtcgtggtccggtcgtctctgggcacgaaccttgtgttcacaagatcggagttccggttctttcgtctgcttaaccggagattgcggctcgggaaaagtcgaatgttcaggctccggagctaaacctccagcaactctcgccgagtttactctcaacggcacaggaggactagatttttacgacgttagcctcgtcgacggttacaatctcccgatgctaatcttgcccaagaaaatcgtcattggaggatgcggagccaccgggtgtctcgtggacttgaacggcgcgtgtcccagagacctaaagctggtgacgcgtgggaatgggaacggtgttgcttgccgtagcgcgtgcgaggcattcggagacccaaggtattgctgcagcgatgcgtacgccacgccggacacgtgtcagccttcggtttactcgctcttctttaagcatgcgtgcccacgagcatacagctacgcctatgacgataagacgagcacttacacttgcgccaccggagccgattacttcatcatcttctgtccgccaccgtatacaagcgagaagcttttaggatcgaggaaagatggtgcaacactgccactagtaaacaagagcatgattcatttgccgcatccgcacagcagctgagccatcttcttattatatgtcttaagtccttcttacatcaggtccgtcttacatgggtactcgcattgtctgttgaggttactatactgttttcatttcctctttcttgttgcaggcagatagaaaattcatgtgtagaaaaatgtcattacggttaataccaaggtagaattactgtaaatctttacttgttttacacttgttacttctttcgaaattgttcc

SEQ ID NO: 74371 - protein, 323 aa, Arabidopsis thaliana
  peptide (1)..(323): Ceres Seq. ID no. 5667467
  misc_feature (71)..(289): Pfam Name: Thaumatin family Pfam Description: Thaumatin family
  misc_feature (43)..(323): Homolog of NCBI NO: 30692042 NR Description: thaumatin family [Arabidopsis thaliana]
  misc_feature (59)..(293): Homolog of NCBI NO: 7442169 NR Description: pathogenesis-related protein F20M13.230 -
  misc_feature (52)..(323): Homolog of NCBI NO: 6273383 NR Description: SCUTL1 [Vitis vinifera]
  misc_feature (48)..(293): Homolog of NCBI NO: 4239765 NR Description: putative thaumatin-like protein precursor
  misc_feature (47)..(296): Homolog of NCBI NO: 15233437 NR Description: thaumatin-like protein; protein id: At4g36010.1, by cDNA: gi_13430505, supported by cDNA: gi_21280948 [Arabidopsis
  misc_feature (48)..(316): Homolog of NCBI NO: 37531042 NR Description: putative thaumatin-like protein [Oryza sativa
  misc_feature (49)..(291): Homolog of NCBI NO: 15227907 NR Description: putative thaumatin-like pathogenesis-related protein id: At2g17860.1 [Arabidopsis thaliana]
  misc_feature (48)..(296): Homolog of NCBI NO: 15222875 NR Description: thaumatin, putative; protein id: At1g75800.1, by cDNA: gi_18377859, supported by cDNA: gi_20334825 [Arabidopsis
  misc_feature (48)..(293): Homolog of NCBI NO: 4105697 NR Description: thaumatin-like protein [Arabidopsis thaliana]
  misc_feature (48)..(323): Homolog of NCBI NO: 25296204 NR Description: hypothetical protein T20H2.19 [imported] - thaliana >gi|8778995|gb|AAF79910.1|AC022472_19 Contains to SCUTL1 mRNA from Vitis vinifera gb|AF195653 and is a member of
RLLSLSFYSLFRRFFHRSKVKLLALLVQAFNFRIRSNPPVTAMMNRILLFMILAFVSSLSEVEPISFKITNRCRNTIWPGLLSGANSAPLPTTGFRLSRGKSKTVAIPESWSGRLWARTLCSQDRSSGSFVCLTGDCGSGKVECSGSGAKPPATLAEFTLNGTGGLDFYDVSLVDGYNLPMLILPKKIVIGGCGATGCLVDLNGACPRDLKLVTRGNGNGVACRSACEAFGDPRYCCSDAYATPDTCQPSVYSLFFKHACPRAYSYAYDDKTSTYTCATGADYFIIFCPPPYTSEKLLGSRKDGATLPLVNKSMIHLPHPHSS

SEQ ID NO: 74372 - protein, 281 aa, Arabidopsis thaliana
  peptide (1)..(281): Ceres Seq. ID no. 5667468
  misc_feature (29)..(247): Pfam Name: Thaumatin family Pfam Description: Thaumatin family
  misc_feature (1)..(281): Homolog of NCBI NO: 30692042 NR Description: thaumatin family [Arabidopsis thaliana]
  misc_feature (17)..(251): Homolog of NCBI NO: 7442169 NR Description: pathogenesis-related protein F20M13.230 -
  misc_feature (10)..(281): Homolog of NCBI NO: 6273383 NR Description: SCUTL1 [Vitis vinifera]
  misc_feature (6)..(251): Homolog of NCBI NO: 4239765 NR Description: putative thaumatin-like protein precursor
  misc_feature (5)..(254): Homolog of NCBI NO: 15233437 NR Description: thaumatin-like protein; protein id: At4g36010.1, by cDNA: gi_13430505, supported by cDNA: gi_21280948 [Arabidopsis
  misc_feature (6)..(274): Homolog of NCBI NO: 37531042 NR Description: putative thaumatin-like protein [Oryza sativa
  misc_feature (7)..(249): Homolog of NCBI NO: 15227907 NR Description: putative thaumatin-like pathogenesis-related protein id: At2g17860.1 [Arabidopsis thaliana]
  misc_feature (6)..(254): Homolog of NCBI NO: 15222875 NR Description: thaumatin, putative; protein id: At1g75800.1, by cDNA: gi_18377859, supported by cDNA: gi_20334825 [Arabidopsis
  misc_feature (6)..(251): Homolog of NCBI NO: 4105697 NR Description: thaumatin-like protein [Arabidopsis thaliana]
  misc_feature (6)..(281): Homolog of NCBI NO: 25296204 NR Description: hypothetical protein T20H2.19 [imported] - thaliana >gi|8778995|gb|AAF79910.1|AC022472_19 Contains to SCUTL1 mRNA from Vitis vinifera gb|AF195653 and is a member of
MMNRILLFMILAFVSSLSEVEPISFKITNRCRNTIWPGLLSGANSAPLPTTGFRLSRGKSKTVAIPESWSGRLWARTLCSQDRSSGSFVCLTGDCGSGKVECSGSGAKPPATLAEFTLNGTGGLDFYDVSLVDGYNLPMLILPKKIVIGGCGATGCLVDLNGACPRDLKLVTRGNGNGVACRSACEAFGDPRYCCSDAYATPDTCQPSVYSLFFKHACPRAYSYAYDDKTSTYTCATGADYFIIFCPPPYTSEKLLGSRKDGATLPLVNKSMIHLPHPHSS

SEQ ID NO: 74373 - protein, 280 aa, Arabidopsis thaliana
  peptide (1)..(280): Ceres Seq. ID no. 5667469
  misc_feature (28)..(246): Pfam Name: Thaumatin family Pfam Description: Thaumatin family
  misc_feature (1)..(280): Homolog of NCBI NO: 30692042 NR Description: thaumatin family [Arabidopsis thaliana]
  misc_feature (16)..(250): Homolog of NCBI NO: 7442169 NR Description: pathogenesis-related protein F20M13.230 -
  misc_feature (9)..(280): Homolog of NCBI NO: 6273383 NR Description: SCUTL1 [Vitis vinifera]
  misc_feature (5)..(250): Homolog of NCBI NO: 4239765 NR Description: putative thaumatin-like protein precursor
  misc_feature (4)..(253): Homolog of NCBI NO: 15233437 NR Description: thaumatin-like protein; protein id: At4g36010.1, by cDNA: gi_13430505, supported by cDNA: gi_21280948 [Arabidopsis
  misc_feature (5)..(273): Homolog of NCBI NO: 37531042 NR Description: putative thaumatin-like protein [Oryza sativa
  misc_feature (6)..(248): Homolog of NCBI NO: 15227907 NR Description: putative thaumatin-like pathogenesis-related protein id: At2g17860.1 [Arabidopsis thaliana]
  misc_feature (5)..(253): Homolog of NCBI NO: 15222875 NR Description: thaumatin, putative; protein id: At1g75800.1, by cDNA: gi_18377859, supported by cDNA: gi_20334825 [Arabidopsis
  misc_feature (5)..(250): Homolog of NCBI NO: 4105697 NR Description: thaumatin-like protein [Arabidopsis thaliana]
  misc_feature (5)..(280): Homolog of NCBI NO: 25296204 NR Description: hypothetical protein T20H2.19 [imported] - thaliana >gi|8778995|gb|AAF79910.1|AC022472_19 Contains to SCUTL1 mRNA from Vitis vinifera gb|AF195653 and is a member of
MNRILLFMILAFVSSLSEVEPISFKITNRCRNTIWPGLLSGANSAPLPTTGFRLSRGKSKTVAIPESWSGRLWARTLCSQDRSSGSFVCLTGDCGSGKVECSGSGAKPPATLAEFTLNGTGGLDFYDVSLVDGYNLPMLILPKKIVIGGCGATGCLVDLNGACPRDLKLVTRGNGNGVACRSACEAFGDPRYCCSDAYATPDTCQPSVYSLFFKHACPRAYSYAYDDKTSTYTCATGADYFIIFCPPPYTSEKLLGSRKDGATLPLVNKSMIHLPHPHSS

SEQ ID NO: 74374 - DNA, 1071 bp, Arabidopsis thaliana
  misc_feature (1)..(1071): Ceres Seq. ID no. 5668481
  misc_feature: MA Experiment ID: 108462 Result: Down-regulated in Transcription
  misc_feature: MA Experiment 108462 PARAMETER Experiment Name: At_Germinating_Seeds_cDNA_P Parameter: Age (day) Value: 2 vs. 0
  misc_feature: MA Experiment 108462 PARAMETER Experiment Name: At_Germinating_Seeds_cDNA_P Parameter: Tissue Value: Germinating Seeds
  misc_feature: MA Experiment ID: 108463 Result: Down-regulated in Transcription
  misc_feature: MA Experiment 108463 PARAMETER Experiment Name: At_Germinating_Seeds_cDNA_P Parameter: Age (day) Value: 3 vs. 0
  misc_feature: MA Experiment 108463 PARAMETER Experiment Name: At_Germinating_Seeds_cDNA_P Parameter: Tissue Value: Germinating Seeds
  misc_feature: MA Experiment ID: 108464 Result: Down-regulated in Transcription
  misc_feature: MA Experiment 108464 PARAMETER Experiment Name: At_Germinating_Seeds_cDNA_P Parameter: Age (day) Value: 4 vs. 0
  misc_feature: MA Experiment 108464 PARAMETER Experiment Name: At_Germinating_Seeds_cDNA_P Parameter: Tissue Value: Germinating Seeds
  misc_feature: MA Experiment ID: 108488 Result: Down-regulated in Transcription
  misc_feature: MA Experiment ID: 108501 Result: Up-regulated in Transcription
  misc_feature: MA Experiment 108501 PARAMETER Experiment Name: At_ap2_floral_buds_cDNA_P Parameter: Plant Line Value: ap2 (Ler.)
  misc_feature: MA Experiment 108501 PARAMETER Experiment Name: At_ap2_floral_buds_cDNA_P Parameter: Tissue Value: Closed Flower
  misc_feature: MA Experiment ID: 108561 Result: Down-regulated in Transcription
  misc_feature: MA Experiment 108561 PARAMETER Experiment Name: At_100uM_ABA_cDNA_P Parameter: Timepoint (hr) Value: 6
  misc_feature: MA Experiment 108561 PARAMETER Experiment Name: At_100uM_ABA_cDNA_P Parameter: Tissue Value: Aerial
  misc_feature: MA Experiment 108561 PARAMETER Experiment Name: At_100uM_ABA_cDNA_P Parameter: Treatment Value: 100uM ABA vs. No Treatment
  misc_feature: MA Experiment ID: 108569 Result: Down-regulated in Transcription
  misc_feature: MA Experiment 108569 PARAMETER Experiment Name: At_0.001%_MeJA__cDNA_P Parameter: Timepoint (hr) Value: 6
  misc_feature: MA Experiment 108569 PARAMETER Experiment Name: At_0.001%_MeJA__cDNA_P Parameter: Tissue Value: Aerial
  misc_feature: MA Experiment 108569 PARAMETER Experiment Name: At_0.001%_MeJA__cDNA_P Parameter: Treatment Value: 0.001% MeJA vs. No Treatment
  misc_feature: MA Experiment ID: 108574 Result: Up-regulated in Transcription
  misc_feature: MA Experiment 108574 PARAMETER Experiment Name: At_Wounding__cDNA_P Parameter: Timepoint (hr) Value: 1
  misc_feature: MA Experiment 108574 PARAMETER Experiment Name: At_Wounding__cDNA_P Parameter: Tissue Value: Aerial
  misc_feature: MA Experiment 108574 PARAMETER Experiment Name: At_Wounding__cDNA_P Parameter: Treatment Value: Wounding vs. No Wounding
  misc_feature: MA Experiment ID: 108576 Result: Up-regulated in Transcription
  misc_feature: MA Experiment 108576 PARAMETER Experiment Name: At_42deg_Heat_cDNA_P Parameter: Temperature (deg C) Value: 42 vs. 22
  misc_feature: MA Experiment 108576 PARAMETER Experiment Name: At_42deg_Heat_cDNA_P Parameter: Timepoint (hr) Value: 1
  misc_feature: MA Experiment 108576 PARAMETER Experiment Name: At_42deg_Heat_cDNA_P Parameter: Tissue Value: Aerial
  misc_feature: MA Experiment ID: 108577 Result: Down-regulated in Transcription
  misc_feature: MA Experiment 108577 PARAMETER Experiment Name: At_42deg_Heat_cDNA_P Parameter: Temperature (deg C) Value: 42 vs. 22
  misc_feature: MA Experiment 108577 PARAMETER Experiment Name: At_42deg_Heat_cDNA_P Parameter: Timepoint (hr) Value: 6
  misc_feature: MA Experiment 108577 PARAMETER Experiment Name: At_42deg_Heat_cDNA_P Parameter: Tissue Value: Aerial
  misc_feature: MA Experiment ID: 108605 Result: Down-regulated in Transcription
  misc_feature: MA Experiment 108605 PARAMETER Experiment Name: At_100uM_ABA_cDNA_P Parameter: Timepoint (hr) Value: 6
  misc_feature: MA Experiment 108605 PARAMETER Experiment Name: At_100uM_ABA_cDNA_P Parameter: Tissue Value: Aerial
  misc_feature: MA Experiment 108605 PARAMETER Experiment Name: At_100uM_ABA_cDNA_P Parameter: Treatment Value: 100uM ABA vs. No Treatment
  misc_feature: MA Experiment ID: 108607 Result: Down-regulated in Transcription
  misc_feature: MA Experiment 108607 PARAMETER Experiment Name: At_100uM_ABA_cDNA_P Parameter: Timepoint (hr) Value: 4
  misc_feature: MA Experiment 108607 PARAMETER Experiment Name: At_100uM_ABA_cDNA_P Parameter: Tissue Value: Aerial
  misc_feature: MA Experiment 108607 PARAMETER Experiment Name: At_100uM_ABA_cDNA_P Parameter: Treatment Value: 100uM ABA vs. No Treatment
  misc_feature: MA Experiment ID: 108668 Result: Down-regulated in Transcription
  misc_feature: MA Experiment 108668 PARAMETER Experiment Name: At_2mM_SA_cDNA_P Parameter: Plant Line Value: WS
  misc_feature: MA Experiment 108668 PARAMETER Experiment Name: At_2mM_SA_cDNA_P Parameter: Timepoint (hr) Value: 6
  misc_feature: MA Experiment 108668 PARAMETER Experiment Name: At_2mM_SA_cDNA_P Parameter: Treatment Value: 2mM SA vs. No Treatment
  misc_feature: MA Experiment ID: 20000113 Result: Down-regulated in Transcription
  misc_feature: MA Experiment 20000113 PARAMETER Experiment Name: At_42deg_Heat_cDNA_P Parameter: Temperature (deg C) Value: 42 vs. 22
  misc_feature: MA Experiment 20000113 PARAMETER Experiment Name: At_42deg_Heat_cDNA_P Parameter: Timepoint (hr) Value: 8
  misc_feature: MA Experiment 20000113 PARAMETER Experiment Name: At_42deg_Heat_cDNA_P Parameter: Tissue Value: Aerial
atgaaccaagacgagaatctgtctaggttccttcttcttcttccacaatataattatatctttcttcacacacccctagagagagaaaggaaggtgttaccggatttaggagagataaagaaggtttcttcatttagaaacagagacacgaagtttgcgatgatgatgatgattcagagaagaggaggtgagagacaagactcgtcggcggcggcgtacaacgttgtccataagttgcctcacggagacagtccttatgtccgagcgaagcatgttcagttggtggagaaagatgcagaagcagcgatagagttgttttggatagcgattaaagcgagagatagagttgatagtgctcttaaagacatggccttgttaatgaaacaacagaacagagctgaagaagccattgacgctattcaatcctttagagatctttgttcaagacaagctcaagagtcattagacaatgtcctcatcgatctatataagaaatgtgggagaatagaagagcaagttgagttattgaagcaaaagctttggatgatatatcaaggagaagcattcaatggcaaaccaacaaagactgcgagatctcatggcaagaagtttcaggtcaccgtcgagaaggaaacctctaggatcttggggaacttgggatgggcttatatgcaactaatggactatacagcagctgaagctgtgtatcggaaagctcaattgatagagccagatgcaaacaaggcttgcaatttatgcacatgtctcatcaagcaagggaagcacgatgaggcgaggtcgattctctttcgtgatgtactaatggagaacaaagaagggtctggtgatccgaggttgatggctcgggttcaagagctattgagtgagctaaagccacaggaagaagaagcagcggcttctgtgtctgtggaatgtgaagttggtatagatgagatagcggttgtcgaaggacttgatgagtttgtgaaggaatggaggaggccttataggacaagaagacttccgattttcgaagagatcttaccactgagagatcaattggcttgttga

SEQ ID NO: 74375 - protein, 356 aa, Arabidopsis thaliana
  peptide (1)..(356): Ceres Seq. ID no. 5668482
  misc_feature (213)..(246): Pfam Name: TPR Domain Pfam Description: TPR Domain
  misc_feature (1)..(356): Homolog of NCBI NO: 25406811 NR Description: hypothetical protein [imported] - Arabidopsis
  misc_feature (54)..(356): Homolog of NCBI NO: 30678993 NR Description: male sterility MS5 family [Arabidopsis thaliana] unknown protein [Arabidopsis thaliana]
  misc_feature (62)..(356): Homolog of NCBI NO: 3859116 NR Description: unknown [Oryza sativa]
  misc_feature (73)..(356): Homolog of NCBI NO: 9758884 NR Description: gb|AAC72543.1~gene_id:K24G6.19~similar to unknown
  misc_feature (73)..(356): Homolog of NCBI NO: 30695554 NR Description: male sterility MS5 family [Arabidopsis thaliana] unknown protein [Arabidopsis thaliana]
  misc_feature (48)..(297): Homolog of NCBI NO: 15230439 NR Description: MS5-like protein; protein id: At3g51280.1
  misc_feature (46)..(307): Homolog of NCBI NO: 3859112 NR Description: male sterility MS5 [Arabidopsis thaliana]
  misc_feature (46)..(307): Homolog of NCBI NO: 4028970 NR Description: pollenless3 [Arabidopsis thaliana]
  misc_feature (83)..(298): Homolog of NCBI NO: 29467532 NR Description: P0582D05.25 [Oryza sativa (japonica
  misc_feature (46)..(269): Homolog of NCBI NO: 15233432 NR Description: putative protein; protein id: At4g20900.1
MNQDENLSRFLLLLPQYNYIFLHTPLERERKVLPDLGEIKKVSSFRNRDTKFAMMMMIQRRGGERQDSSAAAYNVVHKLPHGDSPYVRAKHVQLVEKDAEAAIELFWIAIKARDRVDSALKDMALLMKQQNRAEEAIDAIQSFRDLCSRQAQESLDNVLIDLYKKCGRIEEQVELLKQKLWMIYQGEAFNGKPTKTARSHGKKFQVTVEKETSRILGNLGWAYMQLMDYTAAEAVYRKAQLIEPDANKACNLCTCLIKQGKHDEARSILFRDVLMENKEGSGDPRLMARVQELLSELKPQEEEAAASVSVECEVGIDEIAVVEGLDEFVKEWRRPYRTRRLPIFEEILPLRDQLAC

SEQ ID NO: 74376 - protein, 303 aa, Arabidopsis thaliana; identical to SEQ ID NO: 29388
  peptide (1)..(303): Ceres Seq. ID no. 5668483
  misc_feature (160)..(193): Pfam Name: TPR Domain Pfam Description: TPR Domain
  misc_feature (1)..(303): Homolog of NCBI NO: 25406811 NR Description: hypothetical protein [imported] - Arabidopsis
  misc_feature (1)..(303): Homolog of NCBI NO: 30678993 NR Description: male sterility MS5 family [Arabidopsis thaliana] unknown protein [Arabidopsis thaliana]
  misc_feature (9)..(303): Homolog of NCBI NO: 3859116 NR Description: unknown [Oryza sativa]
  misc_feature (20)..(303): Homolog of NCBI NO: 9758884 NR Description: gb|AAC72543.1~gene_id:K24G6.19~similar to unknown
  misc_feature (20)..(303): Homolog of NCBI NO: 30695554 NR Description: male sterility MS5 family [Arabidopsis thaliana] unknown protein [Arabidopsis thaliana]
  misc_feature (1)..(244): Homolog of NCBI NO: 15230439 NR Description: MS5-like protein; protein id: At3g51280.1
  misc_feature (1)..(254): Homolog of NCBI NO: 3859112 NR Description: male sterility MS5 [Arabidopsis thaliana]
  misc_feature (1)..(254): Homolog of NCBI NO: 4028970 NR Description: pollenless3 [Arabidopsis thaliana]
  misc_feature (30)..(245): Homolog of NCBI NO: 29467532 NR Description: P0582D05.25 [Oryza sativa (japonica
  misc_feature (1)..(216): Homolog of NCBI NO: 15233432 NR Description: putative protein; protein id: At4g20900.1

SEQ ID NO: 74377 - protein, 302 aa, Arabidopsis thaliana; identical to SEQ ID NO: 29389
  peptide (1)..(302): Ceres Seq. ID no. 5668484
  misc_feature (159)..(192): Pfam Name: TPR Domain Pfam Description: TPR Domain
  misc_feature (1)..(302): Homolog of NCBI NO: 25406811 NR Description: hypothetical protein [imported] - Arabidopsis
  misc_feature (1)..(302): Homolog of NCBI NO: 30678993 NR Description: male sterility MS5 family [Arabidopsis thaliana] unknown protein [Arabidopsis thaliana]
  misc_feature (8)..(302): Homolog of NCBI NO: 3859116 NR Description: unknown [Oryza sativa]
  misc_feature (19)..(302): Homolog of NCBI NO: 9758884 NR Description: gb|AAC72543.1~gene_id:K24G6.19~similar to unknown
  misc_feature (19)..(302): Homolog of NCBI NO: 30695554 NR Description: male sterility MS5 family [Arabidopsis thaliana] unknown protein [Arabidopsis thaliana]
  misc_feature (1)..(243): Homolog of NCBI NO: 15230439 NR Description: MS5-like protein; protein id: At3g51280.1
  misc_feature (1)..(253): Homolog of NCBI NO: 3859112 NR Description: male sterility MS5 [Arabidopsis thaliana]
  misc_feature (1)..(253): Homolog of NCBI NO: 4028970 NR Description: pollenless3 [Arabidopsis thaliana]
  misc_feature (29)..(244): Homolog of NCBI NO: 29467532 NR Description: P0582D05.25 [Oryza sativa (japonica
  misc_feature (1)..(215): Homolog of NCBI NO: 15233432 NR Description: putative protein; protein id: At4g20900.1

SEQ ID NO: 74378 - DNA, 1024 bp, Arabidopsis thaliana
  misc_feature (1)..(1024): Ceres Seq. ID no. 5670799
  misc_feature: MA Experiment ID: 20001911 Result: Down-regulated in Transcription
  misc_feature: MA Experiment 20001911 PARAMETER Experiment Name: At_Drought_Reproduction_P Parameter: Age (day) Value: 40
  misc_feature: MA Experiment 20001911 PARAMETER Experiment Name: At_Drought_Reproduction_P Parameter: Organism Value: A. thaliana
  misc_feature: MA Experiment 20001911 PARAMETER Experiment Name: At_Drought_Reproduction_P Parameter: Plant Line Value: WS
  misc_feature: MA Experiment 20001911 PARAMETER Experiment Name: At_Drought_Reproduction_P Parameter: Timepoint (day) Value: 10
  misc_feature: MA Experiment 20001911 PARAMETER Experiment Name: At_Drought_Reproduction_P Parameter: Tissue Value: Flowers
  misc_feature: MA Experiment 20001911 PARAMETER Experiment Name: At_Drought_Reproduction_P Parameter: Treatment Value: Drought vs. No Drought
  misc_feature: Pfam Name: DUF303 Pfam Description: Domain of unknown function (DUF303)
accccaccaaactttactttctattcagacaagacatctcgatagcttatttctatggtctgatcacacgatagtgtattctgatatcatcactctaccaaagagataccaaattatggaaggaggatctatcactcccggtgaagataaaccggagatccaatctccaattccaccaaatcagatcttcatactctctggacaaagcaatatggcaggacgcggcggcgtcttcaaagaccaccacaacaatcgctgggtgtgggataaaatccttccaccggaatgcgcaccaaactcatcgatcctccgcctgtccgcagatctccggtgggaagaagcacacgagccactacacgttgacattgacacaggtaaagtgtgtggagtaggtccaggaatggcgttcgctaacgcggtgaagaatcgcctggaaacagattcggctgtgatcgggttggtgccgtgcgcttccggtggaacggcgataaaagagtgggagcgtggaagccacttgtacgagaggatggtcaagagaacggaggagagtaggaaatgcggcggagagatcaaggcggtgttgtggtatcaaggagagagtgacgtgttggacatccatgacgccgagagctacgggaacaatatggatcgtttgattaagaacctccgtcatgatctcaaccttccttctcttcccattattcaggtggcaatagcatcgggaggaggatacatagataaggtgagagaagcacagttgggactgaaactgtcgaatgtggtctgtgtagatgctaagggattgccgctaaagtccgacaatcttcacttaaccaccgaggctcaagtccagcttggtctctccttagctcaagcttacctttccaacttctgctagacaatcaagtaagttcgtgataaggttcatgaatctttctgaatgtgtgtggtggactagttatatggatatcacaaaactttgtaataatggattggtaaaacattgatgttcatagtgaagaac

SEQ ID NO: 74379 - protein, 298 aa, Arabidopsis thaliana
  peptide (1)..(298): Ceres Seq. ID no. 5670800
  misc_feature: Pfam Name: DUF303 Pfam Description: Domain of unknown function (DUF303)
  misc_feature (39)..(298): Homolog of NCBI NO: 18418402 NR Description: Expressed protein; protein id: At4g34215.1,
  misc_feature (39)..(298): Homolog of NCBI NO: 21594009 NR Description: unknown [Arabidopsis thaliana]
  misc_feature (10)..(239): Homolog of NCBI NO: 7488258 NR Description: protein kinase homolog F28A23.20 - Arabidopsis
  misc_feature (61)..(297): Homolog of NCBI NO: 38347110 NR Description: OSJNBa0009K15.7 [Oryza sativa (japonica
  misc_feature (57)..(295): Homolog of NCBI NO: 30102980 NR Description: unknown protein [Oryza sativa (japonica
  misc_feature (59)..(295): Homolog of NCBI NO: 30102977 NR Description: hypothetical protein [Oryza sativa (japonica
  misc_feature (59)..(294): Homolog of NCBI NO: 38345580 NR Description: OSJNBa0027H06.16 [Oryza sativa (japonica
  misc_feature (48)..(236): Homolog of NCBI NO: 30693749 NR Description: expressed protein [Arabidopsis thaliana]
  misc_feature (71)..(236): Homolog of NCBI NO: 11357879 NR Description: hypothetical protein F8J2.180 - Arabidopsis >gi|7529725|emb|CAB86905.1| putative protein [Arabidopsis
  misc_feature (47)..(291): Homolog of NCBI NO: 29349588 NR Description: acetyl xylan esterase A [Bacteroides VPI- 5482] >gi|29341498|gb|AAO79285.1| acetyl xylan esterase A
PHQTLLSIQTRHLDSLFLWSDHTIVYSDIITLPKRYQIMEGGSITPGEDKPEIQSPIPPNQIFILSGQSNMAGRGGVFKDHHNNRWVWDKILPPECAPNSSILRLSADLRWEEAHEPLHVDIDTGKVCGVGPGMAFANAVKNRLETDSAVIGLVPCASGGTAIKEWERGSHLYERMVKRTEESRKCGGEIKAVLWYQGESDVLDIHDAESYGNNMDRLIKNLRHDLNLPSLPIIQVAIASGGGYIDKVREAQLGLKLSNVVCVDAKGLPLKSDNLHLTTEAQVQLGLSLAQAYLSNFC

SEQ ID NO: 74380 - protein, 260 aa, Arabidopsis thaliana
  peptide (1)..(260): Ceres Seq. ID no. 5670801
  misc_feature: Pfam Name: DUF303 Pfam Description: Domain of unknown function (DUF303)
  misc_feature (1)..(260): Homolog of NCBI NO: 18418402 NR Description: Expressed protein; protein id: At4g34215.1,
  misc_feature (1)..(260): Homolog of NCBI NO: 21594009 NR Description: unknown [Arabidopsis thaliana]
  misc_feature (1)..(201): Homolog of NCBI NO: 7488258 NR Description: protein kinase homolog F28A23.20 - Arabidopsis
  misc_feature (23)..(259): Homolog of NCBI NO: 38347110 NR Description: OSJNBa0009K15.7 [Oryza sativa (japonica
  misc_feature (19)..(257): Homolog of NCBI NO: 30102980 NR Description: unknown protein [Oryza sativa (japonica
  misc_feature (21)..(257): Homolog of NCBI NO: 30102977 NR Description: hypothetical protein [Oryza sativa (japonica
  misc_feature (21)..(256): Homolog of NCBI NO: 38345580 NR Description: OSJNBa0027H06.16 [Oryza sativa (japonica
  misc_feature (10)..(198): Homolog of NCBI NO: 30693749 NR Description: expressed protein [Arabidopsis thaliana]
  misc_feature (33)..(198): Homolog of NCBI NO: 11357879 NR Description: hypothetical protein F8J2.180 - Arabidopsis >gi|7529725|emb|CAB86905.1| putative protein [Arabidopsis
  misc_feature (9)..(253): Homolog of NCBI NO: 29349588 NR Description: acetyl xylan esterase A [Bacteroides VPI- 5482] >gi|29341498|gb|AAO79285.1| acetyl xylan esterase A
MEGGSITPGEDKPEIQSPIPPNQIFILSGQSNMAGRGGVFKDHHNNRWVWDKILPPECAPNSSILRLSADLRWEEAHEPLHVDIDTGKVCGVGPGMAFANAVKNRLETDSAVIGLVPCASGGTAIKEWERGSHLYERMVKRTEESRKCGGEIKAVLWYQGESDVLDIHDAESYGNNMDRLIKNLRHDLNLPSLPIIQVAIASGGGYIDKVREAQLGLKLSNVVCVDAKGLPLKSDNLHLTTEAQVQLGLSLAQAYLSNFC

SEQ ID NO: 74381 - protein, 228 aa, Arabidopsis thaliana
  peptide (1)..(228): Ceres Seq. ID no. 5670802
  misc_feature: Pfam Name: DUF303 Pfam Description: Domain of unknown function (DUF303)
  misc_feature (1)..(228): Homolog of NCBI NO: 18418402 NR Description: Expressed protein; protein id: At4g34215.1,
  misc_feature (1)..(228): Homolog of NCBI NO: 21594009 NR Description: unknown [Arabidopsis thaliana]
  misc_feature (1)..(169): Homolog of NCBI NO: 7488258 NR Description: protein kinase homolog F28A23.20 - Arabidopsis
  misc_feature (1)..(227): Homolog of NCBI NO: 38347110 NR Description: OSJNBa0009K15.7 [Oryza sativa (japonica
  misc_feature (1)..(225): Homolog of NCBI NO: 30102980 NR Description: unknown protein [Oryza sativa (japonica
  misc_feature (1)..(225): Homolog of NCBI NO: 30102977 NR Description: hypothetical protein [Oryza sativa (japonica
  misc_feature (1)..(224): Homolog of NCBI NO: 38345580 NR Description: OSJNBa0027H06.16 [Oryza sativa (japonica
  misc_feature (1)..(166): Homolog of NCBI NO: 30693749 NR Description: expressed protein [Arabidopsis thaliana]
  misc_feature (1)..(166): Homolog of NCBI NO: 11357879 NR Description: hypothetical protein F8J2.180 - Arabidopsis >gi|7529725|emb|CAB86905.1| putative protein [Arabidopsis
  misc_feature (1)..(221): Homolog of NCBI NO: 29349588 NR Description: acetyl xylan esterase A [Bacteroides VPI- 5482] >gi|29341498|gb|AAO79285.1| acetyl xylan esterase A
MAGRGGVFKDHHNNRWVWDKILPPECAPNSSILRLSADLRWEEAHEPLHVDIDTGKVCGVGPGMAFANAVKNRLETDSAVIGLVPCASGGTAIKEWERGSHLYERMVKRTEESRKCGGEIKAVLWYQGESDVLDIHDAESYGNNMDRLIKNLRHDLNLPSLPIIQVAIASGGGYIDKVREAQLGLKLSNVVCVDAKGLPLKSDNLHLTTEAQVQLGLSLAQAYLSNFC

SEQ ID NO: 74382 - DNA, 469 bp, Arabidopsis thaliana
  misc_feature (1)..(469): Ceres Seq. ID no. 5671306
  misc_feature: MA Experiment ID: 108461 Result: Up-regulated in Transcription
  misc_feature: MA Experiment 108461 PARAMETER Experiment Name: At_Germinating_Seeds_cDNA_P Parameter: Age (day) Value: 1 vs. 0
  misc_feature: MA Experiment 108461 PARAMETER Experiment Name: At_Germinating_Seeds_cDNA_P Parameter: Tissue Value: Germinating Seeds
  misc_feature: MA Experiment ID: 108462 Result: Up-regulated in Transcription
  misc_feature: MA Experiment 108462 PARAMETER Experiment Name: At_Germinating_Seeds_cDNA_P Parameter: Age (day) Value: 2 vs. 0
  misc_feature: MA Experiment 108462 PARAMETER Experiment Name: At_Germinating_Seeds_cDNA_P Parameter: Tissue Value: Germinating Seeds
  misc_feature: MA Experiment ID: 108464 Result: Up-regulated in Transcription
  misc_feature: MA Experiment 108464 PARAMETER Experiment Name: At_Germinating_Seeds_cDNA_P Parameter: Age (day) Value: 4 vs. 0
  misc_feature: MA Experiment 108464 PARAMETER Experiment Name: At_Germinating_Seeds_cDNA_P Parameter: Tissue Value: Germinating Seeds
  misc_feature: MA Experiment ID: 108488 Result: Up-regulated in Transcription
  misc_feature: MA Experiment ID: 108572 Result: Up-regulated in Transcription
  misc_feature: MA Experiment 108572 PARAMETER Experiment Name: At_Drought_cDNA_P Parameter: Timepoint (hr) Value: 1
  misc_feature: MA Experiment 108572 PARAMETER Experiment Name: At_Drought_cDNA_P Parameter: Tissue Value: Aerial
  misc_feature: MA Experiment 108572 PARAMETER Experiment Name: At_Drought_cDNA_P Parameter: Treatment Value: Drought vs. No Drought
  misc_feature: MA Experiment ID: 108576 Result: Down-regulated in Transcription
  misc_feature: MA Experiment 108576 PARAMETER Experiment Name: At_42deg_Heat_cDNA_P Parameter: Temperature (deg C) Value: 42 vs. 22
  misc_feature: MA Experiment 108576 PARAMETER Experiment Name: At_42deg_Heat_cDNA_P Parameter: Timepoint (hr) Value: 1
  misc_feature: MA Experiment 108576 PARAMETER Experiment Name: At_42deg_Heat_cDNA_P Parameter: Tissue Value: Aerial
  misc_feature: MA Experiment ID: 108577 Result: Down-regulated in Transcription
  misc_feature: MA Experiment 108577 PARAMETER Experiment Name: At_42deg_Heat_cDNA_P Parameter: Temperature (deg C) Value: 42 vs. 22
  misc_feature: MA Experiment 108577 PARAMETER Experiment Name: At_42deg_Heat_cDNA_P Parameter: Timepoint (hr) Value: 6
  misc_feature: MA Experiment 108577 PARAMETER Experiment Name: At_42deg_Heat_cDNA_P Parameter: Tissue Value: Aerial
  misc_feature: MA Experiment ID: 108585 Result: Down-regulated in Transcription
  misc_feature: MA Experiment 108585 PARAMETER Experiment Name: At_5mM_NaNP_cDNA_P Parameter: Timepoint (hr) Value: 6
  misc_feature: MA Experiment 108585 PARAMETER Experiment Name: At_5mM_NaNP_cDNA_P Parameter: Tissue Value: Aerial
  misc_feature: MA Experiment 108585 PARAMETER Experiment Name: At_5mM_NaNP_cDNA_P Parameter: Treatment Value: null
  misc_feature: MA Experiment ID: 108594 Result: Down-regulated in Transcription
  misc_feature: MA Experiment 108594 PARAMETER Experiment Name: At_Ler-rhl_Root_cDNA_P Parameter: Plant Line Value: null
  misc_feature: MA Experiment ID: 108595 Result: Down-regulated in Transcription
  misc_feature: MA Experiment 108595 PARAMETER Experiment Name: At_Ler-pi_Ovule_cDNA_P Parameter: Plant Line Value: null
  misc_feature: MA Experiment ID: 108607 Result: Up-regulated in Transcription
  misc_feature: MA Experiment 108607 PARAMETER Experiment Name: At_100uM_ABA_cDNA_P Parameter: Timepoint (hr) Value: 4
  misc_feature: MA Experiment 108607 PARAMETER Experiment Name: At_100uM_ABA_cDNA_P Parameter: Tissue Value: Aerial
  misc_feature: MA Experiment 108607 PARAMETER Experiment Name: At_100uM_ABA_cDNA_P Parameter: Treatment Value: 100uM ABA vs. No Treatment
  misc_feature: MA Experiment ID: 108668 Result: Down-regulated in Transcription
  misc_feature: MA Experiment 108668 PARAMETER Experiment Name: At_2mM_SA_cDNA_P Parameter: Plant Line Value: WS
  misc_feature: MA Experiment 108668 PARAMETER Experiment Name: At_2mM_SA_cDNA_P Parameter: Timepoint (hr) Value: 6
  misc_feature: MA Experiment 108668 PARAMETER Experiment Name: At_2mM_SA_cDNA_P Parameter: Treatment Value: 2mM SA vs. No Treatment
  misc_feature: MA Experiment ID: 20000112 Result: Down-regulated in Transcription
  misc_feature: MA Experiment 20000112 PARAMETER Experiment Name: At_42deg_Heat_cDNA_P Parameter: Temperature (deg C) Value: 42 vs. 22
  misc_feature: MA Experiment 20000112 PARAMETER Experiment Name: At_42deg_Heat_cDNA_P Parameter: Timepoint (hr) Value: 2
  misc_feature: MA Experiment 20000112 PARAMETER Experiment Name: At_42deg_Heat_cDNA_P Parameter: Tissue Value: Aerial
  misc_feature: MA Experiment ID: 20000113 Result: Down-regulated in Transcription
  misc_feature: MA Experiment 20000113 PARAMETER Experiment Name: At_42deg_Heat_cDNA_P Parameter: Temperature (deg C) Value: 42 vs. 22
  misc_feature: MA Experiment 20000113 PARAMETER Experiment Name: At_42deg_Heat_cDNA_P Parameter: Timepoint (hr) Value: 8
  misc_feature: MA Experiment 20000113 PARAMETER Experiment Name: At_42deg_Heat_cDNA_P Parameter: Tissue Value: Aerial
  misc_feature: MA Experiment ID: 20000144 Result: Down-regulated in Transcription
  misc_feature: MA Experiment 20000144 PARAMETER Experiment Name: At_42deg_Heat_cDNA_P Parameter: Temperature (deg C) Value: 42 vs. 22
  misc_feature: MA Experiment 20000144 PARAMETER Experiment Name: At_42deg_Heat_cDNA_P Parameter: Timepoint (hr) Value: 1
  misc_feature: MA Experiment 20000144 PARAMETER Experiment Name: At_42deg_Heat_cDNA_P Parameter: Tissue Value: Aerial
  misc_feature: MA Experiment ID: 20000171 Result: Down-regulated in Transcription
  misc_feature: MA Experiment 20000171 PARAMETER Experiment Name: At_42deg_Heat_P Parameter: Age (day) Value: 14
  misc_feature: MA Experiment 20000171 PARAMETER Experiment Name: At_42deg_Heat_P Parameter: Organism Value: A. thaliana
  misc_feature: MA Experiment 20000171 PARAMETER Experiment Name: At_42deg_Heat_P Parameter: Plant Line Value: WS
  misc_feature: MA Experiment 20000171 PARAMETER Experiment Name: At_42deg_Heat_P Parameter: Temperature (deg C) Value: 42 vs. 22
  misc_feature: MA Experiment 20000171 PARAMETER Experiment Name: At_42deg_Heat_P Parameter: Timepoint (hr) Value: 1
  misc_feature: MA Experiment 20000171 PARAMETER Experiment Name: At_42deg_Heat_P Parameter: Tissue Value: Aerial
  misc_feature: MA Experiment ID: 20000173 Result: Down-regulated in Transcription
  misc_feature: MA Experiment 20000173 PARAMETER Experiment Name: At_42deg_Heat_P Parameter: Age (day) Value: 14
  misc_feature: MA Experiment 20000173 PARAMETER Experiment Name: At_42deg_Heat_P Parameter: Organism Value: A. thaliana
  misc_feature: MA Experiment 20000173 PARAMETER Experiment Name: At_42deg_Heat_P Parameter: Plant Line Value: WS
  misc_feature: MA Experiment 20000173 PARAMETER Experiment Name: At_42deg_Heat_P Parameter: Temperature (deg C) Value: 42 vs. 22
  misc_feature: MA Experiment 20000173 PARAMETER Experiment Name: At_42deg_Heat_P Parameter: Timepoint (hr) Value: 6
  misc_feature: MA Experiment 20000173 PARAMETER Experiment Name: At_42deg_Heat_P Parameter: Tissue Value: Aerial
  misc_feature: MA Experiment ID: 20000180 Result: Up-regulated in Transcription
  misc_feature: MA Experiment 20000180 PARAMETER Experiment Name: At_Germinating_Seeds_P Parameter: Age (hr) Value: 24 vs. 0
  misc_feature: MA Experiment 20000180 PARAMETER Experiment Name: At_Germinating_Seeds_P Parameter: Tissue Value: Germinating Seeds
  misc_feature: MA Experiment ID: 20000184 Result: Up-regulated in Transcription
  misc_feature: MA Experiment 20000184 PARAMETER Experiment Name: At_Shoots__P Parameter: Age (day) Value: 7
  misc_feature: MA Experiment 20000184 PARAMETER Experiment Name: At_Shoots__P Parameter: Tissue Value: Shoots vs. Whole Plant
  misc_feature: MA Experiment ID: 20000185 Result: Down-regulated in Transcription
  misc_feature: MA Experiment 20000185 PARAMETER Experiment Name: At_Roots__P Parameter: Age (day) Value: 7 vs. 21
  misc_feature: MA Experiment 20000185 PARAMETER Experiment Name: At_Roots__P Parameter: Organism Value: A. thaliana
  misc_feature: MA Experiment 20000185 PARAMETER Experiment Name: At_Roots__P Parameter: Tissue Value: Roots vs. Whole Plant
  misc_feature: MA Experiment ID: 20000224 Result: Down-regulated in Transcription
  misc_feature: MA Experiment ID: 20000234 Result: Up-regulated in Transcription
  misc_feature: MA Experiment 20000234 PARAMETER Experiment Name: At_Siliques_P Parameter: Age (day) Value: 21
  misc_feature: MA Experiment 20000234 PARAMETER Experiment Name: At_Siliques_P Parameter: Organism Value: A. thaliana
  misc_feature: MA Experiment 20000234 PARAMETER Experiment Name: At_Siliques_P Parameter: Plant Line Value: WS
  misc_feature: MA Experiment 20000234 PARAMETER Experiment Name: At_Siliques_P Parameter: Tissue Value: Less Than 5mm Siliques vs. Whole Plant
  misc_feature: MA Experiment ID: 20000286 Result: Up-regulated in Transcription
  misc_feature: MA Experiment 20000286 PARAMETER Experiment Name: At_Open_Flower_P Parameter: Age (day) Value: 21
  misc_feature: MA Experiment 20000286 PARAMETER Experiment Name: At_Open_Flower_P Parameter: Plant Line Value: WS
  misc_feature: MA Experiment 20000286 PARAMETER Experiment Name: At_Open_Flower_P Parameter: Tissue Value: Half Open vs. Whole Plant
  misc_feature: MA Experiment ID: 20000438 Result: Up-regulated in Transcription
  misc_feature: MA Experiment 20000438 PARAMETER Experiment Name: At_Shoots__P Parameter: Age (day) Value: 14
  misc_feature: MA Experiment 20000438 PARAMETER Experiment Name: At_Shoots__P Parameter: Tissue Value: Shoots vs. Whole Plant
  misc_feature: MA Experiment ID: 20000439 Result: Down-regulated in Transcription
  misc_feature: MA Experiment 20000439 PARAMETER Experiment Name: At_Roots__P Parameter: Age (day) Value: 14 vs. 21
  misc_feature: MA Experiment 20000439 PARAMETER Experiment Name: At_Roots__P Parameter: Organism Value: A. thaliana
  misc_feature: MA Experiment 20000439 PARAMETER Experiment Name: At_Roots__P Parameter: Tissue Value: Roots vs. Whole Plant
  misc_feature: MA Experiment ID: 20000451 Result: Up-regulated in Transcription
  misc_feature: MA Experiment 20000451 PARAMETER Experiment Name: At_CS6879_Shoots-Roots_P Parameter: Age (day) Value: 14
  misc_feature: MA Experiment 20000451 PARAMETER Experiment Name: At_CS6879_Shoots-Roots_P Parameter: Organism Value: A. thaliana
  misc_feature: MA Experiment 20000451 PARAMETER Experiment Name: At_CS6879_Shoots-Roots_P Parameter: Plant Line Value: CS6879 vs. WS
  misc_feature: MA Experiment 20000451 PARAMETER Experiment Name: At_CS6879_Shoots-Roots_P Parameter: Tissue Value: Roots
  misc_feature: MA Experiment ID: 20000573 Result: Down-regulated in Transcription
  misc_feature: MA Experiment 20000573 PARAMETER Experiment Name: At_100uM_ABA_Mutants__P Parameter: Organism Value: A. thaliana
  misc_feature: MA Experiment 20000573 PARAMETER Experiment Name: At_100uM_ABA_Mutants__P Parameter: Plant Line Value: CS22 vs. Ler wt
  misc_feature: MA Experiment 20000573 PARAMETER Experiment Name: At_100uM_ABA_Mutants__P Parameter: Timepoint (hr) Value: N/A
  misc_feature: MA Experiment 20000573 PARAMETER Experiment Name: At_100uM_ABA_Mutants__P Parameter: Tissue Value: Whole Plant
  misc_feature: MA Experiment 20000573 PARAMETER Experiment Name: At_100uM_ABA_Mutants__P Parameter: Treatment Value: None
  misc_feature: MA Experiment ID: 20000574 Result: Down-regulated in Transcription
  misc_feature: MA Experiment 20000574 PARAMETER Experiment Name: At_100uM_ABA_Mutants__P Parameter: Organism Value: A. thaliana
  misc_feature: MA Experiment 20000574 PARAMETER Experiment Name: At_100uM_ABA_Mutants__P Parameter: Plant Line Value: CS23 vs. Ler wt
  misc_feature: MA Experiment 20000574 PARAMETER Experiment Name: At_100uM_ABA_Mutants__P Parameter: Timepoint (hr) Value: N/A
  misc_feature: MA Experiment 20000574 PARAMETER Experiment Name: At_100uM_ABA_Mutants__P Parameter: Tissue Value: Whole Plant
  misc_feature: MA Experiment 20000574 PARAMETER Experiment Name: At_100uM_ABA_Mutants__P Parameter: Treatment Value: None
  misc_feature: MA Experiment ID: 20001248 Result: Down-regulated in Transcription
  misc_feature: MA Experiment 20001248 PARAMETER Experiment Name: At_Far-red-induction_P Parameter: Age (day) Value: 7
  misc_feature: MA Experiment 20001248 PARAMETER Experiment Name: At_Far-red-induction_P Parameter: Light Value: Far-red vs. White
  misc_feature: MA Experiment 20001248 PARAMETER Experiment Name: At_Far-red-induction_P Parameter: Organism Value: A. thaliana
  misc_feature: MA Experiment 20001248 PARAMETER Experiment Name: At_Far-red-induction_P Parameter: Plant Line Value: Columbia
  misc_feature: MA Experiment 20001248 PARAMETER Experiment Name: At_Far-red-induction_P Parameter: Timepoint (hr) Value: 4
  misc_feature: MA Experiment 20001248 PARAMETER Experiment Name: At_Far-red-induction_P Parameter: Tissue Value: Whole Plant
  misc_feature: MA Experiment ID: 20001558 Result: Up-regulated in Transcription
  misc_feature: MA Experiment 20001558 PARAMETER Experiment Name: At_Drought_Soil_Dry_P Parameter: Age (day) Value: 27
  misc_feature: MA Experiment 20001558 PARAMETER Experiment Name: At_Drought_Soil_Dry_P Parameter: Organism Value: A. thaliana
  misc_feature: MA Experiment 20001558 PARAMETER Experiment Name: At_Drought_Soil_Dry_P Parameter: Plant Line Value: WS
  misc_feature: MA Experiment 20001558 PARAMETER Experiment Name: At_Drought_Soil_Dry_P Parameter: Post Timepoint (hr) Value: 6
  misc_feature: MA Experiment 20001558 PARAMETER Experiment Name: At_Drought_Soil_Dry_P Parameter: Post-Treatment Value: Re-Water vs. No Drought
  misc_feature: MA Experiment 20001558 PARAMETER Experiment Name: At_Drought_Soil_Dry_P Parameter: Timepoint (day) Value: 13
  misc_feature: MA Experiment 20001558 PARAMETER Experiment Name: At_Drought_Soil_Dry_P Parameter: Treatment Value: Drought vs. No Drought
  misc_feature: MA Experiment ID: 20001906 Result: Down-regulated in Transcription
  misc_feature: MA Experiment 20001906 PARAMETER Experiment Name: At_Drought_Reproduction_P Parameter: Age (day) Value: 35
  misc_feature: MA Experiment 20001906 PARAMETER Experiment Name: At_Drought_Reproduction_P Parameter: Organism Value: A. thaliana
  misc_feature: MA Experiment 20001906 PARAMETER Experiment Name: At_Drought_Reproduction_P Parameter: Plant Line Value: WS
  misc_feature: MA Experiment 20001906 PARAMETER Experiment Name: At_Drought_Reproduction_P Parameter: Timepoint (day) Value: 5
  misc_feature: MA Experiment 20001906 PARAMETER Experiment Name: At_Drought_Reproduction_P Parameter: Tissue Value: Siliques
  misc_feature: MA Experiment 20001906 PARAMETER Experiment Name: At_Drought_Reproduction_P Parameter: Treatment Value: Drought vs. No Drought
  misc_feature: MA Experiment ID: 20001908 Result: Down-regulated in Transcription
  misc_feature: MA Experiment 20001908 PARAMETER Experiment Name: At_Drought_Reproduction_P Parameter: Age (day) Value: 40
  misc_feature: MA Experiment 20001908 PARAMETER Experiment Name: At_Drought_Reproduction_P Parameter: Organism Value: A. thaliana
  misc_feature: MA Experiment 20001908 PARAMETER Experiment Name: At_Drought_Reproduction_P Parameter: Plant Line Value: WS
  misc_feature: MA Experiment 20001908 PARAMETER Experiment Name: At_Drought_Reproduction_P Parameter: Timepoint (day) Value: 10
  misc_feature: MA Experiment 20001908 PARAMETER Experiment Name: At_Drought_Reproduction_P Parameter: Tissue Value: Siliques
  misc_feature: MA Experiment 20001908 PARAMETER Experiment Name: At_Drought_Reproduction_P Parameter: Treatment Value: Drought vs. No Drought
  misc_feature: MA Experiment ID: 20001911 Result: Down-regulated in Transcription
  misc_feature: MA Experiment 20001911 PARAMETER Experiment Name: At_Drought_Reproduction_P Parameter: Age (day) Value: 40
  misc_feature: MA Experiment 20001911 PARAMETER Experiment Name: At_Drought_Reproduction_P Parameter: Organism Value: A. thaliana
  misc_feature: MA Experiment 20001911 PARAMETER Experiment Name: At_Drought_Reproduction_P Parameter: Plant Line Value: WS
  misc_feature: MA Experiment 20001911 PARAMETER Experiment Name: At_Drought_Reproduction_P Parameter: Timepoint (day) Value: 10
  misc_feature: MA Experiment 20001911 PARAMETER Experiment Name: At_Drought_Reproduction_P Parameter: Tissue Value: Flowers
  misc_feature: MA Experiment 20001911 PARAMETER Experiment Name: At_Drought_Reproduction_P Parameter: Treatment Value: Drought vs. No Drought
aagactcaacacagatgctcaaaactttaacaagaagcttaacgctgctgcttcaaagcttcagaagcaatattccgatcttaagattgttgtcttcgacatctactctccactttatgatcttgttcagaacccttccaaatccggattcacggaagcaaccaaaggatgttgtggaacaggaacagtcgagacaacttcactcttgtgcaacccgaaatcgtttgggacatgctccaatgctactcagtatgtgttctgggacagtgtgcatccttctgaagctgccaatgagattcttgccactgccctaattggacagggcttttctctcctcggttgatctcacgtatttttcttatattctcttttcaaatcgctgtttctatcacacattgagtcatacatttgtttttctttgaattatgtatcaaagcatcactgttttactaaaaatgtattgaaactt

SEQ ID NO: 74383 - protein, 113 aa, Arabidopsis thaliana; identical to SEQ ID NO: 29244
  peptide (1)..(113): Ceres Seq. ID no. 5671307
  misc_feature (1)..(104): Pfam Name: GDSL-like Lipase/Acylhydrolase Pfam Description: GDSL-like Lipase/Acylhydrolase
  misc_feature (1)..(113): Homolog of NCBI NO: 2062167 NR Description: Proline-rich protein APG isolog [Arabidopsis
  misc_feature (1)..(113): Homolog of NCBI NO: 15228189 NR Description: putative APG protein; protein id: At3g16370.1,
  misc_feature (1)..(112): Homolog of NCBI NO: 10638955 NR Description: putative proline-rich protein APG isolog [Cicer
  misc_feature (1)..(112): Homolog of NCBI NO: 13174242 NR Description: putative proline-rich protein [Oryza sativa]
  misc_feature (1)..(112): Homolog of NCBI NO: 15237137 NR Description: GDSL-motif lipase/hydrolase-like protein; protein
  misc_feature (1)..(112): Homolog of NCBI NO: 15237531 NR Description: putative protein; protein id: At5g03820.1
  misc_feature (1)..(112): Homolog of NCBI NO: 30693763 NR Description: GDSL-motif lipase/hydrolase protein [Arabidopsis
  misc_feature (1)..(112): Homolog of NCBI NO: 9758010 NR Description: proline-rich protein APG-like [Arabidopsis
  misc_feature (1)..(112): Homolog of NCBI NO: 15237528 NR Description: putative protein; protein id: At5g03810.1
  misc_feature (1)..(105): Homolog of NCBI NO: 28393626 NR Description: putative family II extracellular lipase 1 (EXL1) thaliana] >gi|28827430|gb|AAO50559.1| putative family II

SEQ ID NO: 74384 - protein, 103 aa, Arabidopsis thaliana; identical to SEQ ID NO: 29245
  peptide (1)..(103): Ceres Seq. ID no. 5671308

SEQ ID NO: 74385 - protein, 99 aa, Arabidopsis thaliana; identical to SEQ ID NO: 29246
  peptide (1)..(99): Ceres Seq. ID no. 5671309

SEQ ID NO: 74386 - DNA, 826 bp, Arabidopsis thaliana
  misc_feature (1)..(826): Ceres Seq. ID no. 5671537
  misc_feature: MA Experiment ID: 108577 Result: Down-regulated in Transcription
  misc_feature: MA Experiment 108577 PARAMETER Experiment Name: At_42deg_Heat_cDNA_P Parameter: Temperature (deg C) Value: 42 vs. 22
  misc_feature: MA Experiment 108577 PARAMETER Experiment Name: At_42deg_Heat_cDNA_P Parameter: Timepoint (hr) Value: 6
  misc_feature: MA Experiment 108577 PARAMETER Experiment Name: At_42deg_Heat_cDNA_P Parameter: Tissue Value: Aerial
  misc_feature: MA Experiment ID: 108579 Result: Up-regulated in Transcription
  misc_feature: MA Experiment 108579 PARAMETER Experiment Name: At_4deg_Cold_cDNA_P Parameter: Temperature (deg C) Value: 4 vs. 22
  misc_feature: MA Experiment 108579 PARAMETER Experiment Name: At_4deg_Cold_cDNA_P Parameter: Timepoint (hr) Value: 6
  misc_feature: MA Experiment 108579 PARAMETER Experiment Name: At_4deg_Cold_cDNA_P Parameter: Tissue Value: Aerial
  misc_feature: MA Experiment ID: 108595 Result: Down-regulated in Transcription
  misc_feature: MA Experiment 108595 PARAMETER Experiment Name: At_Ler-pi_Ovule_cDNA_P Parameter: Plant Line Value: null
  misc_feature: MA Experiment ID: 20000179 Result: Up-regulated in Transcription
  misc_feature: MA Experiment 20000179 PARAMETER Experiment Name: At_Germinating_Seeds_P Parameter: Age (hr) Value: 6 vs. 0
  misc_feature: MA Experiment 20000179 PARAMETER Experiment Name: At_Germinating_Seeds_P Parameter: Tissue Value: Germinating Seeds
  misc_feature: MA Experiment ID: 20000185 Result: Down-regulated in Transcription
  misc_feature: MA Experiment 20000185 PARAMETER Experiment Name: At_Roots__P Parameter: Age (day) Value: 7 vs. 21
  misc_feature: MA Experiment 20000185 PARAMETER Experiment Name: At_Roots__P Parameter: Organism Value: A. thaliana
  misc_feature: MA Experiment 20000185 PARAMETER Experiment Name: At_Roots__P Parameter: Tissue Value: Roots vs. Whole Plant
  misc_feature: MA Experiment ID: 20000437 Result: Down-regulated in Transcription
  misc_feature: MA Experiment 20000437 PARAMETER Experiment Name: At_Drought_P Parameter: Age (day) Value: 8
  misc_feature: MA Experiment 20000437 PARAMETER Experiment Name: At_Drought_P Parameter: Organism Value: A. thaliana
  misc_feature: MA Experiment 20000437 PARAMETER Experiment Name: At_Drought_P Parameter: Plant Line Value: WS
  misc_feature: MA Experiment 20000437 PARAMETER Experiment Name: At_Drought_P Parameter: Timepoint (hr) Value: 24
  misc_feature: MA Experiment 20000437 PARAMETER Experiment Name: At_Drought_P Parameter: Tissue Value: Whole Plant
  misc_feature: MA Experiment 20000437 PARAMETER Experiment Name: At_Drought_P Parameter: Treatment Value: Drought vs. No Drought
  misc_feature: MA Experiment ID: 20000439 Result: Down-regulated in Transcription
  misc_feature: MA Experiment 20000439 PARAMETER Experiment Name: At_Roots__P Parameter: Age (day) Value: 14 vs. 21
  misc_feature: MA Experiment 20000439 PARAMETER Experiment Name: At_Roots__P Parameter: Organism Value: A. thaliana
  misc_feature: MA Experiment 20000439 PARAMETER Experiment Name: At_Roots__P Parameter: Tissue Value: Roots vs. Whole Plant
  misc_feature: MA Experiment ID: 20000495 Result: Down-regulated in Transcription
  misc_feature: MA Experiment 20000495 PARAMETER Experiment Name: At_Guard_Cells_P Parameter: Harvest Date Value: 8/2/2002
  misc_feature: MA Experiment 20000495 PARAMETER Experiment Name: At_Guard_Cells_P Parameter: Organism Value: A. thaliana
  misc_feature: MA Experiment 20000495 PARAMETER Experiment Name: At_Guard_Cells_P Parameter: Tissue Value: Guard Cells vs. Leaves
  misc_feature: MA Experiment ID: 20001905 Result: Down-regulated in Transcription
  misc_feature: MA Experiment 20001905 PARAMETER Experiment Name: At_Drought_Reproduction_P Parameter: Age (day) Value: 40
  misc_feature: MA Experiment 20001905 PARAMETER Experiment Name: At_Drought_Reproduction_P Parameter: Organism Value: A. thaliana
  misc_feature: MA Experiment 20001905 PARAMETER Experiment Name: At_Drought_Reproduction_P Parameter: Plant Line Value: WS
  misc_feature: MA Experiment 20001905 PARAMETER Experiment Name: At_Drought_Reproduction_P Parameter: Timepoint (day) Value: 10
  misc_feature: MA Experiment 20001905 PARAMETER Experiment Name: At_Drought_Reproduction_P Parameter: Tissue Value: Rosettes
  misc_feature: MA Experiment 20001905 PARAMETER Experiment Name: At_Drought_Reproduction_P Parameter: Treatment Value: Drought vs. No Drought
  misc_feature: MA Experiment ID: 20001911 Result: Down-regulated in Transcription
  misc_feature: MA Experiment 20001911 PARAMETER Experiment Name: At_Drought_Reproduction_P Parameter: Age (day) Value: 40
  misc_feature: MA Experiment 20001911 PARAMETER Experiment Name: At_Drought_Reproduction_P Parameter: Organism Value: A. thaliana
  misc_feature: MA Experiment 20001911 PARAMETER Experiment Name: At_Drought_Reproduction_P Parameter: Plant Line Value: WS
  misc_feature: MA Experiment 20001911 PARAMETER Experiment Name: At_Drought_Reproduction_P Parameter: Timepoint (day) Value: 10
  misc_feature: MA Experiment 20001911 PARAMETER Experiment Name: At_Drought_Reproduction_P Parameter: Tissue Value: Flowers
  misc_feature: MA Experiment 20001911 PARAMETER Experiment Name: At_Drought_Reproduction_P Parameter: Treatment Value: Drought vs. No Drought
aatttttcatcttcttcgagtgattagtacagattagggttttattcgttattattgtctatattactccttgattgtggtcgatgacctcgctacttcttctcagaacgcttccgcttctccgcaacggatttctcaaccatcgtcatcaagttggtatcgtagctggtggaattctcagtcaccgtcggcgtttgttgtgttctcttgctgatagaccacagttttacgagaataatgattctgtttctccggtggagggatccggcgcggcggcgatgaacgtgacatcgcctgttgttgataatagctggcgttatgaagatcctgattatcggaaatggaagaatctagaggctgagattcttcgagatattgaacctatttctcttctcgctaaagaaattcttcattccgataggtatttggatggagaacgcttagattttgaggatgagaaaattgtcatggaaaagcttcttccttatcacccatattccaaagacaaaattggttgtggtcttgattttataatggttgatcggcatccacaattcaggcactcaagatgcctctttgttgtgagaacagatggtggatggatagatttctcgtaccaaaagtgtcttcgagcctatgttcgagataagtacccgtctcacgctgagaggtttattcgtgaacattttaagcgtgctagtagctaaaaatctgtataactgtcccactcatcatcacagcaaattctcataaatttttagctgaaataacacaatcagctatgaagctttgttgtacaaaatttataaattgctcaatctattgg

SEQ ID NO: 74387 - protein, 207 aa, Arabidopsis thaliana; identical to SEQ ID NO: 35018
  peptide (1)..(207): Ceres Seq. ID no. 5671538
  misc_feature (1)..(207): Homolog of NCBI NO: 15232596 NR Description: putative protein; protein id: At3g46630.1, by cDNA: 21432. [Arabidopsis thaliana] >gi|11357353|pir||T45600
  misc_feature (87)..(204): Homolog of NCBI NO: 34015211 NR Description: putative defective chloroplasts and leaves (DCL)
  misc_feature (74)..(204): Homolog of NCBI NO: 18650724 NR Description: DCL protein [Coffea arabica]
  misc_feature (80)..(204): Homolog of NCBI NO: 22330069 NR Description: defective chloroplasts and leaves (DCL) protein [Arabidopsis thaliana] >gi|25334999|pir||C96510 hypothetical
  misc_feature (83)..(204): Homolog of NCBI NO: 6014934 NR Description: DCL PROTEIN, CHLOROPLAST PRECURSOR (DEFECTIVE
  misc_feature (91)..(204): Homolog of NCBI NO: 15225617 NR Description: unknown protein; protein id: At2g40040.1
  misc_feature (90)..(203): Homolog of NCBI NO: 34905864 NR Description: similar to DNA-directed RNA polymerase subunit A'

SEQ ID NO: 74388 - protein, 142 aa, Arabidopsis thaliana; identical to SEQ ID NO: 35019
  peptide (1)..(142): Ceres Seq. ID no. 5671539
  misc_feature (1)..(142): Homolog of NCBI NO: 15232596 NR Description: putative protein; protein id: At3g46630.1, by cDNA: 21432. [Arabidopsis thaliana] >gi|11357353|pir||T45600
  misc_feature (22)..(139): Homolog of NCBI NO: 34015211 NR Description: putative defective chloroplasts and leaves (DCL)
  misc_feature (9)..(139): Homolog of NCBI NO: 18650724 NR Description: DCL protein [Coffea arabica]
  misc_feature (15)..(139): Homolog of NCBI NO: 22330069 NR Description: defective chloroplasts and leaves (DCL) protein [Arabidopsis thaliana] >gi|25334999|pir||C96510 hypothetical
  misc_feature (18)..(139): Homolog of NCBI NO: 6014934 NR Description: DCL PROTEIN, CHLOROPLAST PRECURSOR (DEFECTIVE
  misc_feature (26)..(139): Homolog of NCBI NO: 15225617 NR Description: unknown protein; protein id: At2g40040.1
  misc_feature (25)..(138): Homolog of NCBI NO: 34905864 NR Description: similar to DNA-directed RNA polymerase subunit A'

SEQ ID NO: 74389 - DNA, 1278 bp, Arabidopsis thaliana
  misc_feature (1)..(1278): Ceres Seq. ID no. 5671625
  misc_feature: MA Experiment ID: 20000166 Result: Up-regulated in Transcription
  misc_feature: MA Experiment 20000166 PARAMETER Experiment Name: At_100uM_ABA_P Parameter: Age (day) Value: 14
  misc_feature: MA Experiment 20000166 PARAMETER Experiment Name: At_100uM_ABA_P Parameter: Organism Value: A. thaliana
  misc_feature: MA Experiment 20000166 PARAMETER Experiment Name: At_100uM_ABA_P Parameter: Plant Line Value: WS
  misc_feature: MA Experiment 20000166 PARAMETER Experiment Name: At_100uM_ABA_P Parameter: Timepoint (hr) Value: 1
  misc_feature: MA Experiment 20000166 PARAMETER Experiment Name: At_100uM_ABA_P Parameter: Tissue Value: Aerial
  misc_feature: MA Experiment 20000166 PARAMETER Experiment Name: At_100uM_ABA_P Parameter: Treatment Value: 100uM ABA vs. No Treatment
  misc_feature: MA Experiment ID: 20000169 Result: Up-regulated in Transcription
  misc_feature: MA Experiment 20000169 PARAMETER Experiment Name: At_100uM_ABA_P Parameter: Age (day) Value: 14
  misc_feature: MA Experiment 20000169 PARAMETER Experiment Name: At_100uM_ABA_P Parameter: Organism Value: A. thaliana
  misc_feature: MA Experiment 20000169 PARAMETER Experiment Name: At_100uM_ABA_P Parameter: Plant Line Value: WS
  misc_feature: MA Experiment 20000169 PARAMETER Experiment Name: At_100uM_ABA_P Parameter: Timepoint (hr) Value: 6
  misc_feature: MA Experiment 20000169 PARAMETER Experiment Name: At_100uM_ABA_P Parameter: Tissue Value: Aerial
  misc_feature: MA Experiment 20000169 PARAMETER Experiment Name: At_100uM_ABA_P Parameter: Treatment Value: 100uM ABA vs. No Treatment
  misc_feature: MA Experiment ID: 20000180 Result: Up-regulated in Transcription
  misc_feature: MA Experiment 20000180 PARAMETER Experiment Name: At_Germinating_Seeds_P Parameter: Age (hr) Value: 24 vs. 0
  misc_feature: MA Experiment 20000180 PARAMETER Experiment Name: At_Germinating_Seeds_P Parameter: Tissue Value: Germinating Seeds
  misc_feature: MA Experiment ID: 20000182 Result: Up-regulated in Transcription
  misc_feature: MA Experiment 20000182 PARAMETER Experiment Name: At_2mM_SA_P Parameter: Age (day) Value: 14
  misc_feature: MA Experiment 20000182 PARAMETER Experiment Name: At_2mM_SA_P Parameter: Organism Value: A. thaliana
  misc_feature: MA Experiment 20000182 PARAMETER Experiment Name: At_2mM_SA_P Parameter: Plant Line Value: WS
  misc_feature: MA Experiment 20000182 PARAMETER Experiment Name: At_2mM_SA_P Parameter: Timepoint (hr) Value: 6
  misc_feature: MA Experiment 20000182 PARAMETER Experiment Name: At_2mM_SA_P Parameter: Tissue Value: Aerial
  misc_feature: MA Experiment 20000182 PARAMETER Experiment Name: At_2mM_SA_P Parameter: Treatment Value: 2mM SA vs. No Treatment
  misc_feature: MA Experiment ID: 20000184 Result: Down-regulated in Transcription
  misc_feature: MA Experiment 20000184 PARAMETER Experiment Name: At_Shoots__P Parameter: Age (day) Value: 7
  misc_feature: MA Experiment 20000184 PARAMETER Experiment Name: At_Shoots__P Parameter: Tissue Value: Shoots vs. Whole Plant
  misc_feature: MA Experiment ID: 20000234 Result: Down-regulated in Transcription
  misc_feature: MA Experiment 20000234 PARAMETER Experiment Name: At_Siliques_P Parameter: Age (day) Value: 21
  misc_feature: MA Experiment 20000234 PARAMETER Experiment Name: At_Siliques_P Parameter: Organism Value: A. thaliana
  misc_feature: MA Experiment 20000234 PARAMETER Experiment Name: At_Siliques_P Parameter: Plant Line Value: WS
  misc_feature: MA Experiment 20000234 PARAMETER Experiment Name: At_Siliques_P Parameter: Tissue Value: Less Than 5mm Siliques vs. Whole Plant
  misc_feature: MA Experiment ID: 20000264 Result: Down-regulated in Transcription
  misc_feature: MA Experiment 20000264 PARAMETER Experiment Name: At_Open_Flower_P Parameter: Age (day) Value: 21
  misc_feature: MA Experiment 20000264 PARAMETER Experiment Name: At_Open_Flower_P Parameter: Plant Line Value: WS
  misc_feature: MA Experiment 20000264 PARAMETER Experiment Name: At_Open_Flower_P Parameter: Tissue Value: Open Flower vs. Whole Plant
  misc_feature: MA Experiment ID: 20000437 Result: Up-regulated in Transcription
  misc_feature: MA Experiment 20000437 PARAMETER Experiment Name: At_Drought_P Parameter: Age (day) Value: 8
  misc_feature: MA Experiment 20000437 PARAMETER Experiment Name: At_Drought_P Parameter: Organism Value: A. thaliana
  misc_feature: MA Experiment 20000437 PARAMETER Experiment Name: At_Drought_P Parameter: Plant Line Value: WS
  misc_feature: MA Experiment 20000437 PARAMETER Experiment Name: At_Drought_P Parameter: Timepoint (hr) Value: 24
  misc_feature: MA Experiment 20000437 PARAMETER Experiment Name: At_Drought_P Parameter: Tissue Value: Whole Plant
  misc_feature: MA Experiment 20000437 PARAMETER Experiment Name: At_Drought_P Parameter: Treatment Value: Drought vs. No Drought
  misc_feature: MA Experiment ID: 20000438 Result: Down-regulated in Transcription
  misc_feature: MA Experiment 20000438 PARAMETER Experiment Name: At_Shoots__P Parameter: Age (day) Value: 14
  misc_feature: MA Experiment 20000438 PARAMETER Experiment Name: At_Shoots__P Parameter: Tissue Value: Shoots vs. Whole Plant
  misc_feature: MA Experiment ID: 20000794 Result: Down-regulated in Transcription
  misc_feature: MA Experiment 20000794 PARAMETER Experiment Name: At_Petals_P Parameter: Age (day) Value: 23-25 days
  misc_feature: MA Experiment 20000794 PARAMETER Experiment Name: At_Petals_P Parameter: Plant Line Value: WS
  misc_feature: MA Experiment 20000794 PARAMETER Experiment Name: At_Petals_P Parameter: Tissue Value: Petals vs. Whole plant
  misc_feature: MA Experiment ID: 20001248 Result: Up-regulated in Transcription
  misc_feature: MA Experiment 20001248 PARAMETER Experiment Name: At_Far-red-induction_P Parameter: Age (day) Value: 7
  misc_feature: MA Experiment 20001248 PARAMETER Experiment Name: At_Far-red-induction_P Parameter: Light Value: Far-red vs. White
  misc_feature: MA Experiment 20001248 PARAMETER Experiment Name: At_Far-red-induction_P Parameter: Organism Value: A. thaliana
  misc_feature: MA Experiment 20001248 PARAMETER Experiment Name: At_Far-red-induction_P Parameter: Plant Line Value: Columbia
  misc_feature: MA Experiment 20001248 PARAMETER Experiment Name: At_Far-red-induction_P Parameter: Timepoint (hr) Value: 4
  misc_feature: MA Experiment 20001248 PARAMETER Experiment Name: At_Far-red-induction_P Parameter: Tissue Value: Whole Plant
  misc_feature: MA Experiment ID: 20001450 Result: Up-regulated in Transcription
  misc_feature: MA Experiment 20001450 PARAMETER Experiment Name: At_Far-red-induction_P Parameter: Age (day) Value: 7
  misc_feature: MA Experiment 20001450 PARAMETER Experiment Name: At_Far-red-induction_P Parameter: Light Value: Far-red vs. White
  misc_feature: MA Experiment 20001450 PARAMETER Experiment Name: At_Far-red-induction_P Parameter: Organism Value: A. thaliana
  misc_feature: MA Experiment 20001450 PARAMETER Experiment Name: At_Far-red-induction_P Parameter: Plant Line Value: Columbia
  misc_feature: MA Experiment 20001450 PARAMETER Experiment Name: At_Far-red-induction_P Parameter: Timepoint (hr) Value: 8
  misc_feature: MA Experiment 20001450 PARAMETER Experiment Name: At_Far-red-induction_P Parameter: Tissue Value: Whole Plant
  misc_feature: MA Experiment ID: 20001451 Result: Up-regulated in Transcription
  misc_feature: MA Experiment 20001451 PARAMETER Experiment Name: At_Far-red-induction_P Parameter: Age (day) Value: 7
  misc_feature: MA Experiment 20001451 PARAMETER Experiment Name: At_Far-red-induction_P Parameter: Light Value: Far-red vs. White
  misc_feature: MA Experiment 20001451 PARAMETER Experiment Name: At_Far-red-induction_P Parameter: Organism Value: A. thaliana
  misc_feature: MA Experiment 20001451 PARAMETER Experiment Name: At_Far-red-induction_P Parameter: Plant Line Value: Columbia
  misc_feature: MA Experiment 20001451 PARAMETER Experiment Name: At_Far-red-induction_P Parameter: Timepoint (hr) Value: 24
  misc_feature: MA Experiment 20001451 PARAMETER Experiment Name: At_Far-red-induction_P Parameter: Tissue Value: Whole Plant
  misc_feature: MA Experiment ID: 20001557 Result: Down-regulated in Transcription
  misc_feature: MA Experiment 20001557 PARAMETER Experiment Name: At_Drought_Soil_Dry_P Parameter: Age (day) Value: 27
  misc_feature: MA Experiment 20001557 PARAMETER Experiment Name: At_Drought_Soil_Dry_P Parameter: Organism Value: A. thaliana
  misc_feature: MA Experiment 20001557 PARAMETER Experiment Name: At_Drought_Soil_Dry_P Parameter: Plant Line Value: WS
  misc_feature: MA Experiment 20001557 PARAMETER Experiment Name: At_Drought_Soil_Dry_P Parameter: Post Timepoint (hr) Value: 3
  misc_feature: MA Experiment 20001557 PARAMETER Experiment Name: At_Drought_Soil_Dry_P Parameter: Post-Treatment Value: Re-Water vs. No Drought
  misc_feature: MA Experiment 20001557 PARAMETER Experiment Name: At_Drought_Soil_Dry_P Parameter: Timepoint (day) Value: 13
  misc_feature: MA Experiment 20001557 PARAMETER Experiment Name: At_Drought_Soil_Dry_P Parameter: Treatment Value: Drought vs. No Drought
  misc_feature: MA Experiment ID: 20001558 Result: Down-regulated in Transcription
  misc_feature: MA Experiment 20001558 PARAMETER Experiment Name: At_Drought_Soil_Dry_P Parameter: Age (day) Value: 27
  misc_feature: MA Experiment 20001558 PARAMETER Experiment Name: At_Drought_Soil_Dry_P Parameter: Organism Value: A. thaliana
  misc_feature: MA Experiment 20001558 PARAMETER Experiment Name: At_Drought_Soil_Dry_P Parameter: Plant Line Value: WS
  misc_feature: MA Experiment 20001558 PARAMETER Experiment Name: At_Drought_Soil_Dry_P Parameter: Post Timepoint (hr) Value: 6
  misc_feature: MA Experiment 20001558 PARAMETER Experiment Name: At_Drought_Soil_Dry_P Parameter: Post-Treatment Value: Re-Water vs. No Drought
  misc_feature: MA Experiment 20001558 PARAMETER Experiment Name: At_Drought_Soil_Dry_P Parameter: Timepoint (day) Value: 13
  misc_feature: MA Experiment 20001558 PARAMETER Experiment Name: At_Drought_Soil_Dry_P Parameter: Treatment Value: Drought vs. No Drought
atttctcaactcttgtgataaagtcttcaccttggtcgctgattttcctcctctctctcacaactatcaccaacaagaatcatgacgagctctgttagagagaagaagatcaagaccaacgggatttggttaaacgttgctgagaaaggagacgaagaagggcctttggttctgttactccatggtttccctgagacatggtactcttggcgtcaccagatcgatttcttgtctagccatggttaccacgtggtcgctccagatctcagaggctacggtgactccgattctctaccgagccacgagtcttacactgtgagtcacctagtcgctgatgtcatcggtttactcgatcactacggcactactcaggcttttgtggctgggcatgactggggagcaatcataggttggtgtctatgcttgtttagaccagaccgagtcaaaggtttcataagtctctctgttccatatttcccaagagatccaaaactcaaaccttcagattttttcaaaatttttggagatggtttatacatcactcagtttcaggtaaaacccaaatttactttcaagatttatgatgttagtgttactattatggtactcattgttgtcgttgattcgatttctcggttctgttttttacaagaaacccggaagagctgaggctgcatttgccaagcatgattgtttatcggtaatgaagaagttcttgctaataacaagaacagactacttagtggctcctcctgacacagagatcatagatcatcttgagataccgtcgacgattccagattggataacagaagaagagattcaagtgtatgcggaaaagtttcaaagatctggattcactggccctttgaattactacagatccatggatatgaattgggagatattggcgccgtggcaagactccaaaatcgtcgttcctactaagtttatagcgggagacaaagatatcggatatgaaggacctaatggaacaatggagtatgtgaaaggagaggtgttcaagattgttgtgcctaatcttgagatagttgttattgaaggtggtcatcattttatccagcaggagaagtctgaacaagtctctcaagagattctctctttcttaaacaagttaagcaaaacagagtaaaatcataccgttctctgtggccttatagaagaaccatgatgctctagtcttaattaaactactaataatgtgtattcaagaacgaaacccgagtgtgatctcggcaataataatggttcttaaag

SEQ ID NO: 74390 - protein, 195 aa, Arabidopsis thaliana; identical to SEQ ID NO: 24354
  peptide (1)..(195): Ceres Seq. ID no. 5671626
  misc_feature (55)..(160): Pfam Name: alpha/beta hydrolase fold Pfam Description: alpha/beta hydrolase fold
  misc_feature (1)..(160): Homolog of NCBI NO: 15230367 NR Description: epoxide hydrolase-like protein; protein id: supported by cDNA: gi_13937212, supported by cDNA: gi_18491128
  misc_feature (3)..(160): Homolog of NCBI NO: 34902880 NR Description: unnamed protein product [Oryza sativa (japonica group)] >gi|5922625|dbj|BAA84626.1| unnamed protein product

SEQ ID NO: 74391 - protein, 190 aa, Arabidopsis thaliana
  peptide (1)..(190): Ceres Seq. ID no. 5671627
  misc_feature (23)..(190): Homolog of NCBI NO: 15230367 NR Description: epoxide hydrolase-like protein; protein id: supported by cDNA: gi_13937212, supported by cDNA: gi_18491128
  misc_feature (22)..(185): Homolog of NCBI NO: 34902880 NR Description: unnamed protein product [Oryza sativa (japonica group)] >gi|5922625|dbj|BAA84626.1| unnamed protein product
MMLVLLLWYSLLSLIRFLGSVFYKKPGRAEAAFAKHDCLSVMKKFLLITRTDYLVAPPDTEIIDHLEIPSTIPDWITEEEIQVYAEKFQRSGFTGPLNYYRSMDMNWEILAPWQDSKIVVPTKFIAGDKDIGYEGPNGTMEYVKGEVFKIVVPNLEIVVIEGGHHFIQQEKSEQVSQEILSFLNKLSKTE

SEQ ID NO: 74392 - protein, 189 aa, Arabidopsis thaliana
  peptide (1)..(189): Ceres Seq. ID no. 5671628
  misc_feature (22)..(189): Homolog of NCBI NO: 15230367 NR Description: epoxide hydrolase-like protein; protein id: supported by cDNA: gi_13937212, supported by cDNA: gi_18491128
  misc_feature (21)..(184): Homolog of NCBI NO: 34902880 NR Description: unnamed protein product [Oryza sativa (japonica group)] >gi|5922625|dbj|BAA84626.1| unnamed protein product
MLVLLLWYSLLSLIRFLGSVFYKKPGRAEAAFAKHDCLSVMKKFLLITRTDYLVAPPDTEIIDHLEIPSTIPDWITEEEIQVYAEKFQRSGFTGPLNYYRSMDMNWEILAPWQDSKIVVPTKFIAGDKDIGYEGPNGTMEYVKGEVFKIVVPNLEIVVIEGGHHFIQQEKSEQVSQEILSFLNKLSKTE

SEQ ID NO: 74393 - DNA, 603 bp, Arabidopsis thaliana
  misc_feature (1)..(603): Ceres Seq. ID no. 5671868
  misc_feature: MA Experiment ID: 108489 Result: Down-regulated in Transcription
  misc_feature: MA Experiment ID: 108576 Result: Up-regulated in Transcription
  misc_feature: MA Experiment 108576 PARAMETER Experiment Name: At_42deg_Heat_cDNA_P Parameter: Temperature (deg C) Value: 42 vs. 22
  misc_feature: MA Experiment 108576 PARAMETER Experiment Name: At_42deg_Heat_cDNA_P Parameter: Timepoint (hr) Value: 1
  misc_feature: MA Experiment 108576 PARAMETER Experiment Name: At_42deg_Heat_cDNA_P Parameter: Tissue Value: Aerial
  misc_feature: MA Experiment ID: 20000264 Result: Up-regulated in Transcription
  misc_feature: MA Experiment 20000264 PARAMETER Experiment Name: At_Open_Flower_P Parameter: Age (day) Value: 21
  misc_feature: MA Experiment 20000264 PARAMETER Experiment Name: At_Open_Flower_P Parameter: Plant Line Value: WS
  misc_feature: MA Experiment 20000264 PARAMETER Experiment Name: At_Open_Flower_P Parameter: Tissue Value: Open Flower vs. Whole Plant
  misc_feature: MA Experiment ID: 20000438 Result: Down-regulated in Transcription
  misc_feature: MA Experiment 20000438 PARAMETER Experiment Name: At_Shoots__P Parameter: Age (day) Value: 14
  misc_feature: MA Experiment 20000438 PARAMETER Experiment Name: At_Shoots__P Parameter: Tissue Value: Shoots vs. Whole Plant
  misc_feature: MA Experiment ID: 20000440 Result: Up-regulated in Transcription
  misc_feature: MA Experiment 20000440 PARAMETER Experiment Name: At_Closed-Flower__Sub_P Parameter: Tissue Value: Closed Flower vs. Whole Plant
  misc_feature: MA Experiment ID: 20000794 Result: Up-regulated in Transcription
  misc_feature: MA Experiment 20000794 PARAMETER Experiment Name: At_Petals_P Parameter: Age (day) Value: 23-25 days
  misc_feature: MA Experiment 20000794 PARAMETER Experiment Name: At_Petals_P Parameter: Plant Line Value: WS
  misc_feature: MA Experiment 20000794 PARAMETER Experiment Name: At_Petals_P Parameter: Tissue Value: Petals vs. Whole plant
  misc_feature: MA Experiment ID: 20001757 Result: Down-regulated in Transcription
  misc_feature: MA Experiment 20001757 PARAMETER Experiment Name: At_50mM_NH4NO3_L-to-H_P Parameter: Timepoint (hr) Value: 6
  misc_feature: MA Experiment 20001757 PARAMETER Experiment Name: At_50mM_NH4NO3_L-to-H_P Parameter: Tissue Value: Leaf
  misc_feature: MA Experiment 20001757 PARAMETER Experiment Name: At_50mM_NH4NO3_L-to-H_P Parameter: Treatment Value: 50mM NH4NO3 vs 100mM Mannitol
  misc_feature: MA Experiment ID: 20001911 Result: Down-regulated in Transcription
  misc_feature: MA Experiment 20001911 PARAMETER Experiment Name: At_Drought_Reproduction_P Parameter: Age (day) Value: 40
  misc_feature: MA Experiment 20001911 PARAMETER Experiment Name: At_Drought_Reproduction_P Parameter: Organism Value: A. thaliana
  misc_feature: MA Experiment 20001911 PARAMETER Experiment Name: At_Drought_Reproduction_P Parameter: Plant Line Value: WS
  misc_feature: MA Experiment 20001911 PARAMETER Experiment Name: At_Drought_Reproduction_P Parameter: Timepoint (day) Value: 10
  misc_feature: MA Experiment 20001911 PARAMETER Experiment Name: At_Drought_Reproduction_P Parameter: Tissue Value: Flowers
  misc_feature: MA Experiment 20001911 PARAMETER Experiment Name: At_Drought_Reproduction_P Parameter: Treatment Value: Drought vs. No Drought
aaagattgtgaagatatatcatggagagagtgtgttgcatgtgcggtgatgtcggtttctccgacaagctcttcagctgcggtcactgccgctgccgcttccaacactcttattgtagcaactactacggccagtttgcggagcctaccgagatttgcgactggtgccgcagcgacgaccggaagctgagcaacgttgctagacatggcggttcttcttcaaagaagccttcttcttcggttaaatatgaaaatgacttctcaaacagatcggaatattcgcccggccaccggatcaagcataacaataaccgtcacgatcaagtagccaagggcgttgctggagatggaggcggagttacgtcgcctaagacggccacacgaaggtacaagcttctcaaagatgtcatgtgttagttccacctaaacgagaggtattagaagacttactataatcatactactctttcgagactgtgtgattaaattatgtataattagactacggagagagcaaattaaaaaagaaaacgtcgttgtttgttttcatccttttttcctttttactttgtgtttatatatatgaaatgaatgtgtgtttggc

SEQ ID NO: 74394 - protein, 131 aa, Arabidopsis thaliana; identical to SEQ ID NO: 26079
  peptide (1)..(131): Ceres Seq. ID no. 5671869
  misc_feature (1)..(131): Homolog of NCBI NO: 18378917 NR Description: hypothetical protein predicted by genefinder;
  misc_feature (7)..(131): Homolog of NCBI NO: 21553800 NR Description: unknown [Arabidopsis thaliana]
  misc_feature (3)..(131): Homolog of NCBI NO: 15232353 NR Description: putative protein; protein id: At3g60520.1, by cDNA: 21518. [Arabidopsis thaliana] >gi|11281195|pir||T47863
  misc_feature (7)..(131): Homolog of NCBI NO: 21554245 NR Description: unknown [Arabidopsis thaliana]
  misc_feature (4)..(131): Homolog of NCBI NO: 38345466 NR Description: OSJNBa0010H02.4 [Oryza sativa (japonica
  misc_feature (4)..(131): Homolog of NCBI NO: 21742342 NR Description: OSJNBb0034G17.21 [Oryza sativa (japonica
  misc_feature (4)..(49): Homolog of NCBI NO: 21740708 NR Description: OSJNBa0086B14.1 [Oryza sativa (japonica

SEQ ID NO: 74395 - protein, 125 aa, Arabidopsis thaliana; identical to SEQ ID NO: 26080
  peptide (1)..(125): Ceres Seq. ID no. 5671870
  misc_feature (1)..(125): Homolog of NCBI NO: 18378917 NR Description: hypothetical protein predicted by genefinder;
  misc_feature (1)..(125): Homolog of NCBI NO: 21553800 NR Description: unknown [Arabidopsis thaliana]
  misc_feature (1)..(125): Homolog of NCBI NO: 15232353 NR Description: putative protein; protein id: At3g60520.1, by cDNA: 21518. [Arabidopsis thaliana] >gi|11281195|pir||T47863
  misc_feature (1)..(125): Homolog of NCBI NO: 21554245 NR Description: unknown [Arabidopsis thaliana]
  misc_feature (1)..(125): Homolog of NCBI NO: 38345466 NR Description: OSJNBa0010H02.4 [Oryza sativa (japonica
  misc_feature (1)..(125): Homolog of NCBI NO: 21742342 NR Description: OSJNBb0034G17.21 [Oryza sativa (japonica
  misc_feature (1)..(43): Homolog of NCBI NO: 21740708 NR Description: OSJNBa0086B14.1 [Oryza sativa (japonica

SEQ ID NO: 74396 - DNA, 1026 bp, Arabidopsis thaliana
  misc_feature (1)..(1026): Ceres Seq. ID no. 5671951
  misc_feature: MA Experiment ID: 108595 Result: Up-regulated in Transcription
  misc_feature: MA Experiment 108595 PARAMETER Experiment Name: At_Ler-pi_Ovule_cDNA_P Parameter: Plant Line Value: null
atggcttcttgcgtcaccggaacagaggcagcaatcagagcagcggcatgtagagacggcgaagaagcctctcatctaaagatagtcgccgtcttcgccatctttctcacaagcgttttcggagtttggggaccagttttactcgctaaatactttcatggtaaacctctgtacgataaagcaattcttgtgataaagtgtttcgccgccggcgtgattctctcgacgtctttagtccacgttttaccggaagcgtttgagtcactcgctgattgccaagtgtcgtcacgtcatccatggaaagattttccgtttgctggtttagttacgatgatcggagctataacggctttgttggttgatttaacggcgagtgaacatatgggacacggtggtggtggtggtggtgacggagggatggagtatatgccggtgggtaaggcggttggagggttagaaatgaaagaaggaaagtgtggggctgatttggaaatacaagaaaatagtgaggaggaaattgtgaagatgaaacaaagattagtgtcacaagttcttgaaatagggattatatttcattcggtgataattggagtaacaatgggaatgtcacaaaataagtgtaccattagacctttgattgctgcgctttcttttcatcagatttttgaaggtttgggtcttggtggttgcattgctcaggctgggtttaaggcagggacagtggtgtatatgtgcttaatgttcgcggtaacaacgccactcgggattgtactagggatggtgatatttgcagcgaccgggtacgatgatcagaacccgaacgcattgataatggagggtttattgggatcattctcttcaggtattctaatatacatggccttggttgacctaattgcattggatttcttccataacaagatgctgacgacttgcggtgaatcgggttctcgcctcaagaagctttgttttgtggctttggttttaggttctgcctctatgtcactacttgctctttgggcttag

SEQ ID NO: 74397 - protein, 341 aa, Arabidopsis thaliana
  peptide (1)..(341): Ceres Seq. ID no. 5671952
  misc_feature (24)..(338): Pfam Name: ZIP Zinc transporter Pfam Description: ZIP Zinc transporter
  misc_feature (1)..(341): Homolog of NCBI NO: 15227702 NR Description: putative Fe(II) transport protein; protein id: [Arabidopsis thaliana] >gi|7487926|pir||T02478 iron transport
  misc_feature (1)..(341): Homolog of NCBI NO: 40782197 NR Description: zinc transporter ZIP6 [Arabidopsis halleri subsp.
  misc_feature (170)..(341): Homolog of NCBI NO: 40888872 NR Description: TPA: putative ZIP-like protein [Oryza sativa
  misc_feature (127)..(341): Homolog of NCBI NO: 32816615 NR Description: putative zinc transporter [Oryza sativa (japonica
  misc_feature (14)..(125): Homolog of NCBI NO: 32816615 NR Description: putative zinc transporter [Oryza sativa (japonica
  misc_feature (127)..(341): Homolog of NCBI NO: 40888854 NR Description: TPA: putative ZIP-like protein [Oryza sativa
  misc_feature (14)..(125): Homolog of NCBI NO: 40888854 NR Description: TPA: putative ZIP-like protein [Oryza sativa
  misc_feature (16)..(341): Homolog of NCBI NO: 7488829 NR Description: probable Fe(II) transport protein, root - garden >gi|3153889|gb|AAC17441.1| root iron transporter protein [Pisum
  misc_feature (1)..(341): Homolog of NCBI NO: 30841912 NR Description: putative zinc transporter OsZIP2 [Oryza sativa]
  misc_feature (14)..(341): Homolog of NCBI NO: 32966053 NR Description: iron transporter Fe2 [Oryza sativa (japonica
MASCVTGTEAAIRAAACRDGEEASHLKIVAVFAIFLTSVFGVWGPVLLAKYFHGKPLYDKAILVIKCFAAGVILSTSLVHVLPEAFESLADCQVSSRHPWKDFPFAGLVTMIGAITALLVDLTASEHMGHGGGGGGDGGMEYMPVGKAVGGLEMKEGKCGADLEIQENSEEEIVKMKQRLVSQVLEIGIIFHSVIIGVTMGMSQNKCTIRPLIAALSFHQIFEGLGLGGCIAQAGFKAGTVVYMCLMFAVTTPLGIVLGMVIFAATGYDDQNPNALIMEGLLGSFSSGILIYMALVDLIALDFFHNKMLTTCGESGSRLKKLCFVALVLGSASMSLLALWA

SEQ ID NO: 74398 - protein, 231 aa, Arabidopsis thaliana; identical to SEQ ID NO: 26937
  peptide (1)..(231): Ceres Seq. ID no. 5671953
  misc_feature (1)..(228): Pfam Name: ZIP Zinc transporter Pfam Description: ZIP Zinc transporter
  misc_feature (1)..(231): Homolog of NCBI NO: 15227702 NR Description: putative Fe(II) transport protein; protein id: [Arabidopsis thaliana] >gi|7487926|pir||T02478 iron transport
  misc_feature (1)..(231): Homolog of NCBI NO: 40782197 NR Description: zinc transporter ZIP6 [Arabidopsis halleri subsp.
  misc_feature (60)..(231): Homolog of NCBI NO: 40888872 NR Description: TPA: putative ZIP-like protein [Oryza sativa
  misc_feature (17)..(231): Homolog of NCBI NO: 32816615 NR Description: putative zinc transporter [Oryza sativa (japonica
  misc_feature (1)..(15): Homolog of NCBI NO: 32816615 NR Description: putative zinc transporter [Oryza sativa (japonica
  misc_feature (17)..(231): Homolog of NCBI NO: 40888854 NR Description: TPA: putative ZIP-like protein [Oryza sativa
  misc_feature (1)..(15): Homolog of NCBI NO: 40888854 NR Description: TPA: putative ZIP-like protein [Oryza sativa
  misc_feature (1)..(231): Homolog of NCBI NO: 7488829 NR Description: probable Fe(II) transport protein, root - garden >gi|3153889|gb|AAC17441.1| root iron transporter protein [Pisum
  misc_feature (1)..(231): Homolog of NCBI NO: 30841912 NR Description: putative zinc transporter OsZIP2 [Oryza sativa]
  misc_feature (1)..(231): Homolog of NCBI NO: 32966053 NR Description: iron transporter Fe2 [Oryza sativa (japonica

SEQ ID NO: 74399 - protein, 214 aa, Arabidopsis thaliana; identical to SEQ ID NO: 26938
  peptide (1)..(214): Ceres Seq. ID no. 5671954
  misc_feature (1)..(211): Pfam Name: ZIP Zinc transporter Pfam Description: ZIP Zinc transporter
  misc_feature (1)..(214): Homolog of NCBI NO: 15227702 NR Description: putative Fe(II) transport protein; protein id: [Arabidopsis thaliana] >gi|7487926|pir||T02478 iron transport
  misc_feature (1)..(214): Homolog of NCBI NO: 40782197 NR Description: zinc transporter ZIP6 [Arabidopsis halleri subsp.
  misc_feature (43)..(214): Homolog of NCBI NO: 40888872 NR Description: TPA: putative ZIP-like protein [Oryza sativa
  misc_feature (1)..(214): Homolog of NCBI NO: 32816615 NR Description: putative zinc transporter [Oryza sativa (japonica
  misc_feature (1)..(214): Homolog of NCBI NO: 40888854 NR Description: TPA: putative ZIP-like protein [Oryza sativa
  misc_feature (1)..(214): Homolog of NCBI NO: 7488829 NR Description: probable Fe(II) transport protein, root - garden >gi|3153889|gb|AAC17441.1| root iron transporter protein [Pisum
  misc_feature (1)..(214): Homolog of NCBI NO: 30841912 NR Description: putative zinc transporter OsZIP2 [Oryza sativa]
  misc_feature (1)..(214): Homolog of NCBI NO: 32966053 NR Description: iron transporter Fe2 [Oryza sativa (japonica
  misc_feature (1)..(214): Homolog of NCBI NO: 34900456 NR Description: putative zinc transporter protein ZIP1 [Oryza

SEQ ID NO: 74400 - DNA, 1469 bp, Arabidopsis thaliana
  misc_feature (1)..(1469): Ceres Seq. ID no. 5672262
  misc_feature: MA Experiment ID: 108434 Result: Up-regulated in Transcription
  misc_feature: MA Experiment 108434 PARAMETER Experiment Name: At_Root_Tips_cDNA_P Parameter: Tissue Value: Root Tips
  misc_feature: MA Experiment ID: 108464 Result: Up-regulated in Transcription
  misc_feature: MA Experiment 108464 PARAMETER Experiment Name: At_Germinating_Seeds_cDNA_P Parameter: Age (day) Value: 4 vs. 0
  misc_feature: MA Experiment 108464 PARAMETER Experiment Name: At_Germinating_Seeds_cDNA_P Parameter: Tissue Value: Germinating Seeds
  misc_feature: MA Experiment ID: 108608 Result: Up-regulated in Transcription
  misc_feature: MA Experiment 108608 PARAMETER Experiment Name: At_100uM_ABA_cDNA_P Parameter: Timepoint (hr) Value: 1
  misc_feature: MA Experiment 108608 PARAMETER Experiment Name: At_100uM_ABA_cDNA_P Parameter: Tissue Value: Aerial
  misc_feature: MA Experiment 108608 PARAMETER Experiment Name: At_100uM_ABA_cDNA_P Parameter: Treatment Value: 100uM ABA vs. No Treatment
  misc_feature: MA Experiment ID: 20000180 Result: Up-regulated in Transcription
  misc_feature: MA Experiment 20000180 PARAMETER Experiment Name: At_Germinating_Seeds_P Parameter: Age (hr) Value: 24 vs. 0
  misc_feature: MA Experiment 20000180 PARAMETER Experiment Name: At_Germinating_Seeds_P Parameter: Tissue Value: Germinating Seeds
  misc_feature: MA Experiment ID: 20000495 Result: Up-regulated in Transcription
  misc_feature: MA Experiment 20000495 PARAMETER Experiment Name: At_Guard_Cells_P Parameter: Harvest Date Value: 8/2/2002
  misc_feature: MA Experiment 20000495 PARAMETER Experiment Name: At_Guard_Cells_P Parameter: Organism Value: A. thaliana
  misc_feature: MA Experiment 20000495 PARAMETER Experiment Name: At_Guard_Cells_P Parameter: Tissue Value: Guard Cells vs. Leaves
atactcttcagaaaagtcaataccgtgaaaaagaggagactcctgactcctcagtcattgcaatgtcttcttcttcttcttgcttgttcttcactttcattctcttactcagtctcttctcctcctatgcttctccatcgaattcgacatccgaaactgtgcctctccggcctcaaagagagattcagaagatgaaactcatcagaaaacaactccaaaagattaataaaccagccatcaagaccattcatagctcagatggagatacgatagattgtgttccatctcatcaccagcctgcttttgatcatcctttgttacagggacaacgaccaatggatccaccggagatgcctatagggtatagccaagaaaatgaatcccacgaaaatttccagctttggagtttatacggtgagtcttgcccggaaggtacgattccgatcagaagaacaacggagcaagacatgttaagagcaaattctgtccgtagatttggtcggaaaatcaggcgcgtgagaagggattcgagcagtaatggccacgagcatgcggttggatacgtatcgggaagtcaatactacggagcaaaagcaagtataaacgtgtggacgccacgtgtcataagccaatacgagtttagtctatctcagatttggatcatcgccggttctttcgccggcgatcttaataccatcgaagctggttggcagattagcccggagctatacggagacactaacccaagattcttcacctattggacgtcggatgcttaccaagcaacaggatgctataacctactatgttctggttttgttcaaacaaacaatcgaatcgcaattggagcggcgatttcgcccgtttcgtcgtataaaggtggacaattcgatataagcttattgatatggaaggacccaaagcatggacattggtggctccaattcgggtcgggtacactagtcggatattggcccgtatctctgttcacacacctgagggagcatggaaacatggtccagtttggtggcgagatcgtgaacacacgacctggtggttcacatacttcgactcaaatgggcagtggccattttgccggtgaaggttttggaaaagcgtcttactttaggaatcttcaaatggtagattgggacaatactcttattccgatatctaatcttaaagttcttgcagatcatcctaattgttatgatataagaggaggggtaaaccgtgtttggggtaactttttttattacggaggaccgggtaaaaactcgaaatgtccatagagaaaaaaaagaagtggatagtgttgttttgagcttaagtaaatgagattttttgggatttagagctcaggacaatgatgaaagatccatagtttttttttttgtttgtaagaaaagaaatgtatcgattgattgatatgttatcaaatgtgtaaatgtagaatatggtgttaagtg

SEQ ID NO: 74401 - protein, 429 aa, Arabidopsis thaliana
  peptide (1)..(429): Ceres Seq. ID no. 5672263
  misc_feature (193)..(387): Pfam Name: Arabidopsis proteins of unknown function Pfam Description: Arabidopsis proteins of unknown function
  misc_feature (21)..(429): Homolog of NCBI NO: 30688348 NR Description: expressed protein [Arabidopsis thaliana] unknown protein [Arabidopsis thaliana]
  misc_feature (21)..(429): Homolog of NCBI NO: 25345695 NR Description: protein F26F24.22 [imported] - Arabidopsis >gi|9295704|gb|AAF87010.1|AC005292_19 F26F24.22 [Arabidopsis
  misc_feature (22)..(429): Homolog of NCBI NO: 25345697 NR Description: unknown protein F5A18.27 [imported] - Arabidopsis
  misc_feature (22)..(429): Homolog of NCBI NO: 30698726 NR Description: expressed protein [Arabidopsis thaliana]
  misc_feature (22)..(429): Homolog of NCBI NO: 28416687 NR Description: At1g70550 [Arabidopsis thaliana]
  misc_feature (9)..(429): Homolog of NCBI NO: 21389708 NR Description: putative carboxyl-terminal proteinase [Gossypium
  misc_feature (3)..(429): Homolog of NCBI NO: 15220207 NR Description: putative carboxyl-terminal peptidase; protein id:
  misc_feature (138)..(429): Homolog of NCBI NO: 6573746 NR Description: F20B24.18 [Arabidopsis thaliana]
  misc_feature (3)..(126): Homolog of NCBI NO: 6573746 NR Description: F20B24.18 [Arabidopsis thaliana]
  misc_feature (16)..(429): Homolog of NCBI NO: 15240622 NR Description: putative protein; protein id: At5g50150.1, by cDNA: gi_15529144, supported by cDNA: gi_17386117 [Arabidopsis >gi|15529145|gb|AAK97667.1| AT5g50150/MPF21_17 [Arabidopsis
TLQKSQYREKEETPDSSVIAMSSSSSCLFFTFILLLSLFSSYASPSNSTSETVPLRPQREIQKMKLIRKQLQKINKPAIKTIHSSDGDTIDCVPSHHQPAFDHPLLQGQRPMDPPEMPIGYSQENESHENFQLWSLYGESCPEGTIPIRRTTEQDMLRANSVRRFGRKIRRVRRDSSSNGHEHAVGYVSGSQYYGAKASINVWTPRVISQYEFSLSQIWIIAGSFAGDLNTIEAGWQISPELYGDTNPRFFTYWTSDAYQATGCYNLLCSGFVQTNNRIAIGAAISPVSSYKGGQFDISLLIWKDPKHGHWWLQFGSGTLVGYWPVSLFTHLREHGNMVQFGGEIVNTRPGGSHTSTQMGSGHFAGEGFGKASYFRNLQMVDWDNTLIPISNLKVLADHPNCYDIRGGVNRVWGNFFYYGGPGKNSKCP

SEQ ID NO: 74402 - protein, 409 aa, Arabidopsis thaliana; identical to SEQ ID NO: 31099
  peptide (1)..(409): Ceres Seq. ID no. 5672264
  misc_feature (173)..(367): Pfam Name: Arabidopsis proteins of unknown function Pfam Description: Arabidopsis proteins of unknown function
  misc_feature (1)..(409): Homolog of NCBI NO: 30688348 NR Description: expressed protein [Arabidopsis thaliana] unknown protein [Arabidopsis thaliana]
  misc_feature (1)..(409): Homolog of NCBI NO: 25345695 NR Description: protein F26F24.22 [imported] - Arabidopsis >gi|9295704|gb|AAF87010.1|AC005292_19 F26F24.22 [Arabidopsis
  misc_feature (2)..(409): Homolog of NCBI NO: 25345697 NR Description: unknown protein F5A18.27 [imported] - Arabidopsis
  misc_feature (2)..(409): Homolog of NCBI NO: 30698726 NR Description: expressed protein [Arabidopsis thaliana]
  misc_feature (2)..(409): Homolog of NCBI NO: 28416687 NR Description: At1g70550 [Arabidopsis thaliana]
  misc_feature (1)..(409): Homolog of NCBI NO: 21389708 NR Description: putative carboxyl-terminal proteinase [Gossypium
  misc_feature (1)..(409): Homolog of NCBI NO: 15220207 NR Description: putative carboxyl-terminal peptidase; protein id:
  misc_feature (118)..(409): Homolog of NCBI NO: 6573746 NR Description: F20B24.18 [Arabidopsis thaliana]
  misc_feature (1)..(106): Homolog of NCBI NO: 6573746 NR Description: F20B24.18 [Arabidopsis thaliana]
  misc_feature (1)..(409): Homolog of NCBI NO: 15240622 NR Description: putative protein; protein id: At5g50150.1, by cDNA: gi_15529144, supported by cDNA: gi_17386117 [Arabidopsis >gi|15529145|gb|AAK97667.1| AT5g50150/MPF21_17 [Arabidopsis

SEQ ID NO: 74403 - protein, 366 aa, Arabidopsis thaliana; identical to SEQ ID NO: 31100
  peptide (1)..(366): Ceres Seq. ID no. 5672265
  misc_feature (130)..(324): Pfam Name: Arabidopsis proteins of unknown function Pfam Description: Arabidopsis proteins of unknown function
  misc_feature (1)..(366): Homolog of NCBI NO: 30688348 NR Description: expressed protein [Arabidopsis thaliana] unknown protein [Arabidopsis thaliana]
  misc_feature (1)..(366): Homolog of NCBI NO: 25345695 NR Description: protein F26F24.22 [imported] - Arabidopsis >gi|9295704|gb|AAF87010.1|AC005292_19 F26F24.22 [Arabidopsis
  misc_feature (1)..(366): Homolog of NCBI NO: 25345697 NR Description: unknown protein F5A18.27 [imported] - Arabidopsis
  misc_feature (1)..(366): Homolog of NCBI NO: 30698726 NR Description: expressed protein [Arabidopsis thaliana]
  misc_feature (1)..(366): Homolog of NCBI NO: 28416687 NR Description: At1g70550 [Arabidopsis thaliana]
  misc_feature (1)..(366): Homolog of NCBI NO: 21389708 NR Description: putative carboxyl-terminal proteinase [Gossypium
  misc_feature (1)..(366): Homolog of NCBI NO: 15220207 NR Description: putative carboxyl-terminal peptidase; protein id:
  misc_feature (75)..(366): Homolog of NCBI NO: 6573746 NR Description: F20B24.18 [Arabidopsis thaliana]
  misc_feature (1)..(63): Homolog of NCBI NO: 6573746 NR Description: F20B24.18 [Arabidopsis thaliana]
  misc_feature (1)..(366): Homolog of NCBI NO: 15240622 NR Description: putative protein; protein id: At5g50150.1, by cDNA: gi_15529144, supported by cDNA: gi_17386117 [Arabidopsis >gi|15529145|gb|AAK97667.1| AT5g50150/MPF21_17 [Arabidopsis

SEQ ID NO: 74404 - DNA, 1187 bp, Arabidopsis thaliana
  misc_feature (1)..(1187): Ceres Seq. ID no. 5672750
  misc_feature: MA Experiment ID: 108461 Result: Up-regulated in Transcription
  misc_feature: MA Experiment 108461 PARAMETER Experiment Name: At_Germinating_Seeds_cDNA_P Parameter: Age (day) Value: 1 vs. 0
  misc_feature: MA Experiment 108461 PARAMETER Experiment Name: At_Germinating_Seeds_cDNA_P Parameter: Tissue Value: Germinating Seeds
  misc_feature: MA Experiment ID: 108462 Result: Up-regulated in Transcription
  misc_feature: MA Experiment 108462 PARAMETER Experiment Name: At_Germinating_Seeds_cDNA_P Parameter: Age (day) Value: 2 vs. 0
  misc_feature: MA Experiment 108462 PARAMETER Experiment Name: At_Germinating_Seeds_cDNA_P Parameter: Tissue Value: Germinating Seeds
  misc_feature: MA Experiment ID: 108464 Result: Up-regulated in Transcription
  misc_feature: MA Experiment 108464 PARAMETER Experiment Name: At_Germinating_Seeds_cDNA_P Parameter: Age (day) Value: 4 vs. 0
  misc_feature: MA Experiment 108464 PARAMETER Experiment Name: At_Germinating_Seeds_cDNA_P Parameter: Tissue Value: Germinating Seeds
  misc_feature: MA Experiment ID: 108474 Result: Down-regulated in Transcription
  misc_feature: MA Experiment 108474 PARAMETER Experiment Name: At_Drought_Flowers_cDNA_P Parameter: Timepoint (hr) Value: null
  misc_feature: MA Experiment 108474 PARAMETER Experiment Name: At_Drought_Flowers_cDNA_P Parameter: Treatment Value: Drought vs. No Drought
  misc_feature: MA Experiment ID: 108501 Result: Up-regulated in Transcription
  misc_feature: MA Experiment 108501 PARAMETER Experiment Name: At_ap2_floral_buds_cDNA_P Parameter: Plant Line Value: ap2 (Ler.)
  misc_feature: MA Experiment 108501 PARAMETER Experiment Name: At_ap2_floral_buds_cDNA_P Parameter: Tissue Value: Closed Flower
  misc_feature: MA Experiment ID: 108561 Result: Down-regulated in Transcription
  misc_feature: MA Experiment 108561 PARAMETER Experiment Name: At_100uM_ABA_cDNA_P Parameter: Timepoint (hr) Value: 6
  misc_feature: MA Experiment 108561 PARAMETER Experiment Name: At_100uM_ABA_cDNA_P Parameter: Tissue Value: Aerial
  misc_feature: MA Experiment 108561 PARAMETER Experiment Name: At_100uM_ABA_cDNA_P Parameter: Treatment Value: 100uM ABA vs. No Treatment
  misc_feature: MA Experiment ID: 108579 Result: Up-regulated in Transcription
  misc_feature: MA Experiment 108579 PARAMETER Experiment Name: At_4deg_Cold_cDNA_P Parameter: Temperature (deg C) Value: 4 vs. 22
  misc_feature: MA Experiment 108579 PARAMETER Experiment Name: At_4deg_Cold_cDNA_P Parameter: Timepoint (hr) Value: 6
  misc_feature: MA Experiment 108579 PARAMETER Experiment Name: At_4deg_Cold_cDNA_P Parameter: Tissue Value: Aerial
  misc_feature: MA Experiment ID: 108594 Result: Down-regulated in Transcription
  misc_feature: MA Experiment 108594 PARAMETER Experiment Name: At_Ler-rhl_Root_cDNA_P Parameter: Plant Line Value: null
  misc_feature: MA Experiment ID: 108595 Result: Up-regulated in Transcription
  misc_feature: MA Experiment 108595 PARAMETER Experiment Name: At_Ler-pi_Ovule_cDNA_P Parameter: Plant Line Value: null
  misc_feature: MA Experiment ID: 20000071 Result: Down-regulated in Transcription
  misc_feature: MA Experiment 20000071 PARAMETER Experiment Name: At_100uM_ABA_Mutants_cDNA_P Parameter: Plant Line Value: CS8104
  misc_feature: MA Experiment 20000071 PARAMETER Experiment Name: At_100uM_ABA_Mutants_cDNA_P Parameter: Timepoint (hr) Value: 6
  misc_feature: MA Experiment 20000071 PARAMETER Experiment Name: At_100uM_ABA_Mutants_cDNA_P Parameter: Tissue Value: Aerial
  misc_feature: MA Experiment 20000071 PARAMETER Experiment Name: At_100uM_ABA_Mutants_cDNA_P Parameter: Treatment Value: 100uM ABA vs. No Treatment
  misc_feature: MA Experiment ID: 20000113 Result: Down-regulated in Transcription
  misc_feature: MA Experiment 20000113 PARAMETER Experiment Name: At_42deg_Heat_cDNA_P Parameter: Temperature (deg C) Value: 42 vs. 22
  misc_feature: MA Experiment 20000113 PARAMETER Experiment Name: At_42deg_Heat_cDNA_P Parameter: Timepoint (hr) Value: 8
  misc_feature: MA Experiment 20000113 PARAMETER Experiment Name: At_42deg_Heat_cDNA_P Parameter: Tissue Value: Aerial
  misc_feature: MA Experiment ID: 20000117 Result: Down-regulated in Transcription
  misc_feature: MA Experiment 20000117 PARAMETER Experiment Name: At_100uM_ABA_Mutants_cDNA_P Parameter: Plant Line Value: Columbia
  misc_feature: MA Experiment 20000117 PARAMETER Experiment Name: At_100uM_ABA_Mutants_cDNA_P Parameter: Timepoint (hr) Value: 6
  misc_feature: MA Experiment 20000117 PARAMETER Experiment Name: At_100uM_ABA_Mutants_cDNA_P Parameter: Tissue Value: Aerial
  misc_feature: MA Experiment 20000117 PARAMETER Experiment Name: At_100uM_ABA_Mutants_cDNA_P Parameter: Treatment Value: 100uM ABA vs. No Treatment
  misc_feature: MA Experiment ID: 20000171 Result: Down-regulated in Transcription
  misc_feature: MA Experiment 20000171 PARAMETER Experiment Name: At_42deg_Heat_P Parameter: Age (day) Value: 14
  misc_feature: MA Experiment 20000171 PARAMETER Experiment Name: At_42deg_Heat_P Parameter: Organism Value: A. thaliana
  misc_feature: MA Experiment 20000171 PARAMETER Experiment Name: At_42deg_Heat_P Parameter: Plant Line Value: WS
  misc_feature: MA Experiment 20000171 PARAMETER Experiment Name: At_42deg_Heat_P Parameter: Temperature (deg C) Value: 42 vs. 22
  misc_feature: MA Experiment 20000171 PARAMETER Experiment Name: At_42deg_Heat_P Parameter: Timepoint (hr) Value: 1
  misc_feature: MA Experiment 20000171 PARAMETER Experiment Name: At_42deg_Heat_P Parameter: Tissue Value: Aerial
  misc_feature: MA Experiment ID: 20000173 Result: Down-regulated in Transcription
  misc_feature: MA Experiment 20000173 PARAMETER Experiment Name: At_42deg_Heat_P Parameter: Age (day) Value: 14
  misc_feature: MA Experiment 20000173 PARAMETER Experiment Name: At_42deg_Heat_P Parameter: Organism Value: A. thaliana
  misc_feature: MA Experiment 20000173 PARAMETER Experiment Name: At_42deg_Heat_P Parameter: Plant Line Value: WS
  misc_feature: MA Experiment 20000173 PARAMETER Experiment Name: At_42deg_Heat_P Parameter: Temperature (deg C) Value: 42 vs. 22
  misc_feature: MA Experiment 20000173 PARAMETER Experiment Name: At_42deg_Heat_P Parameter: Timepoint (hr) Value: 6
  misc_feature: MA Experiment 20000173 PARAMETER Experiment Name: At_42deg_Heat_P Parameter: Tissue Value: Aerial
  misc_feature: MA Experiment ID: 20000184 Result: Down-regulated in Transcription
  misc_feature: MA Experiment 20000184 PARAMETER Experiment Name: At_Shoots__P Parameter: Age (day) Value: 7
  misc_feature: MA Experiment 20000184 PARAMETER Experiment Name: At_Shoots__P Parameter: Tissue Value: Shoots vs. Whole Plant
  misc_feature: MA Experiment ID: 20000185 Result: Up-regulated in Transcription
  misc_feature: MA Experiment 20000185 PARAMETER Experiment Name: At_Roots__P Parameter: Age (day) Value: 7 vs. 21
  misc_feature: MA Experiment 20000185 PARAMETER Experiment Name: At_Roots__P Parameter: Organism Value: A. thaliana
  misc_feature: MA Experiment 20000185 PARAMETER Experiment Name: At_Roots__P Parameter: Tissue Value: Roots vs. Whole Plant
  misc_feature: MA Experiment ID: 20000234 Result: Up-regulated in Transcription
  misc_feature: MA Experiment 20000234 PARAMETER Experiment Name: At_Siliques_P Parameter: Age (day) Value: 21
  misc_feature: MA Experiment 20000234 PARAMETER Experiment Name: At_Siliques_P Parameter: Organism Value: A. thaliana
  misc_feature: MA Experiment 20000234 PARAMETER Experiment Name: At_Siliques_P Parameter: Plant Line Value: WS
  misc_feature: MA Experiment 20000234 PARAMETER Experiment Name: At_Siliques_P Parameter: Tissue Value: Less Than 5mm Siliques vs. Whole Plant
  misc_feature: MA Experiment ID: 20000235 Result: Up-regulated in Transcription
  misc_feature: MA Experiment 20000235 PARAMETER Experiment Name: At_Siliques_P Parameter: Age (day) Value: 21
  misc_feature: MA Experiment 20000235 PARAMETER Experiment Name: At_Siliques_P Parameter: Organism Value: A. thaliana
  misc_feature: MA Experiment 20000235 PARAMETER Experiment Name: At_Siliques_P Parameter: Plant Line Value: WS
  misc_feature: MA Experiment 20000235 PARAMETER Experiment Name: At_Siliques_P Parameter: Tissue Value: 5-10mm Siliques vs. Whole Plant
  misc_feature: MA Experiment ID: 20000264 Result: Up-regulated in Transcription
  misc_feature: MA Experiment 20000264 PARAMETER Experiment Name: At_Open_Flower_P Parameter: Age (day) Value: 21
  misc_feature: MA Experiment 20000264 PARAMETER Experiment Name: At_Open_Flower_P Parameter: Plant Line Value: WS
  misc_feature: MA Experiment 20000264 PARAMETER Experiment Name: At_Open_Flower_P Parameter: Tissue Value: Open Flower vs. Whole Plant
  misc_feature: MA Experiment ID: 20000265 Result: Up-regulated in Transcription
  misc_feature: MA Experiment 20000265 PARAMETER Experiment Name: At_Open_Flower_P Parameter: Age (day) Value: 21
  misc_feature: MA Experiment 20000265 PARAMETER Experiment Name: At_Open_Flower_P Parameter: Plant Line Value: WS
  misc_feature: MA Experiment 20000265 PARAMETER Experiment Name: At_Open_Flower_P Parameter: Tissue Value: Closed Flower vs. Whole Plant
  misc_feature: MA Experiment ID: 20000286 Result: Up-regulated in Transcription
  misc_feature: MA Experiment 20000286 PARAMETER Experiment Name: At_Open_Flower_P Parameter: Age (day) Value: 21
  misc_feature: MA Experiment 20000286 PARAMETER Experiment Name: At_Open_Flower_P Parameter: Plant Line Value: WS
  misc_feature: MA Experiment 20000286 PARAMETER Experiment Name: At_Open_Flower_P Parameter: Tissue Value: Half Open vs. Whole Plant
  misc_feature: MA Experiment ID: 20000437 Result: Down-regulated in Transcription
  misc_feature: MA Experiment 20000437 PARAMETER Experiment Name: At_Drought_P Parameter: Age (day) Value: 8
  misc_feature: MA Experiment 20000437 PARAMETER Experiment Name: At_Drought_P Parameter: Organism Value: A. thaliana
  misc_feature: MA Experiment 20000437 PARAMETER Experiment Name: At_Drought_P Parameter: Plant Line Value: WS
  misc_feature: MA Experiment 20000437 PARAMETER Experiment Name: At_Drought_P Parameter: Timepoint (hr) Value: 24
  misc_feature: MA Experiment 20000437 PARAMETER Experiment Name: At_Drought_P Parameter: Tissue Value: Whole Plant
  misc_feature: MA Experiment 20000437 PARAMETER Experiment Name: At_Drought_P Parameter: Treatment Value: Drought vs. No Drought
  misc_feature: MA Experiment ID: 20000439 Result: Up-regulated in Transcription
  misc_feature: MA Experiment 20000439 PARAMETER Experiment Name: At_Roots__P Parameter: Age (day) Value: 14 vs. 21
  misc_feature: MA Experiment 20000439 PARAMETER Experiment Name: At_Roots__P Parameter: Organism Value: A. thaliana
  misc_feature: MA Experiment 20000439 PARAMETER Experiment Name: At_Roots__P Parameter: Tissue Value: Roots vs. Whole Plant
  misc_feature: MA Experiment ID: 20000441 Result: Down-regulated in Transcription
  misc_feature: MA Experiment 20000441 PARAMETER Experiment Name: At_1uM_BR-BRZ__P Parameter: Tissue Value: Shoot Apices
  misc_feature: MA Experiment 20000441 PARAMETER Experiment Name: At_1uM_BR-BRZ__P Parameter: Treatment Value: 1uM BR vs. No Treatment
  misc_feature: MA Experiment ID: 20000527 Result: Down-regulated in Transcription
  misc_feature: MA Experiment 20000527 PARAMETER Experiment Name: At_10percent_PEG_P Parameter: Age (day) Value: 20
  misc_feature: MA Experiment 20000527 PARAMETER Experiment Name: At_10percent_PEG_P Parameter: Organism Value: A. thaliana
  misc_feature: MA Experiment 20000527 PARAMETER Experiment Name: At_10percent_PEG_P Parameter: Plant Line Value: WS
  misc_feature: MA Experiment 20000527 PARAMETER Experiment Name: At_10percent_PEG_P Parameter: Timepoint (day) Value: 20
  misc_feature: MA Experiment 20000527 PARAMETER Experiment Name: At_10percent_PEG_P Parameter: Tissue Value: Whole Plant
  misc_feature: MA Experiment 20000527 PARAMETER Experiment Name: At_10percent_PEG_P Parameter: Treatment Value: 10percent PEG vs. No Treatment
  misc_feature: MA Experiment ID: 20000794 Result: Down-regulated in Transcription
  misc_feature: MA Experiment 20000794 PARAMETER Experiment Name: At_Petals_P Parameter: Age (day) Value: 23-25 days
  misc_feature: MA Experiment 20000794 PARAMETER Experiment Name: At_Petals_P Parameter: Plant Line Value: WS
  misc_feature: MA Experiment 20000794 PARAMETER Experiment Name: At_Petals_P Parameter: Tissue Value: Petals vs. Whole plant
  misc_feature: MA Experiment ID: 20001906 Result: Down-regulated in Transcription
  misc_feature: MA Experiment 20001906 PARAMETER Experiment Name: At_Drought_Reproduction_P Parameter: Age (day) Value: 35
  misc_feature: MA Experiment 20001906 PARAMETER Experiment Name: At_Drought_Reproduction_P Parameter: Organism Value: A. thaliana
  misc_feature: MA Experiment 20001906 PARAMETER Experiment Name: At_Drought_Reproduction_P Parameter: Plant Line Value: WS
  misc_feature: MA Experiment 20001906 PARAMETER Experiment Name: At_Drought_Reproduction_P Parameter: Timepoint (day) Value: 5
  misc_feature: MA Experiment 20001906 PARAMETER Experiment Name: At_Drought_Reproduction_P Parameter: Tissue Value: Siliques
  misc_feature: MA Experiment 20001906 PARAMETER Experiment Name: At_Drought_Reproduction_P Parameter: Treatment Value: Drought vs. No Drought
  misc_feature: MA Experiment ID: 20001911 Result: Down-regulated in Transcription
  misc_feature: MA Experiment 20001911 PARAMETER Experiment Name: At_Drought_Reproduction_P Parameter: Age (day) Value: 40
  misc_feature: MA Experiment 20001911 PARAMETER Experiment Name: At_Drought_Reproduction_P Parameter: Organism Value: A. thaliana
  misc_feature: MA Experiment 20001911 PARAMETER Experiment Name: At_Drought_Reproduction_P Parameter: Plant Line Value: WS
  misc_feature: MA Experiment 20001911 PARAMETER Experiment Name: At_Drought_Reproduction_P Parameter: Timepoint (day) Value: 10
  misc_feature: MA Experiment 20001911 PARAMETER Experiment Name: At_Drought_Reproduction_P Parameter: Tissue Value: Flowers
  misc_feature: MA Experiment 20001911 PARAMETER Experiment Name: At_Drought_Reproduction_P Parameter: Treatment Value: Drought vs. No Drought
  misc_feature: Pfam Name: Hin1 Pfam Description: Harpin-induced protein 1 (Hin1)
acttgttcatcttccattccaatctcaagatgcacgcgaagaccgactccgaggtgacaagcctctcagcttcatcgccgactagatctccccgtcgaccagcctacttcgtccaatctccatcacgtgactcccacgatggggagaaaacagcaacatcattccactcaacaccggtactcaccagcccgatgggatctccaccacattctcactcttcctcaagccgcttctccaagatcaacggctcaaaacgtaagggccacgctggagaaaaacagttcgctatgattgaagaagaaggtcttcttgatgatggagatagagaacaagaagctttgcctcgtcgatgttatgttttagctttcattgttggattctctctactctttgctttcttctctttgattctttatgcagctgctaaacctcagaaacctaagatctctgttaagagtataacgtttgagcaacttaaggttcaagctggacaagatgctggaggtataggaactgatatgatcactatgaacgcgacactgagaatgttgtaccgtaacactggtactttctttggtgttcatgtcacttcttctccgattgatcttagcttctcgcagatcactattggctctggctctattaagaagttttatcagtcaaggaaaagccaaagaacagtggtggtgaatgtacttggagacaagattccactctatggaagtggctcaacattagtcccaccaccacctcctgcaccaattccaaaacccaagaagaagaaaggacctatcgttatcgtcgaaccaccagcgcctcctgctccagtaccgatgaggctaaacttcaccgttagatctcgagcttacgtgttggggaagttagttcaacctaagttttacaagagaatcgtgtgcttgattaatttcgaacacaagaaactcagtaaacatattcccatcacgaataactgcactgtcacatctatttaaaagaagaaaaaaatacacatgagagtgcggacggtctcgtattgggtagtgcgcctatggccctatacatgttacaaggtattgcgtgtggcctaccccaaagcagaagaatcatcatcagtgggtttcataaatttaatttacgtaattggtttgagagattttgttaatgatacacagtaaacgagaagattc

SEQ ID NO: 74405 - protein, 329 aa, Arabidopsis thaliana; identical to SEQ ID NO: 25277
  peptide (1)..(329): Ceres Seq. ID no. 5672751
  misc_feature: Pfam Name: Hin1 Pfam Description: Harpin-induced protein 1 (Hin1)
  misc_feature (10)..(329): Homolog of NCBI NO: 15239097 NR Description: putative protein; protein id: At5g42860.1 thaliana] >gi|9758574|dbj|BAB09187.1|
  misc_feature (10)..(329): Homolog of NCBI NO: 28416677 NR Description: At5g42860 [Arabidopsis thaliana]
  misc_feature (28)..(329): Homolog of NCBI NO: 18401556 NR Description: expressed protein; protein id: At1g45688.1, by cDNA: 8255., supported by cDNA: gi_20466719 [Arabidopsis
  misc_feature (9)..(255): Homolog of NCBI NO: 5777621 NR Description: CAA30379.1 protein [Oryza sativa]
  misc_feature (274)..(324): Homolog of NCBI NO: 5777621 NR Description: CAA30379.1 protein [Oryza sativa]
  misc_feature (10)..(324): Homolog of NCBI NO: 38345517 NR Description: OSJNBa0039K24.20 [Oryza sativa (japonica
  misc_feature (24)..(255): Homolog of NCBI NO: 32488073 NR Description: OSJNBa0084A10.1 [Oryza sativa (japonica
  misc_feature (271)..(326): Homolog of NCBI NO: 32488073 NR Description: OSJNBa0084A10.1 [Oryza sativa (japonica
  misc_feature (10)..(243): Homolog of NCBI NO: 15227481 NR Description: unknown protein; protein id: At2g41990.1
  misc_feature (276)..(324): Homolog of NCBI NO: 15227481 NR Description: unknown protein; protein id: At2g41990.1

SEQ ID NO: 74406 - protein, 320 aa, Arabidopsis thaliana; identical to SEQ ID NO: 25278
  peptide (1)..(320): Ceres Seq. ID no. 5672752
  misc_feature: Pfam Name: Hin1 Pfam Description: Harpin-induced protein 1 (Hin1)
  misc_feature (1)..(320): Homolog of NCBI NO: 15239097 NR Description: putative protein; protein id: At5g42860.1 thaliana] >gi|9758574|dbj|BAB09187.1|
  misc_feature (1)..(320): Homolog of NCBI NO: 28416677 NR Description: At5g42860 [Arabidopsis thaliana]
  misc_feature (19)..(320): Homolog of NCBI NO: 18401556 NR Description: expressed protein; protein id: At1g45688.1, by cDNA: 8255., supported by cDNA: gi_20466719 [Arabidopsis
  misc_feature (1)..(246): Homolog of NCBI NO: 5777621 NR Description: CAA30379.1 protein [Oryza sativa]
  misc_feature (265)..(315): Homolog of NCBI NO: 5777621 NR Description: CAA30379.1 protein [Oryza sativa]
  misc_feature (1)..(315): Homolog of NCBI NO: 38345517 NR Description: OSJNBa0039K24.20 [Oryza sativa (japonica
  misc_feature (15)..(246): Homolog of NCBI NO: 32488073 NR Description: OSJNBa0084A10.1 [Oryza sativa (japonica
  misc_feature (262)..(317): Homolog of NCBI NO: 32488073 NR Description: OSJNBa0084A10.1 [Oryza sativa (japonica
  misc_feature (1)..(234): Homolog of NCBI NO: 15227481 NR Description: unknown protein; protein id: At2g41990.1
  misc_feature (267)..(315): Homolog of NCBI NO: 15227481 NR Description: unknown protein; protein id: At2g41990.1

SEQ ID NO: 74407 - protein, 266 aa, Arabidopsis thaliana; identical to SEQ ID NO: 25279
  peptide (1)..(266): Ceres Seq. ID no. 5672753
  misc_feature: Pfam Name: Hin1 Pfam Description: Harpin-induced protein 1 (Hin1)
  misc_feature (1)..(266): Homolog of NCBI NO: 15239097 NR Description: putative protein; protein id: At5g42860.1 thaliana] >gi|9758574|dbj|BAB09187.1|
  misc_feature (1)..(266): Homolog of NCBI NO: 28416677 NR Description: At5g42860 [Arabidopsis thaliana]
  misc_feature (1)..(266): Homolog of NCBI NO: 18401556 NR Description: expressed protein; protein id: At1g45688.1, by cDNA: 8255., supported by cDNA: gi_20466719 [Arabidopsis
  misc_feature (1)..(192): Homolog of NCBI NO: 5777621 NR Description: CAA30379.1 protein [Oryza sativa]
  misc_feature (211)..(261): Homolog of NCBI NO: 5777621 NR Description: CAA30379.1 protein [Oryza sativa]
  misc_feature (1)..(261): Homolog of NCBI NO: 38345517 NR Description: OSJNBa0039K24.20 [Oryza sativa (japonica
  misc_feature (1)..(192): Homolog of NCBI NO: 32488073 NR Description: OSJNBa0084A10.1 [Oryza sativa (japonica
  misc_feature (208)..(263): Homolog of NCBI NO: 32488073 NR Description: OSJNBa0084A10.1 [Oryza sativa (japonica
  misc_feature (1)..(180): Homolog of NCBI NO: 15227481 NR Description: unknown protein; protein id: At2g41990.1
  misc_feature (213)..(261): Homolog of NCBI NO: 15227481 NR Description: unknown protein; protein id: At2g41990.1

SEQ ID NO: 74408 - DNA, 1118 bp, Arabidopsis thaliana
  misc_feature (1)..(1118): Ceres Seq. ID no. 5673001
  misc_feature: MA Experiment ID: 108434 Result: Down-regulated in Transcription
  misc_feature: MA Experiment 108434 PARAMETER Experiment Name: At_Root_Tips_cDNA_P Parameter: Tissue Value: Root Tips
  misc_feature: MA Experiment ID: 108462 Result: Up-regulated in Transcription
  misc_feature: MA Experiment 108462 PARAMETER Experiment Name: At_Germinating_Seeds_cDNA_P Parameter: Age (day) Value: 2 vs. 0
  misc_feature: MA Experiment 108462 PARAMETER Experiment Name: At_Germinating_Seeds_cDNA_P Parameter: Tissue Value: Germinating Seeds
  misc_feature: MA Experiment ID: 108463 Result: Up-regulated in Transcription
  misc_feature: MA Experiment 108463 PARAMETER Experiment Name: At_Germinating_Seeds_cDNA_P Parameter: Age (day) Value: 3 vs. 0
  misc_feature: MA Experiment 108463 PARAMETER Experiment Name: At_Germinating_Seeds_cDNA_P Parameter: Tissue Value: Germinating Seeds
  misc_feature: MA Experiment ID: 108464 Result: Up-regulated in Transcription
  misc_feature: MA Experiment 108464 PARAMETER Experiment Name: At_Germinating_Seeds_cDNA_P Parameter: Age (day) Value: 4 vs. 0
  misc_feature: MA Experiment 108464 PARAMETER Experiment Name: At_Germinating_Seeds_cDNA_P Parameter: Tissue Value: Germinating Seeds
  misc_feature: MA Experiment ID: 108501 Result: Down-regulated in Transcription
  misc_feature: MA Experiment 108501 PARAMETER Experiment Name: At_ap2_floral_buds_cDNA_P Parameter: Plant Line Value: ap2 (Ler.)
  misc_feature: MA Experiment 108501 PARAMETER Experiment Name: At_ap2_floral_buds_cDNA_P Parameter: Tissue Value: Closed Flower
  misc_feature: MA Experiment ID: 108572 Result: Up-regulated in Transcription
  misc_feature: MA Experiment 108572 PARAMETER Experiment Name: At_Drought_cDNA_P Parameter: Timepoint (hr) Value: 1
  misc_feature: MA Experiment 108572 PARAMETER Experiment Name: At_Drought_cDNA_P Parameter: Tissue Value: Aerial
  misc_feature: MA Experiment 108572 PARAMETER Experiment Name: At_Drought_cDNA_P Parameter: Treatment Value: Drought vs. No Drought
  misc_feature: MA Experiment ID: 108573 Result: Up-regulated in Transcription
  misc_feature: MA Experiment 108573 PARAMETER Experiment Name: At_Drought_cDNA_P Parameter: Timepoint (hr) Value: 6
  misc_feature: MA Experiment 108573 PARAMETER Experiment Name: At_Drought_cDNA_P Parameter: Tissue Value: Aerial
  misc_feature: MA Experiment 108573 PARAMETER Experiment Name: At_Drought_cDNA_P Parameter: Treatment Value: Drought vs. No Drought
  misc_feature: MA Experiment ID: 108576 Result: Up-regulated in Transcription
  misc_feature: MA Experiment 108576 PARAMETER Experiment Name: At_42deg_Heat_cDNA_P Parameter: Temperature (deg C) Value: 42 vs. 22
  misc_feature: MA Experiment 108576 PARAMETER Experiment Name: At_42deg_Heat_cDNA_P Parameter: Timepoint (hr) Value: 1
  misc_feature: MA Experiment 108576 PARAMETER Experiment Name: At_42deg_Heat_cDNA_P Parameter: Tissue Value: Aerial
  misc_feature: MA Experiment ID: 108577 Result: Up-regulated in Transcription
  misc_feature: MA Experiment 108577 PARAMETER Experiment Name: At_42deg_Heat_cDNA_P Parameter: Temperature (deg C) Value: 42 vs. 22
  misc_feature: MA Experiment 108577 PARAMETER Experiment Name: At_42deg_Heat_cDNA_P Parameter: Timepoint (hr) Value: 6
  misc_feature: MA Experiment 108577 PARAMETER Experiment Name: At_42deg_Heat_cDNA_P Parameter: Tissue Value: Aerial
  misc_feature: MA Experiment ID: 108585 Result: Up-regulated in Transcription
  misc_feature: MA Experiment 108585 PARAMETER Experiment Name: At_5mM_NaNP_cDNA_P Parameter: Timepoint (hr) Value: 6
  misc_feature: MA Experiment 108585 PARAMETER Experiment Name: At_5mM_NaNP_cDNA_P Parameter: Tissue Value: Aerial
  misc_feature: MA Experiment 108585 PARAMETER Experiment Name: At_5mM_NaNP_cDNA_P Parameter: Treatment Value: null
  misc_feature: MA Experiment ID: 20000090 Result: Down-regulated in Transcription
  misc_feature: MA Experiment ID: 20000185 Result: Up-regulated in Transcription
  misc_feature: MA Experiment 20000185 PARAMETER Experiment Name: At_Roots__P Parameter: Age (day) Value: 7 vs. 21
  misc_feature: MA Experiment 20000185 PARAMETER Experiment Name: At_Roots__P Parameter: Organism Value: A. thaliana
  misc_feature: MA Experiment 20000185 PARAMETER Experiment Name: At_Roots__P Parameter: Tissue Value: Roots vs. Whole Plant
  misc_feature: MA Experiment ID: 20000224 Result: Down-regulated in Transcription
  misc_feature: MA Experiment ID: 20000227 Result: Up-regulated in Transcription
  misc_feature: MA Experiment 20000227 PARAMETER Experiment Name: At_Root-Tips-vs-Tops_P Parameter: Tissue Value: Root Tips vs. Root Tops
  misc_feature: MA Experiment ID: 20000437 Result: Down-regulated in Transcription
  misc_feature: MA Experiment 20000437 PARAMETER Experiment Name: At_Drought_P Parameter: Age (day) Value: 8
  misc_feature: MA Experiment 20000437 PARAMETER Experiment Name: At_Drought_P Parameter: Organism Value: A. thaliana
  misc_feature: MA Experiment 20000437 PARAMETER Experiment Name: At_Drought_P Parameter: Plant Line Value: WS
  misc_feature: MA Experiment 20000437 PARAMETER Experiment Name: At_Drought_P Parameter: Timepoint (hr) Value: 24
  misc_feature: MA Experiment 20000437 PARAMETER Experiment Name: At_Drought_P Parameter: Tissue Value: Whole Plant
  misc_feature: MA Experiment 20000437 PARAMETER Experiment Name: At_Drought_P Parameter: Treatment Value: Drought vs. No Drought
  misc_feature: MA Experiment ID: 20000438 Result: Down-regulated in Transcription
  misc_feature: MA Experiment 20000438 PARAMETER Experiment Name: At_Shoots__P Parameter: Age (day) Value: 14
  misc_feature: MA Experiment 20000438 PARAMETER Experiment Name: At_Shoots__P Parameter: Tissue Value: Shoots vs. Whole Plant
  misc_feature: MA Experiment ID: 20000439 Result: Up-regulated in Transcription
  misc_feature: MA Experiment 20000439 PARAMETER Experiment Name: At_Roots__P Parameter: Age (day) Value: 14 vs. 21
  misc_feature: MA Experiment 20000439 PARAMETER Experiment Name: At_Roots__P Parameter: Organism Value: A. thaliana
  misc_feature: MA Experiment 20000439 PARAMETER Experiment Name: At_Roots__P Parameter: Tissue Value: Roots vs. Whole Plant
  misc_feature: MA Experiment ID: 20000451 Result: Down-regulated in Transcription
  misc_feature: MA Experiment 20000451 PARAMETER Experiment Name: At_CS6879_Shoots-Roots_P Parameter: Age (day) Value: 14
  misc_feature: MA Experiment 20000451 PARAMETER Experiment Name: At_CS6879_Shoots-Roots_P Parameter: Organism Value: A. thaliana
  misc_feature: MA Experiment 20000451 PARAMETER Experiment Name: At_CS6879_Shoots-Roots_P Parameter: Plant Line Value: CS6879 vs. WS
  misc_feature: MA Experiment 20000451 PARAMETER Experiment Name: At_CS6879_Shoots-Roots_P Parameter: Tissue Value: Roots
  misc_feature: MA Experiment ID: 20001556 Result: Down-regulated in Transcription
  misc_feature: MA Experiment 20001556 PARAMETER Experiment Name: At_Drought_Soil_Dry_P Parameter: Age (day) Value: 26
  misc_feature: MA Experiment 20001556 PARAMETER Experiment Name: At_Drought_Soil_Dry_P Parameter: Organism Value: A. thaliana
  misc_feature: MA Experiment 20001556 PARAMETER Experiment Name: At_Drought_Soil_Dry_P Parameter: Plant Line Value: WS
  misc_feature: MA Experiment 20001556 PARAMETER Experiment Name: At_Drought_Soil_Dry_P Parameter: Post Timepoint (hr) Value: None
  misc_feature: MA Experiment 20001556 PARAMETER Experiment Name: At_Drought_Soil_Dry_P Parameter: Post-Treatment Value: None
  misc_feature: MA Experiment 20001556 PARAMETER Experiment Name: At_Drought_Soil_Dry_P Parameter: Timepoint (day) Value: 12
  misc_feature: MA Experiment 20001556 PARAMETER Experiment Name: At_Drought_Soil_Dry_P Parameter: Treatment Value: Drought vs. No Drought
  misc_feature: MA Experiment ID: 20001911 Result: Down-regulated in Transcription
  misc_feature: MA Experiment 20001911 PARAMETER Experiment Name: At_Drought_Reproduction_P Parameter: Age (day) Value: 40
  misc_feature: MA Experiment 20001911 PARAMETER Experiment Name: At_Drought_Reproduction_P Parameter: Organism Value: A. thaliana
  misc_feature: MA Experiment 20001911 PARAMETER Experiment Name: At_Drought_Reproduction_P Parameter: Plant Line Value: WS
  misc_feature: MA Experiment 20001911 PARAMETER Experiment Name: At_Drought_Reproduction_P Parameter: Timepoint (day) Value: 10
  misc_feature: MA Experiment 20001911 PARAMETER Experiment Name: At_Drought_Reproduction_P Parameter: Tissue Value: Flowers
  misc_feature: MA Experiment 20001911 PARAMETER Experiment Name: At_Drought_Reproduction_P Parameter: Treatment Value: Drought vs. No Drought
atacaaatctgaacaaacattaaaactcatctctctcatcatctttggccatggcaaaagacttggatgtgaacgagagtggaccaccggcggcgagagactacaaggatccgcctcccgcaccatttttcgacatggaggagcttaggaaatggccgctttatagagcggtcatagctgagtttgtagcaacacttctgttcctctacgtctcaatcctgactgtaatcggctacaaagctcaaaccgatgcaaccgccggaggagtggattgtggcggcgtaggaatattgggtattgcgtgggctttcggtggaatgatctttgttctcgtttactgtaccgccggtatctccggtggtcatataaatccggctgtgacggtgggactattcctggctcgtaaagtgtcattggtgcggacagtgttatacattgtggctcagtgccttggtgccatctgcggttgcggtttcgtcaaagcattccaaagttcttactacaccagatatggaggtggagccaacgagctagccgatggctacaacaaaggtaccggactcggtgccgagatcattggaacttttgtccttgtatacaccgtcttctcggcaaccgatcccaagcgaaatgctcgtgactctcacgtgccagttttggctccacttcccattggctttgccgtcttcatggttcatttagccaccattcccatcaccggaaccggtatcaacccggctcgtagctttggagctgccgttatttacaacaacgaaaaggcctgggacgaccaatggattttttgggttggaccgatgatcggagcagcagcagcagcgttttaccatcagtttattttaagagcggctgcgattaaagctcttggctcatttggctcctttggctcctttaggagctttgcttaatatacatttattttaaattaaaccacaagttataaatctttgatcaaaattaaaaggatgattacaaatgaattaagtggaagttacatgtgatcttctttatatgtttctgtttttttgttctctctttcatttcatggaatttcccattcgtgtaattgtaaatgtggttttaattaatgttgctttaag

SEQ ID NO: 74409 - protein, 291 aa, Arabidopsis thaliana; identical to SEQ ID NO: 22316
  peptide (1)..(291): Ceres Seq. ID no. 5673002
  misc_feature (31)..(266): Pfam Name: Major intrinsic protein Pfam Description: Major intrinsic protein
  misc_feature (1)..(291): Homolog of NCBI NO: 15239397 NR Description: mipC protein - like (aquaporin); protein id: supported by cDNA: 33231. [Arabidopsis thaliana] water channel protein [Arabidopsis thaliana]
  misc_feature (1)..(283): Homolog of NCBI NO: 15228095 NR Description: aquaporin (plasma membrane intrinsic protein 2B); id: At2g37170.1, supported by cDNA: 25220. [Arabidopsis thaliana]
  misc_feature (1)..(283): Homolog of NCBI NO: 7441275 NR Description: mipC protein - common ice plant
  misc_feature (1)..(283): Homolog of NCBI NO: 21554356 NR Description: aquaporin (plasma membrane intrinsic protein 2B)
  misc_feature (1)..(283): Homolog of NCBI NO: 28395420 NR Description: plasma intrinsic protein 2,2 [Juglans regia]
  misc_feature (1)..(283): Homolog of NCBI NO: 8071620 NR Description: putative aquaporin PIP2-1 [Vitis berlandieri x
  misc_feature (1)..(283): Homolog of NCBI NO: 5081423 NR Description: plasma membrane intrinsic protein 2 [Brassica
  misc_feature (1)..(283): Homolog of NCBI NO: 28395418 NR Description: plasma intrinsic protein 2,1 [Juglans regia]
  misc_feature (1)..(283): Homolog of NCBI NO: 7209562 NR Description: Plasma membrane aquaporin 2c [Raphanus sativus]
  misc_feature (1)..(283): Homolog of NCBI NO: 3551133 NR Description: Plasma membrane aquaporin (PAQ2) [Raphanus

SEQ ID NO: 74410 - protein, 263 aa, Arabidopsis thaliana; identical to SEQ ID NO: 22317
  peptide (1)..(263): Ceres Seq. ID no. 5673003
  misc_feature (3)..(238): Pfam Name: Major intrinsic protein Pfam Description: Major intrinsic protein
  misc_feature (1)..(263): Homolog of NCBI NO: 15239397 NR Description: mipC protein - like (aquaporin); protein id: supported by cDNA: 33231. [Arabidopsis thaliana] water channel protein [Arabidopsis thaliana]
  misc_feature (1)..(255): Homolog of NCBI NO: 15228095 NR Description: aquaporin (plasma membrane intrinsic protein 2B); id: At2g37170.1, supported by cDNA: 25220. [Arabidopsis thaliana]
  misc_feature (1)..(255): Homolog of NCBI NO: 7441275 NR Description: mipC protein - common ice plant
  misc_feature (1)..(255): Homolog of NCBI NO: 21554356 NR Description: aquaporin (plasma membrane intrinsic protein 2B)
  misc_feature (1)..(255): Homolog of NCBI NO: 28395420 NR Description: plasma intrinsic protein 2,2 [Juglans regia]
  misc_feature (1)..(255): Homolog of NCBI NO: 8071620 NR Description: putative aquaporin PIP2-1 [Vitis berlandieri x
  misc_feature (1)..(255): Homolog of NCBI NO: 5081423 NR Description: plasma membrane intrinsic protein 2 [Brassica
  misc_feature (1)..(255): Homolog of NCBI NO: 28395418 NR Description: plasma intrinsic protein 2,1 [Juglans regia]
  misc_feature (1)..(255): Homolog of NCBI NO: 7209562 NR Description: Plasma membrane aquaporin 2c [Raphanus sativus]
  misc_feature (1)..(255): Homolog of NCBI NO: 3551133 NR Description: Plasma membrane aquaporin (PAQ2) [Raphanus

SEQ ID NO: 74411 - protein, 202 aa, Arabidopsis thaliana; identical to SEQ ID NO: 22318
  peptide (1)..(202): Ceres Seq. ID no. 5673004
  misc_feature (1)..(177): Pfam Name: Major intrinsic protein Pfam Description: Major intrinsic protein
  misc_feature (1)..(202): Homolog of NCBI NO: 15239397 NR Description: mipC protein - like (aquaporin); protein id: supported by cDNA: 33231. [Arabidopsis thaliana] water channel protein [Arabidopsis thaliana]
  misc_feature (1)..(194): Homolog of NCBI NO: 15228095 NR Description: aquaporin (plasma membrane intrinsic protein 2B); id: At2g37170.1, supported by cDNA: 25220. [Arabidopsis thaliana]
  misc_feature (1)..(194): Homolog of NCBI NO: 7441275 NR Description: mipC protein - common ice plant
  misc_feature (1)..(194): Homolog of NCBI NO: 21554356 NR Description: aquaporin (plasma membrane intrinsic protein 2B)
  misc_feature (1)..(194): Homolog of NCBI NO: 28395420 NR Description: plasma intrinsic protein 2,2 [Juglans regia]
  misc_feature (1)..(194): Homolog of NCBI NO: 8071620 NR Description: putative aquaporin PIP2-1 [Vitis berlandieri x
  misc_feature (1)..(194): Homolog of NCBI NO: 5081423 NR Description: plasma membrane intrinsic protein 2 [Brassica
  misc_feature (1)..(194): Homolog of NCBI NO: 28395418 NR Description: plasma intrinsic protein 2,1 [Juglans regia]
  misc_feature (1)..(194): Homolog of NCBI NO: 7209562 NR Description: Plasma membrane aquaporin 2c [Raphanus sativus]
  misc_feature (1)..(194): Homolog of NCBI NO: 3551133 NR Description: Plasma membrane aquaporin (PAQ2) [Raphanus

SEQ ID NO: 74412 - DNA, 1259 bp, Arabidopsis thaliana
  misc_feature (1)..(1259): Ceres Seq. ID no. 5673304
  misc_feature: MA Experiment ID: 108572 Result: Up-regulated in Transcription
  misc_feature: MA Experiment 108572 PARAMETER Experiment Name: At_Drought_cDNA_P Parameter: Timepoint (hr) Value: 1
  misc_feature: MA Experiment 108572 PARAMETER Experiment Name: At_Drought_cDNA_P Parameter: Tissue Value: Aerial
  misc_feature: MA Experiment 108572 PARAMETER Experiment Name: At_Drought_cDNA_P Parameter: Treatment Value: Drought vs. No Drought
  misc_feature: MA Experiment ID: 108573 Result: Up-regulated in Transcription
  misc_feature: MA Experiment 108573 PARAMETER Experiment Name: At_Drought_cDNA_P Parameter: Timepoint (hr) Value: 6
  misc_feature: MA Experiment 108573 PARAMETER Experiment Name: At_Drought_cDNA_P Parameter: Tissue Value: Aerial
  misc_feature: MA Experiment 108573 PARAMETER Experiment Name: At_Drought_cDNA_P Parameter: Treatment Value: Drought vs. No Drought
  misc_feature: MA Experiment ID: 108576 Result: Up-regulated in Transcription
  misc_feature: MA Experiment 108576 PARAMETER Experiment Name: At_42deg_Heat_cDNA_P Parameter: Temperature (deg C) Value: 42 vs. 22
  misc_feature: MA Experiment 108576 PARAMETER Experiment Name: At_42deg_Heat_cDNA_P Parameter: Timepoint (hr) Value: 1
  misc_feature: MA Experiment 108576 PARAMETER Experiment Name: At_42deg_Heat_cDNA_P Parameter: Tissue Value: Aerial
  misc_feature: MA Experiment ID: 108577 Result: Up-regulated in Transcription
  misc_feature: MA Experiment 108577 PARAMETER Experiment Name: At_42deg_Heat_cDNA_P Parameter: Temperature (deg C) Value: 42 vs. 22
  misc_feature: MA Experiment 108577 PARAMETER Experiment Name: At_42deg_Heat_cDNA_P Parameter: Timepoint (hr) Value: 6
  misc_feature: MA Experiment 108577 PARAMETER Experiment Name: At_42deg_Heat_cDNA_P Parameter: Tissue Value: Aerial
  misc_feature: MA Experiment ID: 108585 Result: Up-regulated in Transcription
  misc_feature: MA Experiment 108585 PARAMETER Experiment Name: At_5mM_NaNP_cDNA_P Parameter: Timepoint (hr) Value: 6
  misc_feature: MA Experiment 108585 PARAMETER Experiment Name: At_5mM_NaNP_cDNA_P Parameter: Tissue Value: Aerial
  misc_feature: MA Experiment 108585 PARAMETER Experiment Name: At_5mM_NaNP_cDNA_P Parameter: Treatment Value: null
  misc_feature: MA Experiment ID: 20000093 Result: Up-regulated in Transcription
  misc_feature: MA Experiment 20000093 PARAMETER Experiment Name: At_42deg_Heat_cDNA_P Parameter: Temperature (deg C) Value: 42 vs. 22
  misc_feature: MA Experiment 20000093 PARAMETER Experiment Name: At_42deg_Heat_cDNA_P Parameter: Timepoint (hr) Value: 0.5
  misc_feature: MA Experiment 20000093 PARAMETER Experiment Name: At_42deg_Heat_cDNA_P Parameter: Tissue Value: Aerial
  misc_feature: MA Experiment ID: 20000112 Result: Up-regulated in Transcription
  misc_feature: MA Experiment 20000112 PARAMETER Experiment Name: At_42deg_Heat_cDNA_P Parameter: Temperature (deg C) Value: 42 vs. 22
  misc_feature: MA Experiment 20000112 PARAMETER Experiment Name: At_42deg_Heat_cDNA_P Parameter: Timepoint (hr) Value: 2
  misc_feature: MA Experiment 20000112 PARAMETER Experiment Name: At_42deg_Heat_cDNA_P Parameter: Tissue Value: Aerial
  misc_feature: MA Experiment ID: 20000113 Result: Up-regulated in Transcription
  misc_feature: MA Experiment 20000113 PARAMETER Experiment Name: At_42deg_Heat_cDNA_P Parameter: Temperature (deg C) Value: 42 vs. 22
  misc_feature: MA Experiment 20000113 PARAMETER Experiment Name: At_42deg_Heat_cDNA_P Parameter: Timepoint (hr) Value: 8
  misc_feature: MA Experiment 20000113 PARAMETER Experiment Name: At_42deg_Heat_cDNA_P Parameter: Tissue Value: Aerial
  misc_feature: MA Experiment ID: 20000144 Result: Up-regulated in Transcription
  misc_feature: MA Experiment 20000144 PARAMETER Experiment Name: At_42deg_Heat_cDNA_P Parameter: Temperature (deg C) Value: 42 vs. 22
  misc_feature: MA Experiment 20000144 PARAMETER Experiment Name: At_42deg_Heat_cDNA_P Parameter: Timepoint (hr) Value: 1
  misc_feature: MA Experiment 20000144 PARAMETER Experiment Name: At_42deg_Heat_cDNA_P Parameter: Tissue Value: Aerial
  misc_feature: MA Experiment ID: 20000171 Result: Up-regulated in Transcription
  misc_feature: MA Experiment 20000171 PARAMETER Experiment Name: At_42deg_Heat_P Parameter: Age (day) Value: 14
  misc_feature: MA Experiment 20000171 PARAMETER Experiment Name: At_42deg_Heat_P Parameter: Organism Value: A. thaliana
  misc_feature: MA Experiment 20000171 PARAMETER Experiment Name: At_42deg_Heat_P Parameter: Plant Line Value: WS
  misc_feature: MA Experiment 20000171 PARAMETER Experiment Name: At_42deg_Heat_P Parameter: Temperature (deg C) Value: 42 vs. 22
  misc_feature: MA Experiment 20000171 PARAMETER Experiment Name: At_42deg_Heat_P Parameter: Timepoint (hr) Value: 1
  misc_feature: MA Experiment 20000171 PARAMETER Experiment Name: At_42deg_Heat_P Parameter: Tissue Value: Aerial
  misc_feature: MA Experiment ID: 20000224 Result: Down-regulated in Transcription
  misc_feature: MA Experiment ID: 20000436 Result: Up-regulated in Transcription
  misc_feature: MA Experiment 20000436 PARAMETER Experiment Name: At_Drought_P Parameter: Age (day) Value: 7
  misc_feature: MA Experiment 20000436 PARAMETER Experiment Name: At_Drought_P Parameter: Organism Value: A. thaliana
  misc_feature: MA Experiment 20000436 PARAMETER Experiment Name: At_Drought_P Parameter: Plant Line Value: WS
  misc_feature: MA Experiment 20000436 PARAMETER Experiment Name: At_Drought_P Parameter: Timepoint (hr) Value: 12
  misc_feature: MA Experiment 20000436 PARAMETER Experiment Name: At_Drought_P Parameter: Tissue Value: Whole Plant
  misc_feature: MA Experiment 20000436 PARAMETER Experiment Name: At_Drought_P Parameter: Treatment Value: Drought vs. No Drought
  misc_feature: MA Experiment ID: 20000437 Result: Up-regulated in Transcription
  misc_feature: MA Experiment 20000437 PARAMETER Experiment Name: At_Drought_P Parameter: Age (day) Value: 8
  misc_feature: MA Experiment 20000437 PARAMETER Experiment Name: At_Drought_P Parameter: Organism Value: A. thaliana
  misc_feature: MA Experiment 20000437 PARAMETER Experiment Name: At_Drought_P Parameter: Plant Line Value: WS
  misc_feature: MA Experiment 20000437 PARAMETER Experiment Name: At_Drought_P Parameter: Timepoint (hr) Value: 24
  misc_feature: MA Experiment 20000437 PARAMETER Experiment Name: At_Drought_P Parameter: Tissue Value: Whole Plant
  misc_feature: MA Experiment 20000437 PARAMETER Experiment Name: At_Drought_P Parameter: Treatment Value: Drought vs. No Drought
  misc_feature: MA Experiment ID: 20001559 Result: Up-regulated in Transcription
  misc_feature: MA Experiment 20001559 PARAMETER Experiment Name: At_Drought_Soil_Dry_P Parameter: Age (day) Value: 28
  misc_feature: MA Experiment 20001559 PARAMETER Experiment Name: At_Drought_Soil_Dry_P Parameter: Organism Value: A. thaliana
  misc_feature: MA Experiment 20001559 PARAMETER Experiment Name: At_Drought_Soil_Dry_P Parameter: Plant Line Value: WS
  misc_feature: MA Experiment 20001559 PARAMETER Experiment Name: At_Drought_Soil_Dry_P Parameter: Post Timepoint (hr) Value: 29
  misc_feature: MA Experiment 20001559 PARAMETER Experiment Name: At_Drought_Soil_Dry_P Parameter: Post-Treatment Value: Re-Water vs. No Drought
  misc_feature: MA Experiment 20001559 PARAMETER Experiment Name: At_Drought_Soil_Dry_P Parameter: Timepoint (day) Value: 14
  misc_feature: MA Experiment 20001559 PARAMETER Experiment Name: At_Drought_Soil_Dry_P Parameter: Treatment Value: Drought vs. No Drought
  misc_feature: MA Experiment ID: 20001904 Result: Up-regulated in Transcription
  misc_feature: MA Experiment 20001904 PARAMETER Experiment Name: At_Drought_Reproduction_P Parameter: Age (day) Value: 37
  misc_feature: MA Experiment 20001904 PARAMETER Experiment Name: At_Drought_Reproduction_P Parameter: Organism Value: A. thaliana
  misc_feature: MA Experiment 20001904 PARAMETER Experiment Name: At_Drought_Reproduction_P Parameter: Plant Line Value: WS
  misc_feature: MA Experiment 20001904 PARAMETER Experiment Name: At_Drought_Reproduction_P Parameter: Timepoint (day) Value: 7
  misc_feature: MA Experiment 20001904 PARAMETER Experiment Name: At_Drought_Reproduction_P Parameter: Tissue Value: Rosettes
  misc_feature: MA Experiment 20001904 PARAMETER Experiment Name: At_Drought_Reproduction_P Parameter: Treatment Value: Drought vs. No Drought
  misc_feature: MA Experiment ID: 20001905 Result: Up-regulated in Transcription
  misc_feature: MA Experiment 20001905 PARAMETER Experiment Name: At_Drought_Reproduction_P Parameter: Age (day) Value: 40
  misc_feature: MA Experiment 20001905 PARAMETER Experiment Name: At_Drought_Reproduction_P Parameter: Organism Value: A. thaliana
  misc_feature: MA Experiment 20001905 PARAMETER Experiment Name: At_Drought_Reproduction_P Parameter: Plant Line Value: WS
  misc_feature: MA Experiment 20001905 PARAMETER Experiment Name: At_Drought_Reproduction_P Parameter: Timepoint (day) Value: 10
  misc_feature: MA Experiment 20001905 PARAMETER Experiment Name: At_Drought_Reproduction_P Parameter: Tissue Value: Rosettes
  misc_feature: MA Experiment 20001905 PARAMETER Experiment Name: At_Drought_Reproduction_P Parameter: Treatment Value: Drought vs. No Drought
  misc_feature: MA Experiment ID: 20001911 Result: Up-regulated in Transcription
  misc_feature: MA Experiment 20001911 PARAMETER Experiment Name: At_Drought_Reproduction_P Parameter: Age (day) Value: 40
  misc_feature: MA Experiment 20001911 PARAMETER Experiment Name: At_Drought_Reproduction_P Parameter: Organism Value: A. thaliana
  misc_feature: MA Experiment 20001911 PARAMETER Experiment Name: At_Drought_Reproduction_P Parameter: Plant Line Value: WS
  misc_feature: MA Experiment 20001911 PARAMETER Experiment Name: At_Drought_Reproduction_P Parameter: Timepoint (day) Value: 10
  misc_feature: MA Experiment 20001911 PARAMETER Experiment Name: At_Drought_Reproduction_P Parameter: Tissue Value: Flowers
  misc_feature: MA Experiment 20001911 PARAMETER Experiment Name: At_Drought_Reproduction_P Parameter: Treatment Value: Drought vs. No Drought
  misc_feature: Pfam Name: Reticulon Pfam Description: Reticulon
aagcatcgctctagttaaggaagcagcaggtttggatccgaaccaaccaacggatcagatcagaaacaaaatattcaacggctcagatttattctaattttcctccttttattgttggttttttcattcgacttcgagatctttcttctcagaggtgtaacgaaaacgctagaacaataactttgatcgttcttcttcttctcttgaatcggaaacaatggcggatgaacataagcatgaagaatcttcacctaatttggatccagcagtggaggttgtagagagggaatcgttgatggagaagttatcggagaagatccatcacaaaggtgattcgtcgtcttcatcatcatcagatgacgaaaacgagaagaagtcttcgtcatcgtctccaaagtctttgaaatcgaaggtttatcgtttgttcggaagagagagacctgttcataaggttctcggcggcggaaaaccggcagatatatttatgtggaaggacaagaaaatgtcaggaggtgtatttggcggtgctacagtggcatgggtgctatttgaattgatggagtatcatcttcttactctgttatgtcacgttatgatcgttgctcttgctgtgttgtttctatggtctaatgccactatgttcattcacaagtctccaccaaagattcctgaagttcatatccctgaagaacctcttcttcagcttgcttcgggtcttagaatcgaaatcaaccgtgggatctcttctcttcgtgagattgcgtcggggagggatatcaagaagttcctctctgctattgccggattgtgggttctatcgatcttgggcggctgctatagtttcttgacattggcatacatagctctggttctgctcttcactgttcctcttttctacgacaagtacgaagacaaagtagactcatacggtgagaaagcaatggctgagttgaagaagcaatacgctgtgttggacgcaaaggtattcagcaaaatcccaagaggaccgttgaaagacaagaagaaggattagttttttttggggtttttgttttgtgtgggttttctttggagtgcaatgtgcacaatgctctggtttttatacacgtgggttgtgttgtgttgtgaattggtaatctaaaaggttatgtgttagatctcaacccaaattttacttgacaactttgctttgtttttggagtggtttgtggcattagcacaatgattgtagtcgttctcttgatctatatttttaatgt

SEQ ID NO: 74413 - protein, 271 aa, Arabidopsis thaliana; identical to SEQ ID NO: 35496
  peptide (1)..(271): Ceres Seq. ID no. 5673305
  misc_feature: Pfam Name: Reticulon Pfam Description: Reticulon
  misc_feature (1)..(271): Homolog of NCBI NO: 15237093 NR Description: putative protein; protein id: At4g11220.1, by cDNA: 23536., supported by cDNA: gi_14334419, supported by gi_15081760, supported by cDNA: gi_16209686 [Arabidopsis
  misc_feature (1)..(271): Homolog of NCBI NO: 15236556 NR Description: putative protein; protein id: At4g23630.1, by cDNA: 39185., supported by cDNA: gi_15215585 [Arabidopsis
  misc_feature (24)..(271): Homolog of NCBI NO: 15238125 NR Description: putative protein; protein id: At5g41600.1, by cDNA: gi_14334529, supported by cDNA: gi_16323068 [Arabidopsis >gi|10178014|dbj|BAB11466.1| contains similarity to 24 kDa seed
  misc_feature (22)..(269): Homolog of NCBI NO: 34909318 NR Description: OSJNBb0021A09.5 [Oryza sativa (japonica
  misc_feature (17)..(271): Homolog of NCBI NO: 15222616 NR Description: hypothetical protein; protein id: At1g64090.1, by cDNA: gi_17381217 [Arabidopsis thaliana] F22C12.15 [Arabidopsis thaliana] >gi|17381218|gb|AAL36421.1|
  misc_feature (54)..(269): Homolog of NCBI NO: 34904202 NR Description: P0492F05.25 [Oryza sativa (japonica
  misc_feature (24)..(59): Homolog of NCBI NO: 34904202 NR Description: P0492F05.25 [Oryza sativa (japonica
  misc_feature (20)..(270): Homolog of NCBI NO: 18406991 NR Description: expressed protein; protein id: At2g46170.1, by cDNA: gi_15450758, supported by cDNA: gi_18491130 [Arabidopsis >gi|25408969|pir||E84899 hypothetical protein At2g46170
  misc_feature (42)..(261): Homolog of NCBI NO: 15234108 NR Description: hypothetical protein; protein id: At4g01230.1
  misc_feature (22)..(268): Homolog of NCBI NO: 15233147 NR Description: putative protein; protein id: At3g61560.1

SEQ ID NO: 74414 - protein, 245 aa, Arabidopsis thaliana; identical to SEQ ID NO: 35497
  peptide (1)..(245): Ceres Seq. ID no. 5673306
  misc_feature: Pfam Name: Reticulon Pfam Description: Reticulon
  misc_feature (1)..(245): Homolog of NCBI NO: 15237093 NR Description: putative protein; protein id: At4g11220.1, by cDNA: 23536., supported by cDNA: gi_14334419, supported by gi_15081760, supported by cDNA: gi_16209686 [Arabidopsis
  misc_feature (1)..(245): Homolog of NCBI NO: 15236556 NR Description: putative protein; protein id: At4g23630.1, by cDNA: 39185., supported by cDNA: gi_15215585 [Arabidopsis
  misc_feature (1)..(245): Homolog of NCBI NO: 15238125 NR Description: putative protein; protein id: At5g41600.1, by cDNA: gi_14334529, supported by cDNA: gi_16323068 [Arabidopsis >gi|10178014|dbj|BAB11466.1| contains similarity to 24 kDa seed
  misc_feature (1)..(243): Homolog of NCBI NO: 34909318 NR Description: OSJNBb0021A09.5 [Oryza sativa (japonica
  misc_feature (1)..(245): Homolog of NCBI NO: 15222616 NR Description: hypothetical protein; protein id: At1g64090.1, by cDNA: gi_17381217 [Arabidopsis thaliana] F22C12.15 [Arabidopsis thaliana] >gi|17381218|gb|AAL36421.1|
  misc_feature (28)..(243): Homolog of NCBI NO: 34904202 NR Description: P0492F05.25 [Oryza sativa (japonica
  misc_feature (1)..(33): Homolog of NCBI NO: 34904202 NR Description: P0492F05.25 [Oryza sativa (japonica
  misc_feature (1)..(244): Homolog of NCBI NO: 18406991 NR Description: expressed protein; protein id: At2g46170.1, by cDNA: gi_15450758, supported by cDNA: gi_18491130 [Arabidopsis >gi|25408969|pir||E84899 hypothetical protein At2g46170
  misc_feature (16)..(235): Homolog of NCBI NO: 15234108 NR Description: hypothetical protein; protein id: At4g01230.1
  misc_feature (1)..(242): Homolog of NCBI NO: 15233147 NR Description: putative protein; protein id: At3g61560.1

SEQ ID NO: 74415 - protein, 182 aa, Arabidopsis thaliana; identical to SEQ ID NO: 35498
  peptide (1)..(182): Ceres Seq. ID no. 5673307
  misc_feature: Pfam Name: Reticulon Pfam Description: Reticulon
  misc_feature (1)..(182): Homolog of NCBI NO: 15237093 NR Description: putative protein; protein id: At4g11220.1, by cDNA: 23536., supported by cDNA: gi_14334419, supported by gi_15081760, supported by cDNA: gi_16209686 [Arabidopsis
  misc_feature (1)..(182): Homolog of NCBI NO: 15236556 NR Description: putative protein; protein id: At4g23630.1, by cDNA: 39185., supported by cDNA: gi_15215585 [Arabidopsis
  misc_feature (1)..(182): Homolog of NCBI NO: 15238125 NR Description: putative protein; protein id: At5g41600.1, by cDNA: gi_14334529, supported by cDNA: gi_16323068 [Arabidopsis >gi|10178014|dbj|BAB11466.1| contains similarity to 24 kDa seed
  misc_feature (1)..(180): Homolog of NCBI NO: 34909318 NR Description: OSJNBb0021A09.5 [Oryza sativa (japonica
  misc_feature (1)..(182): Homolog of NCBI NO: 15222616 NR Description: hypothetical protein; protein id: At1g64090.1, by cDNA: gi_17381217 [Arabidopsis thaliana] F22C12.15 [Arabidopsis thaliana] >gi|17381218|gb|AAL36421.1|
  misc_feature (1)..(180): Homolog of NCBI NO: 34904202 NR Description: P0492F05.25 [Oryza sativa (japonica
  misc_feature (1)..(181): Homolog of NCBI NO: 18406991 NR Description: expressed protein; protein id: At2g46170.1, by cDNA: gi_15450758, supported by cDNA: gi_18491130 [Arabidopsis >gi|25408969|pir||E84899 hypothetical protein At2g46170
  misc_feature (1)..(172): Homolog of NCBI NO: 15234108 NR Description: hypothetical protein; protein id: At4g01230.1
  misc_feature (1)..(179): Homolog of NCBI NO: 15233147 NR Description: putative protein; protein id: At3g61560.1
  misc_feature (1)..(182): Homolog of NCBI NO: 34897094 NR Description: unknown protein [Oryza sativa (japonica

SEQ ID NO: 74416 - DNA, 1589 bp, Arabidopsis thaliana
  misc_feature (1)..(1589): Ceres Seq. ID no. 5673363
  misc_feature: MA Experiment ID: 108434 Result: Down-regulated in Transcription
  misc_feature: MA Experiment 108434 PARAMETER Experiment Name: At_Root_Tips_cDNA_P Parameter: Tissue Value: Root Tips
  misc_feature: MA Experiment ID: 108579 Result: Up-regulated in Transcription
  misc_feature: MA Experiment 108579 PARAMETER Experiment Name: At_4deg_Cold_cDNA_P Parameter: Temperature (deg C) Value: 4 vs. 22
  misc_feature: MA Experiment 108579 PARAMETER Experiment Name: At_4deg_Cold_cDNA_P Parameter: Timepoint (hr) Value: 6
  misc_feature: MA Experiment 108579 PARAMETER Experiment Name: At_4deg_Cold_cDNA_P Parameter: Tissue Value: Aerial
  misc_feature: MA Experiment ID: 108595 Result: Down-regulated in Transcription
  misc_feature: MA Experiment 108595 PARAMETER Experiment Name: At_Ler-pi_Ovule_cDNA_P Parameter: Plant Line Value: null
  misc_feature: MA Experiment ID: 20000185 Result: Up-regulated in Transcription
  misc_feature: MA Experiment 20000185 PARAMETER Experiment Name: At_Roots__P Parameter: Age (day) Value: 7 vs. 21
  misc_feature: MA Experiment 20000185 PARAMETER Experiment Name: At_Roots__P Parameter: Organism Value: A. thaliana
  misc_feature: MA Experiment 20000185 PARAMETER Experiment Name: At_Roots__P Parameter: Tissue Value: Roots vs. Whole Plant
  misc_feature: MA Experiment ID: 20000224 Result: Up-regulated in Transcription
  misc_feature: MA Experiment ID: 20000439 Result: Up-regulated in Transcription
  misc_feature: MA Experiment 20000439 PARAMETER Experiment Name: At_Roots__P Parameter: Age (day) Value: 14 vs. 21
  misc_feature: MA Experiment 20000439 PARAMETER Experiment Name: At_Roots__P Parameter: Organism Value: A. thaliana
  misc_feature: MA Experiment 20000439 PARAMETER Experiment Name: At_Roots__P Parameter: Tissue Value: Roots vs. Whole Plant
  misc_feature: MA Experiment ID: 20000451 Result: Up-regulated in Transcription
  misc_feature: MA Experiment 20000451 PARAMETER Experiment Name: At_CS6879_Shoots-Roots_P Parameter: Age (day) Value: 14
  misc_feature: MA Experiment 20000451 PARAMETER Experiment Name: At_CS6879_Shoots-Roots_P Parameter: Organism Value: A. thaliana
  misc_feature: MA Experiment 20000451 PARAMETER Experiment Name: At_CS6879_Shoots-Roots_P Parameter: Plant Line Value: CS6879 vs. WS
  misc_feature: MA Experiment 20000451 PARAMETER Experiment Name: At_CS6879_Shoots-Roots_P Parameter: Tissue Value: Roots
  misc_feature: MA Experiment ID: 20001451 Result: Down-regulated in Transcription
  misc_feature: MA Experiment 20001451 PARAMETER Experiment Name: At_Far-red-induction_P Parameter: Age (day) Value: 7
  misc_feature: MA Experiment 20001451 PARAMETER Experiment Name: At_Far-red-induction_P Parameter: Light Value: Far-red vs. White
  misc_feature: MA Experiment 20001451 PARAMETER Experiment Name: At_Far-red-induction_P Parameter: Organism Value: A. thaliana
  misc_feature: MA Experiment 20001451 PARAMETER Experiment Name: At_Far-red-induction_P Parameter: Plant Line Value: Columbia
  misc_feature: MA Experiment 20001451 PARAMETER Experiment Name: At_Far-red-induction_P Parameter: Timepoint (hr) Value: 24
  misc_feature: MA Experiment 20001451 PARAMETER Experiment Name: At_Far-red-induction_P Parameter: Tissue Value: Whole Plant
acaagagccatttgcaattaggcataatatatgtcctaactcaccaaccccctcaaaattgccaccaacttcaaatttctctcctttaaacctttctcaatcatctttcttctgccttggaatcctgatcatggcgtcgtcttctctcacttcgaaatccattctcggatccaccaaactcggttcttcttctcttccctcggagctccgtcgtctctcttctcccgccgttcagatctctctccgtacccaaaccaggaagaacttccagatacaagctactggaagttcatatgggactcattttcgagtttcaacttttggagaatcacatggaggaggagttggttgtatcattgatggttgtcctcctcgtattccacttactgaatctgatttgcaattcgatctcgatagaaggaggcctggtcagagcaggatcacaactcctagaaaagagactgatacttgccggatatcgtctggagtctctgaaggaatgacgacaggaacacctatccatgtgtttgtaccaaacacagatcagagaggacttgattacagtgaaatgtcggttgcctatagaccatcgcatgctgatgcaacttatgacatgaagtatggtgtcagatcagtgcagggtggaggaagatcttcagctagagagaccattggaagagttgctcctggagctttggccaagaaaattttgaagcaatttgcaggaactgagattcttgcctatgtctcgcaagttcaccatgttgtacttccagaagaattggtagaccacgagaatttaacactcgaacagatagaaaataacattgtcagatgccctaatcccgagtatgcggaaaagatgatagctgcgattgatgctgtcaggacaaaagggaactctgttggtggtgttgtgacctgcattgttcggaatgctccacgtgggcttggtacaccggttttcgataaacttgaagcagaactggcaaaagcttgtatgtcgctacctgcaactaagggatttgagtttggaagcggctttgcaggtacctttttgactggtcttgaacacaatgatgagttctataccgatgaaaatggaagaatacgtaccagaaccaaccgatctggtggaattcagggagggatctcaaatggtgaaataataaacatgagagtagccttcaagccaacatcaacaattggaaggaagcaaaatacggtaaccagagacaaggtagaaaccgaaatgattgcgcgtggtcgtcatgatccttgtgttgttccacgagctgtgccaatggtggaagcaatggtggctctagttcttgtggatcaattgatggcgcaatacgcacaatgccatttgtttccaataaatccagagttgcaggaacctctccagatagagcagccgcaaaatgctactgctttgtaagcaaatctcgagaagataaagagtcatagagagtgagagttcgcttttgttgtgtgattattatgctgaataaaaaaatgttaattttgtgcccaccagaaaaacaaagaacatgattttttataagaggatttgcttctatatcatt

SEQ ID NO: 74417 - protein, 479 aa, Arabidopsis thaliana; identical to SEQ ID NO: 42485
  peptide (1)..(479): Ceres Seq. ID no. 5673364
  misc_feature (102)..(452): Pfam Name: Chorismate synthase Pfam Description: Chorismate synthase
  misc_feature (44)..(479): Homolog of NCBI NO: 18402389 NR Description: chorismate synthase, putative; protein id: supported by cDNA: gi_15982823 [Arabidopsis thaliana]
  misc_feature (44)..(479): Homolog of NCBI NO: 12229700 NR Description: Chorismate synthase, chloroplast precursor (5-
  misc_feature (50)..(476): Homolog of NCBI NO: 2492952 NR Description: Chorismate synthase 1, chloroplast precursor (5-
  misc_feature (46)..(478): Homolog of NCBI NO: 114182 NR Description: Chorismate synthase, chloroplast precursor (5-
  misc_feature (44)..(476): Homolog of NCBI NO: 2492953 NR Description: Chorismate synthase 2, chloroplast precursor (5-
  misc_feature (44)..(349): Homolog of NCBI NO: 11094811 NR Description: chorismate synthase precursor, putative, 3'
  misc_feature (95)..(457): Homolog of NCBI NO: 22298006 NR Description: chorismate synthase [Thermosynechococcus BP-1] >gi|22294184|dbj|BAC08015.1| chorismate synthase
  misc_feature (95)..(455): Homolog of NCBI NO: 16330007 NR Description: chorismate synthase [Synechocystis sp. PCC 6803]
  misc_feature (95)..(456): Homolog of NCBI NO: 23039390 NR Description: hypothetical protein [Trichodesmium erythraeum
  misc_feature (95)..(455): Homolog of NCBI NO: 23126882 NR Description: hypothetical protein [Nostoc punctiforme]

SEQ ID NO: 74418 - protein, 436 aa, Arabidopsis thaliana; identical to SEQ ID NO: 42486
  peptide (1)..(436): Ceres Seq. ID no. 5673365
  misc_feature (59)..(409): Pfam Name: Chorismate synthase Pfam Description: Chorismate synthase
  misc_feature (1)..(436): Homolog of NCBI NO: 18402389 NR Description: chorismate synthase, putative; protein id: supported by cDNA: gi_15982823 [Arabidopsis thaliana]
  misc_feature (1)..(436): Homolog of NCBI NO: 12229700 NR Description: Chorismate synthase, chloroplast precursor (5-
  misc_feature (7)..(433): Homolog of NCBI NO: 2492952 NR Description: Chorismate synthase 1, chloroplast precursor (5-
  misc_feature (3)..(435): Homolog of NCBI NO: 114182 NR Description: Chorismate synthase, chloroplast precursor (5-
  misc_feature (1)..(433): Homolog of NCBI NO: 2492953 NR Description: Chorismate synthase 2, chloroplast precursor (5-
  misc_feature (1)..(306): Homolog of NCBI NO: 11094811 NR Description: chorismate synthase precursor, putative, 3'
  misc_feature (52)..(414): Homolog of NCBI NO: 22298006 NR Description: chorismate synthase [Thermosynechococcus BP-1] >gi|22294184|dbj|BAC08015.1| chorismate synthase
  misc_feature (52)..(412): Homolog of NCBI NO: 16330007 NR Description: chorismate synthase [Synechocystis sp. PCC 6803]
  misc_feature (52)..(413): Homolog of NCBI NO: 23039390 NR Description: hypothetical protein [Trichodesmium erythraeum
  misc_feature (52)..(412): Homolog of NCBI NO: 23126882 NR Description: hypothetical protein [Nostoc punctiforme]

SEQ ID NO: 74419 - protein, 313 aa, Arabidopsis thaliana; identical to SEQ ID NO: 42487
  peptide (1)..(313): Ceres Seq. ID no. 5673366
  misc_feature (1)..(286): Pfam Name: Chorismate synthase Pfam Description: Chorismate synthase
  misc_feature (1)..(313): Homolog of NCBI NO: 18402389 NR Description: chorismate synthase, putative; protein id: supported by cDNA: gi_15982823 [Arabidopsis thaliana]
  misc_feature (1)..(313): Homolog of NCBI NO: 12229700 NR Description: Chorismate synthase, chloroplast precursor (5-
  misc_feature (1)..(310): Homolog of NCBI NO: 2492952 NR Description: Chorismate synthase 1, chloroplast precursor (5-
  misc_feature (1)..(312): Homolog of NCBI NO: 114182 NR Description: Chorismate synthase, chloroplast precursor (5-
  misc_feature (1)..(310): Homolog of NCBI NO: 2492953 NR Description: Chorismate synthase 2, chloroplast precursor (5-
  misc_feature (1)..(183): Homolog of NCBI NO: 11094811 NR Description: chorismate synthase precursor, putative, 3'
  misc_feature (1)..(291): Homolog of NCBI NO: 22298006 NR Description: chorismate synthase [Thermosynechococcus BP-1] >gi|22294184|dbj|BAC08015.1| chorismate synthase
  misc_feature (1)..(289): Homolog of NCBI NO: 16330007 NR Description: chorismate synthase [Synechocystis sp. PCC 6803]
  misc_feature (1)..(290): Homolog of NCBI NO: 23039390 NR Description: hypothetical protein [Trichodesmium erythraeum
  misc_feature (1)..(289): Homolog of NCBI NO: 23126882 NR Description: hypothetical protein [Nostoc punctiforme]

SEQ ID NO: 74420 - DNA, 1351 bp, Arabidopsis thaliana
  misc_feature (1)..(1351): Ceres Seq. ID no. 5673476
  misc_feature: MA Experiment ID: 108434 Result: Up-regulated in Transcription
  misc_feature: MA Experiment 108434 PARAMETER Experiment Name: At_Root_Tips_cDNA_P Parameter: Tissue Value: Root Tips
  misc_feature: MA Experiment ID: 108461 Result: Down-regulated in Transcription
  misc_feature: MA Experiment 108461 PARAMETER Experiment Name: At_Germinating_Seeds_cDNA_P Parameter: Age (day) Value: 1 vs. 0
  misc_feature: MA Experiment 108461 PARAMETER Experiment Name: At_Germinating_Seeds_cDNA_P Parameter: Tissue Value: Germinating Seeds
  misc_feature: MA Experiment ID: 108462 Result: Down-regulated in Transcription
  misc_feature: MA Experiment 108462 PARAMETER Experiment Name: At_Germinating_Seeds_cDNA_P Parameter: Age (day) Value: 2 vs. 0
  misc_feature: MA Experiment 108462 PARAMETER Experiment Name: At_Germinating_Seeds_cDNA_P Parameter: Tissue Value: Germinating Seeds
  misc_feature: MA Experiment ID: 108463 Result: Down-regulated in Transcription
  misc_feature: MA Experiment 108463 PARAMETER Experiment Name: At_Germinating_Seeds_cDNA_P Parameter: Age (day) Value: 3 vs. 0
  misc_feature: MA Experiment 108463 PARAMETER Experiment Name: At_Germinating_Seeds_cDNA_P Parameter: Tissue Value: Germinating Seeds
  misc_feature: MA Experiment ID: 108464 Result: Down-regulated in Transcription
  misc_feature: MA Experiment 108464 PARAMETER Experiment Name: At_Germinating_Seeds_cDNA_P Parameter: Age (day) Value: 4 vs. 0
  misc_feature: MA Experiment 108464 PARAMETER Experiment Name: At_Germinating_Seeds_cDNA_P Parameter: Tissue Value: Germinating Seeds
  misc_feature: MA Experiment ID: 108572 Result: Down-regulated in Transcription
  misc_feature: MA Experiment 108572 PARAMETER Experiment Name: At_Drought_cDNA_P Parameter: Timepoint (hr) Value: 1
  misc_feature: MA Experiment 108572 PARAMETER Experiment Name: At_Drought_cDNA_P Parameter: Tissue Value: Aerial
  misc_feature: MA Experiment 108572 PARAMETER Experiment Name: At_Drought_cDNA_P Parameter: Treatment Value: Drought vs. No Drought
  misc_feature: MA Experiment ID: 20000180 Result: Down-regulated in Transcription
  misc_feature: MA Experiment 20000180 PARAMETER Experiment Name: At_Germinating_Seeds_P Parameter: Age (hr) Value: 24 vs. 0
  misc_feature: MA Experiment 20000180 PARAMETER Experiment Name: At_Germinating_Seeds_P Parameter: Tissue Value: Germinating Seeds
  misc_feature: MA Experiment ID: 20001557 Result: Up-regulated in Transcription
  misc_feature: MA Experiment 20001557 PARAMETER Experiment Name: At_Drought_Soil_Dry_P Parameter: Age (day) Value: 27
  misc_feature: MA Experiment 20001557 PARAMETER Experiment Name: At_Drought_Soil_Dry_P Parameter: Organism Value: A. thaliana
  misc_feature: MA Experiment 20001557 PARAMETER Experiment Name: At_Drought_Soil_Dry_P Parameter: Plant Line Value: WS
  misc_feature: MA Experiment 20001557 PARAMETER Experiment Name: At_Drought_Soil_Dry_P Parameter: Post Timepoint (hr) Value: 3
  misc_feature: MA Experiment 20001557 PARAMETER Experiment Name: At_Drought_Soil_Dry_P Parameter: Post-Treatment Value: Re-Water vs. No Drought
  misc_feature: MA Experiment 20001557 PARAMETER Experiment Name: At_Drought_Soil_Dry_P Parameter: Timepoint (day) Value: 13
  misc_feature: MA Experiment 20001557 PARAMETER Experiment Name: At_Drought_Soil_Dry_P Parameter: Treatment Value: Drought vs. No Drought
  misc_feature: MA Experiment ID: 20001558 Result: Up-regulated in Transcription
  misc_feature: MA Experiment 20001558 PARAMETER Experiment Name: At_Drought_Soil_Dry_P Parameter: Age (day) Value: 27
  misc_feature: MA Experiment 20001558 PARAMETER Experiment Name: At_Drought_Soil_Dry_P Parameter: Organism Value: A. thaliana
  misc_feature: MA Experiment 20001558 PARAMETER Experiment Name: At_Drought_Soil_Dry_P Parameter: Plant Line Value: WS
  misc_feature: MA Experiment 20001558 PARAMETER Experiment Name: At_Drought_Soil_Dry_P Parameter: Post Timepoint (hr) Value: 6
  misc_feature: MA Experiment 20001558 PARAMETER Experiment Name: At_Drought_Soil_Dry_P Parameter: Post-Treatment Value: Re-Water vs. No Drought
  misc_feature: MA Experiment 20001558 PARAMETER Experiment Name: At_Drought_Soil_Dry_P Parameter: Timepoint (day) Value: 13
  misc_feature: MA Experiment 20001558 PARAMETER Experiment Name: At_Drought_Soil_Dry_P Parameter: Treatment Value: Drought vs. No Drought
ccgtttgttcttcatctcctcgccgccgcctcctactctctctttctctctaaattgctcaattctctcggccacagttctgctatagacctagacaaggatggtgactaaagcagaaaaacaattcgccaaaaatttcaacatagacgatctccctgacgtccctgccggacttcctccacatctcaaagcccagcaaactcgtgtcgtctctaaaaacaacgctcctgctcatactgcgagtgccatttactcgggtacctatgtttcttctacggaagaggacgacaatgtgaagctaggaaacttctatgataacttcaaagttgatgtggttagtctcacaaagacagatatggaatttgatatgattggtattgatgcagcgtttgccaatgcattccgaaggatccttatagctgaggttccttcaatggctattgaaaaagtgttgatagcgtacaacacatcggttattatagacgaagttcttgctcacaggatgggtcttattccaattgccgcagatccaagactttttgaatatttatccgaacatgatcaggcgaatgaaaagaacaccattgtattcaaactccatgtgaaatgtccgaaaaatagaccacgtcttaaagttttaacgagtgatttaaaatggttaccaaatggaagtgagcttctgagagaatcggaaaataaaacctcaaagccaaaaacttacacttcattcagttgcagccaagattcattacctgaatttgctaataatcctatcactccatgcgacctcgatatcttgatagcaaaactcgcccctggtcaggaaatcgagctcgaagctcatgcggttaagggcattggtaaaacacatgcaaagtggtctccagtagggactgcttggtatagaatgcatcctgaggtggttctacgtggggaagttgaggatgaacttgctgaacgacttgtaaacgtctgcccacagaatgttttcgacattgaagacatgggaaaaggtaagaaaagggcaacagtagcgcagccacgtaagtgcacattgtgtaaggaatgcgtaagagacgatgatttggtagaccatgtggatcttggcagtgttaagaaccattttatatttaacattgagtccaccggatcactgcctccagaggttctcttcactgaagctgtgaagatattggaagctaaatgtgaagctataaccgacttttgagttctggtttagttcaattttgaattgtctgtctatcaatgtttctcctcctattgataaattaccaacaaacaacattgacatatttatttatacggttgttgttcaatttggattttcatt

SEQ ID NO: 74421 - protein, 375 aa, Arabidopsis thaliana; identical to SEQ ID NO: 40103
  peptide (1)..(375): Ceres Seq. ID no. 5673477
  misc_feature (117)..(261): Pfam Name: RNA polymerase Rpb3/RpoA insert domain Pfam Description: RNA polymerase Rpb3/RpoA insert domain
  misc_feature (1)..(375): Homolog of NCBI NO: 15219820 NR Description: RNA polymerase subunit; protein id: At1g60850.1, by cDNA: 21961., supported by cDNA: gi_514321 [Arabidopsis
  misc_feature (1)..(375): Homolog of NCBI NO: 514322 NR Description: RNA polymerase subunit >gi|1586549|prf||2204246A
  misc_feature (1)..(375): Homolog of NCBI NO: 21592304 NR Description: RNA polymerase subunit [Arabidopsis thaliana]
  misc_feature (1)..(372): Homolog of NCBI NO: 15219773 NR Description: RNA polymerase subunit; protein id: At1g60620.1, by cDNA: gi_14423463, supported by cDNA: gi_514323 [Arabidopsis >gi|25288353|pir||D96631 RNA polymerase subunit (isoform subunit
  misc_feature (29)..(374): Homolog of NCBI NO: 3914807 NR Description: DNA-directed RNA polymerase I 40 kDa polypeptide (RPA39) >gi|2266929|gb|AAC14354.1| RNA polymerase I subunit
  misc_feature (45)..(374): Homolog of NCBI NO: 14198113 NR Description: Unknown (protein for IMAGE:3448039) [Homo sapiens]
  misc_feature (45)..(370): Homolog of NCBI NO: 34193909 NR Description: RNA polymerase 1-1 [Danio rerio]
  misc_feature (29)..(374): Homolog of NCBI NO: 34874462 NR Description: similar to DNA-directed RNA polymerase I 40 kDa
  misc_feature (29)..(374): Homolog of NCBI NO: 6677787 NR Description: RNA polymerase 1-1; RNA polymerase 1-1 (40 kDa
  misc_feature (29)..(374): Homolog of NCBI NO: 18266895 NR Description: DNA-directed RNA polymerase I 40 kDa polypeptide

SEQ ID NO: 74422 - protein, 290 aa, Arabidopsis thaliana; identical to SEQ ID NO: 40104
  peptide (1)..(290): Ceres Seq. ID no. 5673478
  misc_feature (32)..(176): Pfam Name: RNA polymerase Rpb3/RpoA insert domain Pfam Description: RNA polymerase Rpb3/RpoA insert domain
  misc_feature (1)..(290): Homolog of NCBI NO: 15219820 NR Description: RNA polymerase subunit; protein id: At1g60850.1, by cDNA: 21961., supported by cDNA: gi_514321 [Arabidopsis
  misc_feature (1)..(290): Homolog of NCBI NO: 514322 NR Description: RNA polymerase subunit >gi|1586549|prf||2204246A
  misc_feature (1)..(290): Homolog of NCBI NO: 21592304 NR Description: RNA polymerase subunit [Arabidopsis thaliana]
  misc_feature (1)..(287): Homolog of NCBI NO: 15219773 NR Description: RNA polymerase subunit; protein id: At1g60620.1, by cDNA: gi_14423463, supported by cDNA: gi_514323 [Arabidopsis >gi|25288353|pir||D96631 RNA polymerase subunit (isoform subunit
  misc_feature (1)..(289): Homolog of NCBI NO: 3914807 NR Description: DNA-directed RNA polymerase I 40 kDa polypeptide (RPA39) >gi|2266929|gb|AAC14354.1| RNA polymerase I subunit
  misc_feature (1)..(289): Homolog of NCBI NO: 14198113 NR Description: Unknown (protein for IMAGE:3448039) [Homo sapiens]
  misc_feature (1)..(285): Homolog of NCBI NO: 34193909 NR Description: RNA polymerase 1-1 [Danio rerio]
  misc_feature (1)..(289): Homolog of NCBI NO: 34874462 NR Description: similar to DNA-directed RNA polymerase I 40 kDa
  misc_feature (1)..(289): Homolog of NCBI NO: 6677787 NR Description: RNA polymerase 1-1; RNA polymerase 1-1 (40 kDa
  misc_feature (1)..(289): Homolog of NCBI NO: 18266895 NR Description: DNA-directed RNA polymerase I 40 kDa polypeptide

SEQ ID NO: 74423 - protein, 286 aa, Arabidopsis thaliana; identical to SEQ ID NO: 40105
  peptide (1)..(286): Ceres Seq. ID no. 5673479
  misc_feature (28)..(172): Pfam Name: RNA polymerase Rpb3/RpoA insert domain Pfam Description: RNA polymerase Rpb3/RpoA insert domain
  misc_feature (1)..(286): Homolog of NCBI NO: 15219820 NR Description: RNA polymerase subunit; protein id: At1g60850.1, by cDNA: 21961., supported by cDNA: gi_514321 [Arabidopsis
  misc_feature (1)..(286): Homolog of NCBI NO: 514322 NR Description: RNA polymerase subunit >gi|1586549|prf||2204246A
  misc_feature (1)..(286): Homolog of NCBI NO: 21592304 NR Description: RNA polymerase subunit [Arabidopsis thaliana]
  misc_feature (1)..(283): Homolog of NCBI NO: 15219773 NR Description: RNA polymerase subunit; protein id: At1g60620.1, by cDNA: gi_14423463, supported by cDNA: gi_514323 [Arabidopsis >gi|25288353|pir||D96631 RNA polymerase subunit (isoform subunit
  misc_feature (1)..(285): Homolog of NCBI NO: 3914807 NR Description: DNA-directed RNA polymerase I 40 kDa polypeptide (RPA39) >gi|2266929|gb|AAC14354.1| RNA polymerase I subunit
  misc_feature (1)..(285): Homolog of NCBI NO: 14198113 NR Description: Unknown (protein for IMAGE:3448039) [Homo sapiens]
  misc_feature (1)..(281): Homolog of NCBI NO: 34193909 NR Description: RNA polymerase 1-1 [Danio rerio]
  misc_feature (1)..(285): Homolog of NCBI NO: 34874462 NR Description: similar to DNA-directed RNA polymerase I 40 kDa
  misc_feature (1)..(285): Homolog of NCBI NO: 6677787 NR Description: RNA polymerase 1-1; RNA polymerase 1-1 (40 kDa
  misc_feature (1)..(285): Homolog of NCBI NO: 18266895 NR Description: DNA-directed RNA polymerase I 40 kDa polypeptide

SEQ ID NO: 74424 - DNA, 1037 bp, Arabidopsis thaliana
  misc_feature (1)..(1037): Ceres Seq. ID no. 5673819
  misc_feature: MA Experiment ID: 108488 Result: Down-regulated in Transcription
  misc_feature: MA Experiment ID: 108595 Result: Down-regulated in Transcription
  misc_feature: MA Experiment 108595 PARAMETER Experiment Name: At_Ler-pi_Ovule_cDNA_P Parameter: Plant Line Value: null
  misc_feature: MA Experiment ID: 20000224 Result: Down-regulated in Transcription
atatcatctcctgctaaaagcctaaaaagctaaaactagtcgtgactcgtcgtcgtctgatattaccagattcctgagaatttgagcctaatccttcatcaccaagctaagtctcaagatctgattgtggttgtggttgacttcttcttcaaaggtttcacgagtacaataatgagtcaaaagggtttgatatatagctttgttgctaaaggaacagttgttctagcagagcatactccttattcaggaaactttagcaccattgctgttcaatgtctgcagaagctacccacaaatagcagcaagtatacttactcttgcgatggtcatactttcaatttccttgttgacaatggctttgtgtttctagtggttgctgatgagtccaccggaagaagtgttcctttcgtgtttctcgaacgggtcaaggaagactttaagaagcggtatgaagcgagtataaagaatgatgagcgacatcctcttgcggatgaggacgaagatgatgatttgtttggagatcggtttagcgttgcatacaatcttgacagggagttcgggcccatactaaaggagcatatgcagtattgtatgagccatccagaagagatgagcaaactttctaagttgaaggcccaaataactgaggtcaaggggatcatgatggacaacattgagaaggttctggacagaggagagaagatcgaacttctggttgacaaaaccgagaacctacagttccaggcagatagcttccagagacaaggaaggcagttaagaaggaagatgtggctacagagtctgcagatgaagctgatggtggctggtgctgttttctcttttattctcatcgtttgggttgttgcttgtggaggtttcaaatgctcatcatgatgtttcgcttcgtttgtatctgttttaacacttaaattgcatgctcatgtttgtacatggaagaacttataataacatatcatcatatcatcatcatctcccacatgctgtgatgctatatatataaaaaaaatgtttttgtt

SEQ ID NO: 74425 - protein, 240 aa, Arabidopsis thaliana; identical to SEQ ID NO: 21608
  peptide (1)..(240): Ceres Seq. ID no. 5673820
  misc_feature (146)..(234): Pfam Name: Synaptobrevin Pfam Description: Synaptobrevin
  misc_feature (1)..(240): Homolog of NCBI NO: 15232475 NR Description: synaptobrevin -like protein; protein id:
  misc_feature (122)..(239): Homolog of NCBI NO: 30685375 NR Description: synaptobrevin -related [Arabidopsis thaliana] putative synaptobrevin [Arabidopsis thaliana]
  misc_feature (1)..(93): Homolog of NCBI NO: 30685375 NR Description: synaptobrevin -related [Arabidopsis thaliana] putative synaptobrevin [Arabidopsis thaliana]
  misc_feature (122)..(239): Homolog of NCBI NO: 27805753 NR Description: Vesicle-associated membrane protein 725
  misc_feature (1)..(93): Homolog of NCBI NO: 27805753 NR Description: Vesicle-associated membrane protein 725
  misc_feature (122)..(239): Homolog of NCBI NO: 15220315 NR Description: synaptobrevin 7B, putative; protein id:
  misc_feature (1)..(93): Homolog of NCBI NO: 15220315 NR Description: synaptobrevin 7B, putative; protein id:
  misc_feature (104)..(238): Homolog of NCBI NO: 29150380 NR Description: synaptobrevin-like protein [Oryza sativa
  misc_feature (1)..(93): Homolog of NCBI NO: 29150380 NR Description: synaptobrevin-like protein [Oryza sativa
  misc_feature (122)..(238): Homolog of NCBI NO: 15220943 NR Description: synaptobrevin 7B, putative; protein id:

SEQ ID NO: 74426 - DNA, 1750 bp, Arabidopsis thaliana
  misc_feature (1)..(1750): Ceres Seq. ID no. 5673947
  misc_feature: MA Experiment ID: 20000180 Result: Up-regulated in Transcription
  misc_feature: MA Experiment 20000180 PARAMETER Experiment Name: At_Germinating_Seeds_P Parameter: Age (hr) Value: 24 vs. 0
  misc_feature: MA Experiment 20000180 PARAMETER Experiment Name: At_Germinating_Seeds_P Parameter: Tissue Value: Germinating Seeds
  misc_feature: MA Experiment ID: 20000182 Result: Down-regulated in Transcription
  misc_feature: MA Experiment 20000182 PARAMETER Experiment Name: At_2mM_SA_P Parameter: Age (day) Value: 14
  misc_feature: MA Experiment 20000182 PARAMETER Experiment Name: At_2mM_SA_P Parameter: Organism Value: A. thaliana
  misc_feature: MA Experiment 20000182 PARAMETER Experiment Name: At_2mM_SA_P Parameter: Plant Line Value: WS
  misc_feature: MA Experiment 20000182 PARAMETER Experiment Name: At_2mM_SA_P Parameter: Timepoint (hr) Value: 6
  misc_feature: MA Experiment 20000182 PARAMETER Experiment Name: At_2mM_SA_P Parameter: Tissue Value: Aerial
  misc_feature: MA Experiment 20000182 PARAMETER Experiment Name: At_2mM_SA_P Parameter: Treatment Value: 2mM SA vs. No Treatment
  misc_feature: MA Experiment ID: 20000227 Result: Up-regulated in Transcription
  misc_feature: MA Experiment 20000227 PARAMETER Experiment Name: At_Root-Tips-vs-Tops_P Parameter: Tissue Value: Root Tips vs. Root Tops
  misc_feature: MA Experiment ID: 20000264 Result: Down-regulated in Transcription
  misc_feature: MA Experiment 20000264 PARAMETER Experiment Name: At_Open_Flower_P Parameter: Age (day) Value: 21
  misc_feature: MA Experiment 20000264 PARAMETER Experiment Name: At_Open_Flower_P Parameter: Plant Line Value: WS
  misc_feature: MA Experiment 20000264 PARAMETER Experiment Name: At_Open_Flower_P Parameter: Tissue Value: Open Flower vs. Whole Plant
  misc_feature: MA Experiment ID: 20000794 Result: Down-regulated in Transcription
  misc_feature: MA Experiment 20000794 PARAMETER Experiment Name: At_Petals_P Parameter: Age (day) Value: 23-25 days
  misc_feature: MA Experiment 20000794 PARAMETER Experiment Name: At_Petals_P Parameter: Plant Line Value: WS
  misc_feature: MA Experiment 20000794 PARAMETER Experiment Name: At_Petals_P Parameter: Tissue Value: Petals vs. Whole plant
  misc_feature: MA Experiment ID: 20001247 Result: Up-regulated in Transcription
  misc_feature: MA Experiment 20001247 PARAMETER Experiment Name: At_Far-red-induction_P Parameter: Age (day) Value: 7
  misc_feature: MA Experiment 20001247 PARAMETER Experiment Name: At_Far-red-induction_P Parameter: Light Value: Far-red vs. White
  misc_feature: MA Experiment 20001247 PARAMETER Experiment Name: At_Far-red-induction_P Parameter: Organism Value: A. thaliana
  misc_feature: MA Experiment 20001247 PARAMETER Experiment Name: At_Far-red-induction_P Parameter: Plant Line Value: Columbia
  misc_feature: MA Experiment 20001247 PARAMETER Experiment Name: At_Far-red-induction_P Parameter: Timepoint (hr) Value: 1
  misc_feature: MA Experiment 20001247 PARAMETER Experiment Name: At_Far-red-induction_P Parameter: Tissue Value: Whole Plant
aacttggactctgtttatatcaacctgattttggagatttatttgtaaagtttaggaagaaatgggaggtgacttgaaaagccagctatctagagagagccatgtgtttggacttaaggtgtgggaagtaattggtatagctgttgcattgctcatcatagctatcctctctgttctttcgtgttgtcttacttcgaaaaagaaatcaagaagatcgaaaaccggtcttccggttatccaaactcctccggtggtctccaaagagatcagagaagtgagagttgagcatgtctcagctagtaactttgctcctggtgaaggcattcttctaacaattcaggacaaaaataacaaagactcagaaaaagtcatggttcatttggatatgaggaagaagagaagtagtagtggccggtcagggtcgtttcatcatttagagatcatagataaacattctgactctgctgaagaagtttctgcttcttcatcattgtataatattgcaactccatctccattgtctggtttgcctgaatctcaccttggttggggacactggtttactttgagagatcttgaaacagcaactaacagattctctaaagagaatgttataggtgaaggcggttacggtgttgtctacagaggagagttaatgaatggaactcctgttgcagttaaaaagattcttaaccagttgggacaagctgagaaagagtttcgagtcgaggttgatgctatcggtcatgtgcggcacaagaacttggttcggcttcttggttactgcattgaaggcacacacaggatattggtttacgaatatgtgaataatggaaacttagaacaatggcttcatggagcaatgagacaacatggatatctaacttgggaagcaaggatgaaggttctgatcggcacatcaaaagctcttgcatatctgcatgaagcaattgagccaaaagtagtgcatagagacatcaagtcaagcaacattctgatcaatgacgaattcaacgcaaaggtttcagattttggccttgctaagttgcttggtgctggaaaaagccatgtgacaactcgagtgatgggaacatttgggtacgttgctcctgaatatgcaaactcagggttgttaaatgaaaagagtgatgtctacagctttggtgttgttctcttagaagcaatcacaggacgagaccctgtggattacggacgtcctgctcatgaggtgaatctagtggactggttgaagatgatggttgggacaagacgatcagaggaagtagtggatccaaacatagaagtgaagccaccaacaaggtcactgaaacgagctcttttgacggctctaagatgtgttgatccagattcggataagcggccgaagatgagccaagttgtacgtatgcttgagtctgaagaataccccattccaagagaggaccgaaggcgttctagaacgcgagaagggagtatggagataaactcagacactgacatgagtactccagtttcaagatcacagagcaagagacaataatttatcaatctgcgtaagctttcaacgcgtttcatgattatgagctattctttgaacttgttcttatgcattttctgtttgtttgtttttttttggttttgaattgagatgagtagagaccatagaggattgtttgtacatatgaactggatttgtgtttagagctcctacatcaaaataatatattggtgtgtacagtactattgcatc

SEQ ID NO: 74427 - protein, 492 aa, Arabidopsis thaliana
  peptide (1)..(492): Ceres Seq. ID no. 5673948
  misc_feature (179)..(450): Pfam Name: Protein kinase domain Pfam Description: Protein kinase domain
  misc_feature (1)..(492): Homolog of NCBI NO: 18405946 NR Description: expressed protein; protein id: At1g56720.1,
  misc_feature (1)..(492): Homolog of NCBI NO: 21593085 NR Description: Putative protein kinase [Arabidopsis thaliana]
  misc_feature (1)..(492): Homolog of NCBI NO: 25404144 NR Description: probable protein kinase F25P12.84 [imported] - thaliana >gi|9954741|gb|AAG09092.1|AC009323_3 Putative protein
  misc_feature (17)..(491): Homolog of NCBI NO: 15217511 NR Description: putative ser/thr protein kinase; protein id: [Arabidopsis thaliana] >gi|25402546|pir||G86227 hypothetical
  misc_feature (5)..(489): Homolog of NCBI NO: 34894708 NR Description: Putative protein kinase [Oryza sativa (japonica group)] >gi|12328581|dbj|BAB21240.1| Putative protein kinase
  misc_feature (2)..(485): Homolog of NCBI NO: 37535714 NR Description: putative kinase [Oryza sativa (japonica
  misc_feature (1)..(488): Homolog of NCBI NO: 15238840 NR Description: Ser/Thr specific protein kinase - like protein;
  misc_feature (5)..(490): Homolog of NCBI NO: 15228043 NR Description: putative protein kinase; protein id: At2g42960.1
  misc_feature (17)..(486): Homolog of NCBI NO: 15231637 NR Description: receptor-like protein kinase; protein id:
  misc_feature (129)..(482): Homolog of NCBI NO: 22331140 NR Description: serine/threonine protein kinase, putative; id: At3g17420.1, supported by cDNA: gi_17529287, supported by gi_20465832 [Arabidopsis thaliana] >gi|11994680|dbj|BAB02918.1|
MGGDLKSQLSRESHVFGLKVWEVIGIAVALLIIAILSVLSCCLTSKKKSRRSKTGLPVIQTPPVVSKEIREVRVEHVSASNFAPGEGILLTIQDKNNKDSEKVMVHLDMRKKRSSSGRSGSFHHLEIIDKHSDSAEEVSASSSLYNIATPSPLSGLPESHLGWGHWFTLRDLETATNRFSKENVIGEGGYGVVYRGELMNGTPVAVKKILNQLGQAEKEFRVEVDAIGHVRHKNLVRLLGYCIEGTHRILVYEYVNNGNLEQWLHGAMRQHGYLTWEARMKVLIGTSKALAYLHEAIEPKVVHRDIKSSNILINDEFNAKVSDFGLAKLLGAGKSHVTTRVMGTFGYVAPEYANSGLLNEKSDVYSFGVVLLEAITGRDPVDYGRPAHEVNLVDWLKMMVGTRRSEEVVDPNIEVKPPTRSLKRALLTALRCVDPDSDKRPKMSQVVRMLESEEYPIPREDRRRSRTREGSMEINSDTDMSTPVSRSQSKRQ

SEQ ID NO: 74428 - protein, 389 aa, Arabidopsis thaliana
  peptide (1)..(389): Ceres Seq. ID no. 5673949
  misc_feature (76)..(347): Pfam Name: Protein kinase domain Pfam Description: Protein kinase domain
  misc_feature (1)..(389): Homolog of NCBI NO: 18405946 NR Description: expressed protein; protein id: At1g56720.1,
  misc_feature (1)..(389): Homolog of NCBI NO: 21593085 NR Description: Putative protein kinase [Arabidopsis thaliana]
  misc_feature (1)..(389): Homolog of NCBI NO: 25404144 NR Description: probable protein kinase F25P12.84 [imported] - thaliana >gi|9954741|gb|AAG09092.1|AC009323_3 Putative protein
  misc_feature (1)..(388): Homolog of NCBI NO: 15217511 NR Description: putative ser/thr protein kinase; protein id: [Arabidopsis thaliana] >gi|25402546|pir||G86227 hypothetical
  misc_feature (1)..(386): Homolog of NCBI NO: 34894708 NR Description: Putative protein kinase [Oryza sativa (japonica group)] >gi|12328581|dbj|BAB21240.1| Putative protein kinase
  misc_feature (1)..(382): Homolog of NCBI NO: 37535714 NR Description: putative kinase [Oryza sativa (japonica
  misc_feature (1)..(385): Homolog of NCBI NO: 15238840 NR Description: Ser/Thr specific protein kinase - like protein;
  misc_feature (1)..(387): Homolog of NCBI NO: 15228043 NR Description: putative protein kinase; protein id: At2g42960.1
  misc_feature (1)..(383): Homolog of NCBI NO: 15231637 NR Description: receptor-like protein kinase; protein id:
  misc_feature (26)..(379): Homolog of NCBI NO: 22331140 NR Description: serine/threonine protein kinase, putative; id: At3g17420.1, supported by cDNA: gi_17529287, supported by gi_20465832 [Arabidopsis thaliana] >gi|11994680|dbj|BAB02918.1|
MVHLDMRKKRSSSGRSGSFHHLEIIDKHSDSAEEVSASSSLYNIATPSPLSGLPESHLGWGHWFTLRDLETATNRFSKENVIGEGGYGVVYRGELMNGTPVAVKKILNQLGQAEKEFRVEVDAIGHVRHKNLVRLLGYCIEGTHRILVYEYVNNGNLEQWLHGAMRQHGYLTWEARMKVLIGTSKALAYLHEAIEPKVVHRDIKSSNILINDEFNAKVSDFGLAKLLGAGKSHVTTRVMGTFGYVAPEYANSGLLNEKSDVYSFGVVLLEAITGRDPVDYGRPAHEVNLVDWLKMMVGTRRSEEVVDPNIEVKPPTRSLKRALLTALRCVDPDSDKRPKMSQVVRMLESEEYPIPREDRRRSRTREGSMEINSDTDMSTPVSRSQSKRQ

SEQ ID NO: 74429 - protein, 384 aa, Arabidopsis thaliana
  peptide (1)..(384): Ceres Seq. ID no. 5673950
  misc_feature (71)..(342): Pfam Name: Protein kinase domain Pfam Description: Protein kinase domain
  misc_feature (1)..(384): Homolog of NCBI NO: 18405946 NR Description: expressed protein; protein id: At1g56720.1,
  misc_feature (1)..(384): Homolog of NCBI NO: 21593085 NR Description: Putative protein kinase [Arabidopsis thaliana]
  misc_feature (1)..(384): Homolog of NCBI NO: 25404144 NR Description: probable protein kinase F25P12.84 [imported] - thaliana >gi|9954741|gb|AAG09092.1|AC009323_3 Putative protein
  misc_feature (1)..(383): Homolog of NCBI NO: 15217511 NR Description: putative ser/thr protein kinase; protein id: [Arabidopsis thaliana] >gi|25402546|pir||G86227 hypothetical
  misc_feature (1)..(381): Homolog of NCBI NO: 34894708 NR Description: Putative protein kinase [Oryza sativa (japonica group)] >gi|12328581|dbj|BAB21240.1| Putative protein kinase
  misc_feature (1)..(377): Homolog of NCBI NO: 37535714 NR Description: putative kinase [Oryza sativa (japonica
  misc_feature (1)..(380): Homolog of NCBI NO: 15238840 NR Description: Ser/Thr specific protein kinase - like protein;
  misc_feature (1)..(382): Homolog of NCBI NO: 15228043 NR Description: putative protein kinase; protein id: At2g42960.1
  misc_feature (1)..(378): Homolog of NCBI NO: 15231637 NR Description: receptor-like protein kinase; protein id:
  misc_feature (21)..(374): Homolog of NCBI NO: 22331140 NR Description: serine/threonine protein kinase, putative; id: At3g17420.1, supported by cDNA: gi_17529287, supported by gi_20465832 [Arabidopsis thaliana] >gi|11994680|dbj|BAB02918.1|
MRKKRSSSGRSGSFHHLEIIDKHSDSAEEVSASSSLYNIATPSPLSGLPESHLGWGHWFTLRDLETATNRFSKENVIGEGGYGVVYRGELMNGTPVAVKKILNQLGQAEKEFRVEVDAIGHVRHKNLVRLLGYCIEGTHRILVYEYVNNGNLEQWLHGAMRQHGYLTWEARMKVLIGTSKALAYLHEAIEPKVVHRDIKSSNILINDEFNAKVSDFGLAKLLGAGKSHVTTRVMGTFGYVAPEYANSGLLNEKSDVYSFGVVLLEAITGRDPVDYGRPAHEVNLVDWLKMMVGTRRSEEVVDPNIEVKPPTRSLKRALLTALRCVDPDSDKRPKMSQVVRMLESEEYPIPREDRRRSRTREGSMEINSDTDMSTPVSRSQSKRQ

SEQ ID NO: 74430 - DNA, 1303 bp, Arabidopsis thaliana
  misc_feature (1)..(1303): Ceres Seq. ID no. 5674119
  misc_feature: MA Experiment ID: 108462 Result: Up-regulated in Transcription
  misc_feature: MA Experiment 108462 PARAMETER Experiment Name: At_Germinating_Seeds_cDNA_P Parameter: Age (day) Value: 2 vs. 0
  misc_feature: MA Experiment 108462 PARAMETER Experiment Name: At_Germinating_Seeds_cDNA_P Parameter: Tissue Value: Germinating Seeds
  misc_feature: MA Experiment ID: 108464 Result: Up-regulated in Transcription
  misc_feature: MA Experiment 108464 PARAMETER Experiment Name: At_Germinating_Seeds_cDNA_P Parameter: Age (day) Value: 4 vs. 0
  misc_feature: MA Experiment 108464 PARAMETER Experiment Name: At_Germinating_Seeds_cDNA_P Parameter: Tissue Value: Germinating Seeds
  misc_feature: MA Experiment ID: 108572 Result: Up-regulated in Transcription
  misc_feature: MA Experiment 108572 PARAMETER Experiment Name: At_Drought_cDNA_P Parameter: Timepoint (hr) Value: 1
  misc_feature: MA Experiment 108572 PARAMETER Experiment Name: At_Drought_cDNA_P Parameter: Tissue Value: Aerial
  misc_feature: MA Experiment 108572 PARAMETER Experiment Name: At_Drought_cDNA_P Parameter: Treatment Value: Drought vs. No Drought
  misc_feature: MA Experiment ID: 108573 Result: Up-regulated in Transcription
  misc_feature: MA Experiment 108573 PARAMETER Experiment Name: At_Drought_cDNA_P Parameter: Timepoint (hr) Value: 6
  misc_feature: MA Experiment 108573 PARAMETER Experiment Name: At_Drought_cDNA_P Parameter: Tissue Value: Aerial
  misc_feature: MA Experiment 108573 PARAMETER Experiment Name: At_Drought_cDNA_P Parameter: Treatment Value: Drought vs. No Drought
  misc_feature: MA Experiment ID: 108579 Result: Down-regulated in Transcription
  misc_feature: MA Experiment 108579 PARAMETER Experiment Name: At_4deg_Cold_cDNA_P Parameter: Temperature (deg C) Value: 4 vs. 22
  misc_feature: MA Experiment 108579 PARAMETER Experiment Name: At_4deg_Cold_cDNA_P Parameter: Timepoint (hr) Value: 6
  misc_feature: MA Experiment 108579 PARAMETER Experiment Name: At_4deg_Cold_cDNA_P Parameter: Tissue Value: Aerial
  misc_feature: MA Experiment ID: 108585 Result: Down-regulated in Transcription
  misc_feature: MA Experiment 108585 PARAMETER Experiment Name: At_5mM_NaNP_cDNA_P Parameter: Timepoint (hr) Value: 6
  misc_feature: MA Experiment 108585 PARAMETER Experiment Name: At_5mM_NaNP_cDNA_P Parameter: Tissue Value: Aerial
  misc_feature: MA Experiment 108585 PARAMETER Experiment Name: At_5mM_NaNP_cDNA_P Parameter: Treatment Value: null
  misc_feature: MA Experiment ID: 108595 Result: Down-regulated in Transcription
  misc_feature: MA Experiment 108595 PARAMETER Experiment Name: At_Ler-pi_Ovule_cDNA_P Parameter: Plant Line Value: null
  misc_feature: MA Experiment ID: 20000069 Result: Down-regulated in Transcription
  misc_feature: MA Experiment 20000069 PARAMETER Experiment Name: At_100uM_ABA_Mutants_cDNA_P Parameter: Plant Line Value: CS23
  misc_feature: MA Experiment 20000069 PARAMETER Experiment Name: At_100uM_ABA_Mutants_cDNA_P Parameter: Timepoint (hr) Value: 6
  misc_feature: MA Experiment 20000069 PARAMETER Experiment Name: At_100uM_ABA_Mutants_cDNA_P Parameter: Tissue Value: Aerial
  misc_feature: MA Experiment 20000069 PARAMETER Experiment Name: At_100uM_ABA_Mutants_cDNA_P Parameter: Treatment Value: 100uM ABA vs. No Treatment
  misc_feature: MA Experiment ID: 20000072 Result: Down-regulated in Transcription
  misc_feature: MA Experiment 20000072 PARAMETER Experiment Name: At_100uM_ABA_Mutants_cDNA_P Parameter: Plant Line Value: CS8105
  misc_feature: MA Experiment 20000072 PARAMETER Experiment Name: At_100uM_ABA_Mutants_cDNA_P Parameter: Timepoint (hr) Value: 6
  misc_feature: MA Experiment 20000072 PARAMETER Experiment Name: At_100uM_ABA_Mutants_cDNA_P Parameter: Tissue Value: Aerial
  misc_feature: MA Experiment 20000072 PARAMETER Experiment Name: At_100uM_ABA_Mutants_cDNA_P Parameter: Treatment Value: 100uM ABA vs. No Treatment
  misc_feature: MA Experiment ID: 20000086 Result: Down-regulated in Transcription
  misc_feature: MA Experiment 20000086 PARAMETER Experiment Name: At_100uM_ABA_Mutants_cDNA_P Parameter: Plant Line Value: CS22
  misc_feature: MA Experiment 20000086 PARAMETER Experiment Name: At_100uM_ABA_Mutants_cDNA_P Parameter: Timepoint (hr) Value: 6
  misc_feature: MA Experiment 20000086 PARAMETER Experiment Name: At_100uM_ABA_Mutants_cDNA_P Parameter: Tissue Value: Aerial
  misc_feature: MA Experiment 20000086 PARAMETER Experiment Name: At_100uM_ABA_Mutants_cDNA_P Parameter: Treatment Value: 100uM ABA vs. No Treatment
  misc_feature: MA Experiment ID: 20000087 Result: Down-regulated in Transcription
  misc_feature: MA Experiment 20000087 PARAMETER Experiment Name: At_100uM_ABA_Mutants_cDNA_P Parameter: Plant Line Value: WS
  misc_feature: MA Experiment 20000087 PARAMETER Experiment Name: At_100uM_ABA_Mutants_cDNA_P Parameter: Timepoint (hr) Value: 6
  misc_feature: MA Experiment 20000087 PARAMETER Experiment Name: At_100uM_ABA_Mutants_cDNA_P Parameter: Tissue Value: Aerial
  misc_feature: MA Experiment 20000087 PARAMETER Experiment Name: At_100uM_ABA_Mutants_cDNA_P Parameter: Treatment Value: 100uM ABA vs. No Treatment
  misc_feature: MA Experiment ID: 20000089 Result: Down-regulated in Transcription
  misc_feature: MA Experiment ID: 20000090 Result: Down-regulated in Transcription
  misc_feature: MA Experiment ID: 20000179 Result: Up-regulated in Transcription
  misc_feature: MA Experiment 20000179 PARAMETER Experiment Name: At_Germinating_Seeds_P Parameter: Age (hr) Value: 6 vs. 0
  misc_feature: MA Experiment 20000179 PARAMETER Experiment Name: At_Germinating_Seeds_P Parameter: Tissue Value: Germinating Seeds
  misc_feature: MA Experiment ID: 20000180 Result: Up-regulated in Transcription
  misc_feature: MA Experiment 20000180 PARAMETER Experiment Name: At_Germinating_Seeds_P Parameter: Age (hr) Value: 24 vs. 0
  misc_feature: MA Experiment 20000180 PARAMETER Experiment Name: At_Germinating_Seeds_P Parameter: Tissue Value: Germinating Seeds
  misc_feature: MA Experiment ID: 20000213 Result: Down-regulated in Transcription
  misc_feature: MA Experiment 20000213 PARAMETER Experiment Name: At_4deg_Cold_P Parameter: Timepoint (hr) Value: 2
  misc_feature: MA Experiment ID: 20000227 Result: Down-regulated in Transcription
  misc_feature: MA Experiment 20000227 PARAMETER Experiment Name: At_Root-Tips-vs-Tops_P Parameter: Tissue Value: Root Tips vs. Root Tops
  misc_feature: MA Experiment ID: 20000234 Result: Down-regulated in Transcription
  misc_feature: MA Experiment 20000234 PARAMETER Experiment Name: At_Siliques_P Parameter: Age (day) Value: 21
  misc_feature: MA Experiment 20000234 PARAMETER Experiment Name: At_Siliques_P Parameter: Organism Value: A. thaliana
  misc_feature: MA Experiment 20000234 PARAMETER Experiment Name: At_Siliques_P Parameter: Plant Line Value: WS
  misc_feature: MA Experiment 20000234 PARAMETER Experiment Name: At_Siliques_P Parameter: Tissue Value: Less Than 5mm Siliques vs. Whole Plant
  misc_feature: MA Experiment ID: 20000235 Result: Down-regulated in Transcription
  misc_feature: MA Experiment 20000235 PARAMETER Experiment Name: At_Siliques_P Parameter: Age (day) Value: 21
  misc_feature: MA Experiment 20000235 PARAMETER Experiment Name: At_Siliques_P Parameter: Organism Value: A. thaliana
  misc_feature: MA Experiment 20000235 PARAMETER Experiment Name: At_Siliques_P Parameter: Plant Line Value: WS
  misc_feature: MA Experiment 20000235 PARAMETER Experiment Name: At_Siliques_P Parameter: Tissue Value: 5-10mm Siliques vs. Whole Plant
  misc_feature: MA Experiment ID: 20000264 Result: Down-regulated in Transcription
  misc_feature: MA Experiment 20000264 PARAMETER Experiment Name: At_Open_Flower_P Parameter: Age (day) Value: 21
  misc_feature: MA Experiment 20000264 PARAMETER Experiment Name: At_Open_Flower_P Parameter: Plant Line Value: WS
  misc_feature: MA Experiment 20000264 PARAMETER Experiment Name: At_Open_Flower_P Parameter: Tissue Value: Open Flower vs. Whole Plant
  misc_feature: MA Experiment ID: 20000265 Result: Down-regulated in Transcription
  misc_feature: MA Experiment 20000265 PARAMETER Experiment Name: At_Open_Flower_P Parameter: Age (day) Value: 21
  misc_feature: MA Experiment 20000265 PARAMETER Experiment Name: At_Open_Flower_P Parameter: Plant Line Value: WS
  misc_feature: MA Experiment 20000265 PARAMETER Experiment Name: At_Open_Flower_P Parameter: Tissue Value: Closed Flower vs. Whole Plant
  misc_feature: MA Experiment ID: 20000286 Result: Down-regulated in Transcription
  misc_feature: MA Experiment 20000286 PARAMETER Experiment Name: At_Open_Flower_P Parameter: Age (day) Value: 21
  misc_feature: MA Experiment 20000286 PARAMETER Experiment Name: At_Open_Flower_P Parameter: Plant Line Value: WS
  misc_feature: MA Experiment 20000286 PARAMETER Experiment Name: At_Open_Flower_P Parameter: Tissue Value: Half Open vs. Whole Plant
  misc_feature: MA Experiment ID: 20000451 Result: Down-regulated in Transcription
  misc_feature: MA Experiment 20000451 PARAMETER Experiment Name: At_CS6879_Shoots-Roots_P Parameter: Age (day) Value: 14
  misc_feature: MA Experiment 20000451 PARAMETER Experiment Name: At_CS6879_Shoots-Roots_P Parameter: Organism Value: A. thaliana
  misc_feature: MA Experiment 20000451 PARAMETER Experiment Name: At_CS6879_Shoots-Roots_P Parameter: Plant Line Value: CS6879 vs. WS
  misc_feature: MA Experiment 20000451 PARAMETER Experiment Name: At_CS6879_Shoots-Roots_P Parameter: Tissue Value: Roots
  misc_feature: MA Experiment ID: 20000574 Result: Down-regulated in Transcription
  misc_feature: MA Experiment 20000574 PARAMETER Experiment Name: At_100uM_ABA_Mutants__P Parameter: Organism Value: A. thaliana
  misc_feature: MA Experiment 20000574 PARAMETER Experiment Name: At_100uM_ABA_Mutants__P Parameter: Plant Line Value: CS23 vs. Ler wt
  misc_feature: MA Experiment 20000574 PARAMETER Experiment Name: At_100uM_ABA_Mutants__P Parameter: Timepoint (hr) Value: N/A
  misc_feature: MA Experiment 20000574 PARAMETER Experiment Name: At_100uM_ABA_Mutants__P Parameter: Tissue Value: Whole Plant
  misc_feature: MA Experiment 20000574 PARAMETER Experiment Name: At_100uM_ABA_Mutants__P Parameter: Treatment Value: None
  misc_feature: MA Experiment ID: 20001557 Result: Down-regulated in Transcription
  misc_feature: MA Experiment 20001557 PARAMETER Experiment Name: At_Drought_Soil_Dry_P Parameter: Age (day) Value: 27
  misc_feature: MA Experiment 20001557 PARAMETER Experiment Name: At_Drought_Soil_Dry_P Parameter: Organism Value: A. thaliana
  misc_feature: MA Experiment 20001557 PARAMETER Experiment Name: At_Drought_Soil_Dry_P Parameter: Plant Line Value: WS
  misc_feature: MA Experiment 20001557 PARAMETER Experiment Name: At_Drought_Soil_Dry_P Parameter: Post Timepoint (hr) Value: 3
  misc_feature: MA Experiment 20001557 PARAMETER Experiment Name: At_Drought_Soil_Dry_P Parameter: Post-Treatment Value: Re-Water vs. No Drought
  misc_feature: MA Experiment 20001557 PARAMETER Experiment Name: At_Drought_Soil_Dry_P Parameter: Timepoint (day) Value: 13
  misc_feature: MA Experiment 20001557 PARAMETER Experiment Name: At_Drought_Soil_Dry_P Parameter: Treatment Value: Drought vs. No Drought
  misc_feature: MA Experiment ID: 20001560 Result: Down-regulated in Transcription
  misc_feature: MA Experiment 20001560 PARAMETER Experiment Name: At_Drought_Soil_Dry_P Parameter: Age (day) Value: 28
  misc_feature: MA Experiment 20001560 PARAMETER Experiment Name: At_Drought_Soil_Dry_P Parameter: Organism Value: A. thaliana
  misc_feature: MA Experiment 20001560 PARAMETER Experiment Name: At_Drought_Soil_Dry_P Parameter: Plant Line Value: WS
  misc_feature: MA Experiment 20001560 PARAMETER Experiment Name: At_Drought_Soil_Dry_P Parameter: Post Timepoint (hr) Value: None
  misc_feature: MA Experiment 20001560 PARAMETER Experiment Name: At_Drought_Soil_Dry_P Parameter: Post-Treatment Value: None
  misc_feature: MA Experiment 20001560 PARAMETER Experiment Name: At_Drought_Soil_Dry_P Parameter: Timepoint (day) Value: 14
  misc_feature: MA Experiment 20001560 PARAMETER Experiment Name: At_Drought_Soil_Dry_P Parameter: Treatment Value: Drought vs. No Drought
agatccactcacacctcgtctcctaatctgtacggttcttatttcgaaagggtaaaaaccaaaagcgacgcaaagggcaaaatcggaaaaagtgttttatttatggccgccgttagtagttcgtcggagaccggagactgcggcgttacgggaaagagagatgagatcatgttgttcggagttagagtcgtggttgatccgatgagaaagtgtgtgagtttgaacaatctctctgattatgaaaagtcttctccggaggatgagatccctaagatagtcaccgccggagctggagatggtgaagataagaacgaaacggatgcgacggtgattgtcgctgacggttacgcctccgccaatgacgctgtccagatttcgtcttcttccggcgggaggaaacgaggggttccatggacagagaacgagcataagaggttcttgattgggttgcagaaagtaggaaaaggagattggaaaggaatatcaagaaactttgtgaagagtaggactcctactcaagtagctagtcatgctcagaaatacttcctccgacgaaccaacctcaaccgtcgccgaagaagatctagcctttttgatatcactactgagacggttacagaaatggccatggagcaagatcctactcaggagaactcaccactacctgaaaccaacatcagctctggacagcaagcgatgcaagtttttactgacgtgccgacaaaaactgagaatgcaccagagacatttcatctcaacgatccatatctggttccagtaaccttccaagcaaagccaacattcaatctaaacacagatgctgctccactttctctcaacctttgtctggcatcctcatttaatcttaacgagcaacccaactcaagacactcggctttcacgatgatgccaagcttcagcgatggagatagcaatagcagcatcatcagagttgcttagagcttaaacccaaggggaaaaaaaaaacagaacaaaaacagaggaaggctatagagattgatggacaaactgtgtctagggtgcttcatcatctttgtttgtttgtaaaactcttgtcacacacactgttatgagtcattttctgctgtgtgtgttttgttttgtggtgatgtaagttaaaaacaagcgtgattctcatgtggcccatctcaatcaatggttggtgatttgtggggtttttaggcttttctattatcttatcttttggggataagataaaagcctaaaactgtatgtaactatgtatggttcttcgaatattttatcatttatctctaatgtc

SEQ ID NO: 74431 - protein, 319 aa, Arabidopsis thaliana
  peptide (1)..(319): Ceres Seq. ID no. 5674120
  misc_feature (135)..(182): Pfam Name: Myb-like DNA-binding domain Pfam Description: Myb-like DNA-binding domain
  misc_feature (35)..(319): Homolog of NCBI NO: 15221922 NR Description: myb family transcription factor; protein id: supported by cDNA: 41381., supported by cDNA: gi_15028048, by cDNA: gi_19310830 [Arabidopsis thaliana]
  misc_feature (35)..(319): Homolog of NCBI NO: 21593684 NR Description: Myb-related transcription activator, putative
  misc_feature (37)..(300): Homolog of NCBI NO: 15221408 NR Description: myb family transcription factor; protein id: supported by cDNA: 117643., supported by cDNA: gi_17979192, by cDNA: gi_20465856 [Arabidopsis thaliana]
  misc_feature (55)..(314): Homolog of NCBI NO: 28629811 NR Description: transcription factor Myb1 [Malus xiaojinensis]
  misc_feature (56)..(254): Homolog of NCBI NO: 15238083 NR Description: Myb-related transcription activator-like; protein At5g47390.1, supported by cDNA: 102806., supported by cDNA:
  misc_feature (39)..(319): Homolog of NCBI NO: 37536856 NR Description: putative Myb-related protein [Oryza sativa
  misc_feature (39)..(262): Homolog of NCBI NO: 24850307 NR Description: transcription factor MYBS3 [Oryza sativa
  misc_feature (39)..(224): Homolog of NCBI NO: 7705206 NR Description: MybSt1 [Solanum tuberosum]
  misc_feature (39)..(224): Homolog of NCBI NO: 1076660 NR Description: D13F(MYBST1) protein - potato
  misc_feature (45)..(307): Homolog of NCBI NO: 15228185 NR Description: putative MYB family transcription factor; protein At3g16350.1 [Arabidopsis thaliana] >gi|29028776|gb|AAO64767.1|
RSTHTSSPNLYGSYFERVKTKSDAKGKIGKSVLFMAAVSSSSETGDCGVTGKRDEIMLFGVRVVVDPMRKCVSLNNLSDYEKSSPEDEIPKIVTAGAGDGEDKNETDATVIVADGYASANDAVQISSSSGGRKRGVPWTENEHKRFLIGLQKVGKGDWKGISRNFVKSRTPTQVASHAQKYFLRRTNLNRRRRRSSLFDITTETVTEMAMEQDPTQENSPLPETNISSGQQAMQVFTDVPTKTENAPETFHLNDPYLVPVTFQAKPTFNLNTDAAPLSLNLCLASSFNLNEQPNSRHSAFTMMPSFSDGDSNSSIIRVA

SEQ ID NO: 74432 - protein, 285 aa, Arabidopsis thaliana; identical to SEQ ID NO: 49179
  peptide (1)..(285): Ceres Seq. ID no. 5674121
  misc_feature (101)..(148): Pfam Name: Myb-like DNA-binding domain Pfam Description: Myb-like DNA-binding domain
  misc_feature (1)..(285): Homolog of NCBI NO: 15221922 NR Description: myb family transcription factor; protein id: supported by cDNA: 41381., supported by cDNA: gi_15028048, by cDNA: gi_19310830 [Arabidopsis thaliana]
  misc_feature (1)..(285): Homolog of NCBI NO: 21593684 NR Description: Myb-related transcription activator, putative
  misc_feature (3)..(266): Homolog of NCBI NO: 15221408 NR Description: myb family transcription factor; protein id: supported by cDNA: 117643., supported by cDNA: gi_17979192, by cDNA: gi_20465856 [Arabidopsis thaliana]
  misc_feature (21)..(280): Homolog of NCBI NO: 28629811 NR Description: transcription factor Myb1 [Malus xiaojinensis]
  misc_feature (22)..(220): Homolog of NCBI NO: 15238083 NR Description: Myb-related transcription activator-like; protein At5g47390.1, supported by cDNA: 102806., supported by cDNA:
  misc_feature (5)..(285): Homolog of NCBI NO: 37536856 NR Description: putative Myb-related protein [Oryza sativa
  misc_feature (5)..(228): Homolog of NCBI NO: 24850307 NR Description: transcription factor MYBS3 [Oryza sativa
  misc_feature (5)..(190): Homolog of NCBI NO: 7705206 NR Description: MybSt1 [Solanum tuberosum]
  misc_feature (5)..(190): Homolog of NCBI NO: 1076660 NR Description: D13F(MYBST1) protein - potato
  misc_feature (11)..(273): Homolog of NCBI NO: 15228185 NR Description: putative MYB family transcription factor; protein At3g16350.1 [Arabidopsis thaliana] >gi|29028776|gb|AAO64767.1|

SEQ ID NO: 74433 - protein, 263 aa, Arabidopsis thaliana; identical to SEQ ID NO: 49180
  peptide (1)..(263): Ceres Seq. ID no. 5674122
  misc_feature (79)..(126): Pfam Name: Myb-like DNA-binding domain Pfam Description: Myb-like DNA-binding domain
  misc_feature (1)..(263): Homolog of NCBI NO: 15221922 NR Description: myb family transcription factor; protein id: supported by cDNA: 41381., supported by cDNA: gi_15028048, by cDNA: gi_19310830 [Arabidopsis thaliana]
  misc_feature (1)..(263): Homolog of NCBI NO: 21593684 NR Description: Myb-related transcription activator, putative
  misc_feature (1)..(244): Homolog of NCBI NO: 15221408 NR Description: myb family transcription factor; protein id: supported by cDNA: 117643., supported by cDNA: gi_17979192, by cDNA: gi_20465856 [Arabidopsis thaliana]
  misc_feature (1)..(258): Homolog of NCBI NO: 28629811 NR Description: transcription factor Myb1 [Malus xiaojinensis]
  misc_feature (1)..(198): Homolog of NCBI NO: 15238083 NR Description: Myb-related transcription activator-like; protein At5g47390.1, supported by cDNA: 102806., supported by cDNA:
  misc_feature (1)..(263): Homolog of NCBI NO: 37536856 NR Description: putative Myb-related protein [Oryza sativa
  misc_feature (1)..(206): Homolog of NCBI NO: 24850307 NR Description: transcription factor MYBS3 [Oryza sativa
  misc_feature (1)..(168): Homolog of NCBI NO: 7705206 NR Description: MybSt1 [Solanum tuberosum]
  misc_feature (1)..(168): Homolog of NCBI NO: 1076660 NR Description: D13F(MYBST1) protein - potato
  misc_feature (1)..(251): Homolog of NCBI NO: 15228185 NR Description: putative MYB family transcription factor; protein At3g16350.1 [Arabidopsis thaliana] >gi|29028776|gb|AAO64767.1|

SEQ ID NO: 74434 - DNA, 941 bp, Arabidopsis thaliana
  misc_feature (1)..(941): Ceres Seq. ID no. 5674157
  misc_feature: MA Experiment ID: 108473 Result: Down-regulated in Transcription
  misc_feature: MA Experiment 108473 PARAMETER Experiment Name: At_Drought_Flowers_cDNA_P Parameter: Timepoint (hr) Value: 7 d
  misc_feature: MA Experiment 108473 PARAMETER Experiment Name: At_Drought_Flowers_cDNA_P Parameter: Tissue Value: Flower
  misc_feature: MA Experiment 108473 PARAMETER Experiment Name: At_Drought_Flowers_cDNA_P Parameter: Treatment Value: Drought vs. No Drought
  misc_feature: MA Experiment ID: 108474 Result: Down-regulated in Transcription
  misc_feature: MA Experiment 108474 PARAMETER Experiment Name: At_Drought_Flowers_cDNA_P Parameter: Timepoint (hr) Value: null
  misc_feature: MA Experiment 108474 PARAMETER Experiment Name: At_Drought_Flowers_cDNA_P Parameter: Treatment Value: Drought vs. No Drought
  misc_feature: MA Experiment ID: 108501 Result: Down-regulated in Transcription
  misc_feature: MA Experiment 108501 PARAMETER Experiment Name: At_ap2_floral_buds_cDNA_P Parameter: Plant Line Value: ap2 (Ler.)
  misc_feature: MA Experiment 108501 PARAMETER Experiment Name: At_ap2_floral_buds_cDNA_P Parameter: Tissue Value: Closed Flower
  misc_feature: MA Experiment ID: 20000087 Result: Up-regulated in Transcription
  misc_feature: MA Experiment 20000087 PARAMETER Experiment Name: At_100uM_ABA_Mutants_cDNA_P Parameter: Plant Line Value: WS
  misc_feature: MA Experiment 20000087 PARAMETER Experiment Name: At_100uM_ABA_Mutants_cDNA_P Parameter: Timepoint (hr) Value: 6
  misc_feature: MA Experiment 20000087 PARAMETER Experiment Name: At_100uM_ABA_Mutants_cDNA_P Parameter: Tissue Value: Aerial
  misc_feature: MA Experiment 20000087 PARAMETER Experiment Name: At_100uM_ABA_Mutants_cDNA_P Parameter: Treatment Value: 100uM ABA vs. No Treatment
  misc_feature: MA Experiment ID: 20000314 Result: Down-regulated in Transcription
  misc_feature: MA Experiment 20000314 PARAMETER Experiment Name: At_14day_Shoots-Roots_Sub_P Parameter: Age (day) Value: 14
  misc_feature: MA Experiment 20000314 PARAMETER Experiment Name: At_14day_Shoots-Roots_Sub_P Parameter: Organism Value: A. thaliana
  misc_feature: MA Experiment 20000314 PARAMETER Experiment Name: At_14day_Shoots-Roots_Sub_P Parameter: Plant Line Value: WS
  misc_feature: MA Experiment 20000314 PARAMETER Experiment Name: At_14day_Shoots-Roots_Sub_P Parameter: Tissue Value: Roots vs. Whole Plant
  misc_feature: MA Experiment ID: 20000315 Result: Down-regulated in Transcription
  misc_feature: MA Experiment 20000315 PARAMETER Experiment Name: At_14day_Shoots-Roots_Sub_P Parameter: Age (day) Value: 14
  misc_feature: MA Experiment 20000315 PARAMETER Experiment Name: At_14day_Shoots-Roots_Sub_P Parameter: Organism Value: A. thaliana
  misc_feature: MA Experiment 20000315 PARAMETER Experiment Name: At_14day_Shoots-Roots_Sub_P Parameter: Plant Line Value: WS
  misc_feature: MA Experiment 20000315 PARAMETER Experiment Name: At_14day_Shoots-Roots_Sub_P Parameter: Tissue Value: Shoots vs. Whole Plant
  misc_feature: MA Experiment ID: 20000355 Result: Down-regulated in Transcription
  misc_feature: MA Experiment 20000355 PARAMETER Experiment Name: At_Siliques_Sub_P Parameter: Age (day) Value: 21
  misc_feature: MA Experiment 20000355 PARAMETER Experiment Name: At_Siliques_Sub_P Parameter: Organism Value: A. thaliana
  misc_feature: MA Experiment 20000355 PARAMETER Experiment Name: At_Siliques_Sub_P Parameter: Plant Line Value: WS
  misc_feature: MA Experiment 20000355 PARAMETER Experiment Name: At_Siliques_Sub_P Parameter: Tissue Value: Less Than 5mm Siliques vs. Whole Plant
  misc_feature: MA Experiment ID: 20000440 Result: Up-regulated in Transcription
  misc_feature: MA Experiment 20000440 PARAMETER Experiment Name: At_Closed-Flower__Sub_P Parameter: Tissue Value: Closed Flower vs. Whole Plant
ataaaaaataagtaaccaagaaaataagtaacggcttcttcgatcatttatatgtttatcctaaactaataagaaagcttgtgataatttcagtgttctcactctcatctccaatctgtgatatatttctcatgtctcatcagacagtagcgctagcctctaaggctaagtctcctaaacccaaaagaggaaagttagataaggaaaaaatgactgcattggagaaacatgtttccttcttcgacaggaacaaagacggcaccgtttatccatgggaaacctaccaaggatttagagcgctcgggacagggcgtcttttggcggcttttgttgctatattcatcaacatgggactcagcaagaaaactcgtccgggaaagggattctcgccgttgtttccaatagacgtgaagaatagtcacctttgcatgcacggtagtgacaccgacgtctatgacgatgacggaagatttgtggaatcaaaattcgaggaaatattcaacaagcatgctcgcacacataaagatgctctcactgcagaggaaattcaaaaaatgcttaagactaacagggatcctttcgatatcacaggatggctttcagattatggagaatggaaaatattacatacgttagctcaagacaaaaatggtttgttatcggaaaagagcgtcagggccatctacgatggtagccttttccaccaactggagaaaaaaagatcttcttcttcttctcgtggcaagaaacaaaaactaccataaatgtttacatgaatcttcttatattattatgtggagatcacataacattcttggtttataattatataattttgtcaaataacttttgtaatgaataattacatagatcaaacactctttaaataattattgtgtatattgaaaaaaaaaaacttatcaaagtatacttcatttaag

SEQ ID NO: 74435 - protein, 210 aa, Arabidopsis thaliana
  peptide (1)..(210): Ceres Seq. ID no. 5674158
  misc_feature (27)..(195): Pfam Name: Caleosin related protein Pfam Description: Caleosin related protein
  misc_feature (27)..(210): Homolog of NCBI NO: 15220687 NR Description: pollen coat EF-hand protein; protein id: supported by cDNA: 16644. [Arabidopsis thaliana]
  misc_feature (20)..(210): Homolog of NCBI NO: 9295714 NR Description: F26F24.9 [Arabidopsis thaliana]
  misc_feature (21)..(203): Homolog of NCBI NO: 18409649 NR Description: Ca2+-binding EF-hand common family protein, protein id: At1g70670.1, supported by cDNA: 5143., supported by gi_15810176 [Arabidopsis thaliana] >gi|25406062|pir||A96731
  misc_feature (21)..(203): Homolog of NCBI NO: 21593851 NR Description: unknown [Arabidopsis thaliana]
  misc_feature (21)..(201): Homolog of NCBI NO: 18409651 NR Description: Ca2+-binding EF-hand common family protein, protein id: At1g70680.1, supported by cDNA: 9200. [Arabidopsis
  misc_feature (21)..(201): Homolog of NCBI NO: 21617961 NR Description: unknown [Arabidopsis thaliana]
  misc_feature (52)..(210): Homolog of NCBI NO: 15220688 NR Description: Ca2+-binding EF-hand common family protein,
  misc_feature (7)..(200): Homolog of NCBI NO: 34902470 NR Description: Putative abscisic acid-induced protein - rice
  misc_feature (20)..(203): Homolog of NCBI NO: 37652831 NR Description: calcium binding protein [Fagus sylvatica]
  misc_feature (27)..(197): Homolog of NCBI NO: 34538473 NR Description: caleosin 1 [Hordeum vulgare]
MSHQTVALASKAKSPKPKRGKLDKEKMTALEKHVSFFDRNKDGTVYPWETYQGFRALGTGRLLAAFVAIFINMGLSKKTRPGKGFSPLFPIDVKNSHLCMHGSDTDVYDDDGRFVESKFEEIFNKHARTHKDALTAEEIQKMLKTNRDPFDITGWLSDYGEWKILHTLAQDKNGLLSEKSVRAIYDGSLFHQLEKKRSSSSSRGKKQKLP

SEQ ID NO: 74436 - protein, 184 aa, Arabidopsis thaliana; identical to SEQ ID NO: 30098
  peptide (1)..(184): Ceres Seq. ID no. 5674159
  misc_feature (1)..(169): Pfam Name: Caleosin related protein Pfam Description: Caleosin related protein
  misc_feature (1)..(184): Homolog of NCBI NO: 15220687 NR Description: pollen coat EF-hand protein; protein id: supported by cDNA: 16644. [Arabidopsis thaliana]
  misc_feature (1)..(184): Homolog of NCBI NO: 9295714 NR Description: F26F24.9 [Arabidopsis thaliana]
  misc_feature (1)..(177): Homolog of NCBI NO: 18409649 NR Description: Ca2+-binding EF-hand common family protein, protein id: At1g70670.1, supported by cDNA: 5143., supported by gi_15810176 [Arabidopsis thaliana] >gi|25406062|pir||A96731
  misc_feature (1)..(177): Homolog of NCBI NO: 21593851 NR Description: unknown [Arabidopsis thaliana]
  misc_feature (1)..(175): Homolog of NCBI NO: 18409651 NR Description: Ca2+-binding EF-hand common family protein, protein id: At1g70680.1, supported by cDNA: 9200. [Arabidopsis
  misc_feature (1)..(175): Homolog of NCBI NO: 21617961 NR Description: unknown [Arabidopsis thaliana]
  misc_feature (26)..(184): Homolog of NCBI NO: 15220688 NR Description: Ca2+-binding EF-hand common family protein,
  misc_feature (1)..(174): Homolog of NCBI NO: 34902470 NR Description: Putative abscisic acid-induced protein - rice
  misc_feature (1)..(177): Homolog of NCBI NO: 37652831 NR Description: calcium binding protein [Fagus sylvatica]
  misc_feature (1)..(171): Homolog of NCBI NO: 34538473 NR Description: caleosin 1 [Hordeum vulgare]

SEQ ID NO: 74437 - protein, 138 aa, Arabidopsis thaliana; identical to SEQ ID NO: 30099
  peptide (1)..(138): Ceres Seq. ID no. 5674160
  misc_feature (1)..(123): Pfam Name: Caleosin related protein Pfam Description: Caleosin related protein
  misc_feature (1)..(138): Homolog of NCBI NO: 15220687 NR Description: pollen coat EF-hand protein; protein id: supported by cDNA: 16644. [Arabidopsis thaliana]
  misc_feature (1)..(138): Homolog of NCBI NO: 9295714 NR Description: F26F24.9 [Arabidopsis thaliana]
  misc_feature (1)..(131): Homolog of NCBI NO: 18409649 NR Description: Ca2+-binding EF-hand common family protein, protein id: At1g70670.1, supported by cDNA: 5143., supported by gi_15810176 [Arabidopsis thaliana] >gi|25406062|pir||A96731
  misc_feature (1)..(131): Homolog of NCBI NO: 21593851 NR Description: unknown [Arabidopsis thaliana]
  misc_feature (1)..(129): Homolog of NCBI NO: 18409651 NR Description: Ca2+-binding EF-hand common family protein, protein id: At1g70680.1, supported by cDNA: 9200. [Arabidopsis
  misc_feature (1)..(129): Homolog of NCBI NO: 21617961 NR Description: unknown [Arabidopsis thaliana]
  misc_feature (1)..(138): Homolog of NCBI NO: 15220688 NR Description: Ca2+-binding EF-hand common family protein,
  misc_feature (1)..(128): Homolog of NCBI NO: 34902470 NR Description: Putative abscisic acid-induced protein - rice
  misc_feature (1)..(131): Homolog of NCBI NO: 37652831 NR Description: calcium binding protein [Fagus sylvatica]
  misc_feature (1)..(125): Homolog of NCBI NO: 34538473 NR Description: caleosin 1 [Hordeum vulgare]

SEQ ID NO: 74438 - DNA, 1252 bp, Arabidopsis thaliana
  misc_feature (1)..(1252): Ceres Seq. ID no. 5674492
  misc_feature: MA Experiment ID: 108433 Result: Up-regulated in Transcription
  misc_feature: MA Experiment 108433 PARAMETER Experiment Name: At_rhl_Mutant2_cDNA_P Parameter: Age (day) Value: 7
  misc_feature: MA Experiment 108433 PARAMETER Experiment Name: At_rhl_Mutant2_cDNA_P Parameter: Organism Value: A. thaliana
  misc_feature: MA Experiment 108433 PARAMETER Experiment Name: At_rhl_Mutant2_cDNA_P Parameter: Plant Line Value: rhl Mutant vs. wt landsburg
  misc_feature: MA Experiment 108433 PARAMETER Experiment Name: At_rhl_Mutant2_cDNA_P Parameter: Tissue Value: Roots
  misc_feature: MA Experiment ID: 108488 Result: Down-regulated in Transcription
  misc_feature: MA Experiment ID: 108577 Result: Down-regulated in Transcription
  misc_feature: MA Experiment 108577 PARAMETER Experiment Name: At_42deg_Heat_cDNA_P Parameter: Temperature (deg C) Value: 42 vs. 22
  misc_feature: MA Experiment 108577 PARAMETER Experiment Name: At_42deg_Heat_cDNA_P Parameter: Timepoint (hr) Value: 6
  misc_feature: MA Experiment 108577 PARAMETER Experiment Name: At_42deg_Heat_cDNA_P Parameter: Tissue Value: Aerial
  misc_feature: MA Experiment ID: 20000069 Result: Up-regulated in Transcription
  misc_feature: MA Experiment 20000069 PARAMETER Experiment Name: At_100uM_ABA_Mutants_cDNA_P Parameter: Plant Line Value: CS23
  misc_feature: MA Experiment 20000069 PARAMETER Experiment Name: At_100uM_ABA_Mutants_cDNA_P Parameter: Timepoint (hr) Value: 6
  misc_feature: MA Experiment 20000069 PARAMETER Experiment Name: At_100uM_ABA_Mutants_cDNA_P Parameter: Tissue Value: Aerial
  misc_feature: MA Experiment 20000069 PARAMETER Experiment Name: At_100uM_ABA_Mutants_cDNA_P Parameter: Treatment Value: 100uM ABA vs. No Treatment
  misc_feature: MA Experiment ID: 20000072 Result: Up-regulated in Transcription
  misc_feature: MA Experiment 20000072 PARAMETER Experiment Name: At_100uM_ABA_Mutants_cDNA_P Parameter: Plant Line Value: CS8105
  misc_feature: MA Experiment 20000072 PARAMETER Experiment Name: At_100uM_ABA_Mutants_cDNA_P Parameter: Timepoint (hr) Value: 6
  misc_feature: MA Experiment 20000072 PARAMETER Experiment Name: At_100uM_ABA_Mutants_cDNA_P Parameter: Tissue Value: Aerial
  misc_feature: MA Experiment 20000072 PARAMETER Experiment Name: At_100uM_ABA_Mutants_cDNA_P Parameter: Treatment Value: 100uM ABA vs. No Treatment
  misc_feature: MA Experiment ID: 20000086 Result: Up-regulated in Transcription
  misc_feature: MA Experiment 20000086 PARAMETER Experiment Name: At_100uM_ABA_Mutants_cDNA_P Parameter: Plant Line Value: CS22
  misc_feature: MA Experiment 20000086 PARAMETER Experiment Name: At_100uM_ABA_Mutants_cDNA_P Parameter: Timepoint (hr) Value: 6
  misc_feature: MA Experiment 20000086 PARAMETER Experiment Name: At_100uM_ABA_Mutants_cDNA_P Parameter: Tissue Value: Aerial
  misc_feature: MA Experiment 20000086 PARAMETER Experiment Name: At_100uM_ABA_Mutants_cDNA_P Parameter: Treatment Value: 100uM ABA vs. No Treatment
  misc_feature: MA Experiment ID: 20000088 Result: Up-regulated in Transcription
  misc_feature: MA Experiment 20000088 PARAMETER Experiment Name: At_100uM_ABA_Mutants_cDNA_P Parameter: Plant Line Value: Landsberg
  misc_feature: MA Experiment 20000088 PARAMETER Experiment Name: At_100uM_ABA_Mutants_cDNA_P Parameter: Timepoint (hr) Value: 6
  misc_feature: MA Experiment 20000088 PARAMETER Experiment Name: At_100uM_ABA_Mutants_cDNA_P Parameter: Tissue Value: Aerial
  misc_feature: MA Experiment 20000088 PARAMETER Experiment Name: At_100uM_ABA_Mutants_cDNA_P Parameter: Treatment Value: 100uM ABA vs. No Treatment
  misc_feature: MA Experiment ID: 20000234 Result: Down-regulated in Transcription
  misc_feature: MA Experiment 20000234 PARAMETER Experiment Name: At_Siliques_P Parameter: Age (day) Value: 21
  misc_feature: MA Experiment 20000234 PARAMETER Experiment Name: At_Siliques_P Parameter: Organism Value: A. thaliana
  misc_feature: MA Experiment 20000234 PARAMETER Experiment Name: At_Siliques_P Parameter: Plant Line Value: WS
  misc_feature: MA Experiment 20000234 PARAMETER Experiment Name: At_Siliques_P Parameter: Tissue Value: Less Than 5mm Siliques vs. Whole Plant
  misc_feature: MA Experiment ID: 20001558 Result: Down-regulated in Transcription
  misc_feature: MA Experiment 20001558 PARAMETER Experiment Name: At_Drought_Soil_Dry_P Parameter: Age (day) Value: 27
  misc_feature: MA Experiment 20001558 PARAMETER Experiment Name: At_Drought_Soil_Dry_P Parameter: Organism Value: A. thaliana
  misc_feature: MA Experiment 20001558 PARAMETER Experiment Name: At_Drought_Soil_Dry_P Parameter: Plant Line Value: WS
  misc_feature: MA Experiment 20001558 PARAMETER Experiment Name: At_Drought_Soil_Dry_P Parameter: Post Timepoint (hr) Value: 6
  misc_feature: MA Experiment 20001558 PARAMETER Experiment Name: At_Drought_Soil_Dry_P Parameter: Post-Treatment Value: Re-Water vs. No Drought
  misc_feature: MA Experiment 20001558 PARAMETER Experiment Name: At_Drought_Soil_Dry_P Parameter: Timepoint (day) Value: 13
  misc_feature: MA Experiment 20001558 PARAMETER Experiment Name: At_Drought_Soil_Dry_P Parameter: Treatment Value: Drought vs. No Drought
gatttagccatggtgagctcaattttctcttgtttctgttttaagtttttcgattttgaagctttcttctcgaaaatttcgattgcttgctagtcgatttcgagttcaaatccgtttgcttctcttttggataacgattctcgctcgtttagatagatctggagatgatttcagatactcgatctttggtagttgtagtgtgtgatcggattagagatccgattaaagaactcgtaactttgttgttctgcttcttcgctagcttatctgaaatcaggaagaatctgctgtttttcacttcaagttcaaatcaagtgttaaattctacgaatttttgactttttcatcagtgtttgtcaattgttcgatctatgttgtgcttcttgcctcttgatgtgtcaaaattgaagtcaaaatcgttctacaaagttgtgaggagctacttagcttctcttccttgtgatgttaacaatgttagagatgatgataatattatccaatttctgtgttaagttgtgatctttgttttagaaaatgtgtttttgaagagatgtgcatcttctcagtgttttgttatgtgtattgatatgataacaggcaaacgcggcatcgggaatggctgtgcatgatgattgcaagctgaaatttatggaactgaaggcgaaaagaacattccgtaccatagtctacaagattgaggataagcaagtgattgtagagaaactcggtgaacctgaacaatcatatgatgactttgcagctagtcttccagctgatgattgccgatattgcatttacgatttcgactttgtcactgcggagaactgccagaagagcaagatcttcttcattgcatggtctccggacactgccaaagtgagagacaagatgatttacgcgagctctaaagataggttcaagagagaactagatggaattcaagtggaacttcaagctactgatccaacagaaatgggtcttgatgttttcaaaagccgcaccaactaagtaaaacaaaaccctgtaagggcatttgaataagtttggtttctggagtgaatatgtttcctctgactgttatgaaaactttttaacaccttcaacttcattctacttggtattattgtatgtctttgatgtgttatgtgtgccttgtgatggttttcaattagttttacatgtacaatacttgaaatcagattgttgctaggcttcaagccttgtctcagttatctatctgataatttattcg

SEQ ID NO: 74439 - protein, 130 aa, Arabidopsis thaliana; identical to SEQ ID NO: 25156
  peptide (1)..(130): Ceres Seq. ID no. 5674493
  misc_feature (5)..(130): Pfam Name: Cofilin/tropomyosin-type actin-binding protein Pfam Description: Cofilin/tropomyosin-type actin-binding protein
  misc_feature (1)..(130): Homolog of NCBI NO: 18408116 NR Description: actin depolymerizing factor 2 (ADF2); protein id: supported by cDNA: 99657., supported by cDNA: gi_13877562, by cDNA: gi_1408472, supported by cDNA: gi_14423375 [Arabidopsis
  misc_feature (1)..(130): Homolog of NCBI NO: 11276987 NR Description: actin depolymerizing factor 2 - Arabidopsis >gi|7339501|emb|CAB82824.1| actin depolymerizing factor 2 (ADF2)
  misc_feature (1)..(130): Homolog of NCBI NO: 30697300 NR Description: actin depolymerizing factor 4 - like protein
  misc_feature (1)..(130): Homolog of NCBI NO: 15231309 NR Description: actin depolymerizing factor 1 (ADF1); protein id: supported by cDNA: 1907., supported by cDNA: gi_1408470, by cDNA: gi_14334961 [Arabidopsis thaliana]
  misc_feature (1)..(128): Homolog of NCBI NO: 17366765 NR Description: Actin-depolymerizing factor 2 (ADF 2)
  misc_feature (1)..(130): Homolog of NCBI NO: 4185511 NR Description: actin depolymerizing factor 4 [Arabidopsis
  misc_feature (1)..(130): Homolog of NCBI NO: 17366768 NR Description: Actin-depolymerizing factor 1 (ADF 1)
  misc_feature (1)..(130): Homolog of NCBI NO: 30697295 NR Description: actin depolymerizing factor 3 - like protein
  misc_feature (1)..(130): Homolog of NCBI NO: 30697303 NR Description: actin depolymerizing factor 4 - like protein thaliana] >gi|15215859|gb|AAK91473.1| AT5g59890/mmn10_110 thaliana] >gi|19699262|gb|AAL90997.1| At1g05180/YUP8H12_21
  misc_feature (1)..(128): Homolog of NCBI NO: 22857914 NR Description: pollen specific actin-depolymerizing factor 2

SEQ ID NO: 74440 - protein, 119 aa, Arabidopsis thaliana; identical to SEQ ID NO: 25157
  peptide (1)..(119): Ceres Seq. ID no. 5674494
  misc_feature (1)..(119): Pfam Name: Cofilin/tropomyosin-type actin-binding protein Pfam Description: Cofilin/tropomyosin-type actin-binding protein
  misc_feature (1)..(119): Homolog of NCBI NO: 18408116 NR Description: actin depolymerizing factor 2 (ADF2); protein id: supported by cDNA: 99657., supported by cDNA: gi_13877562, by cDNA: gi_1408472, supported by cDNA: gi_14423375 [Arabidopsis
  misc_feature (1)..(119): Homolog of NCBI NO: 11276987 NR Description: actin depolymerizing factor 2 - Arabidopsis >gi|7339501|emb|CAB82824.1| actin depolymerizing factor 2 (ADF2)
  misc_feature (1)..(119): Homolog of NCBI NO: 30697300 NR Description: actin depolymerizing factor 4 - like protein
  misc_feature (1)..(119): Homolog of NCBI NO: 15231309 NR Description: actin depolymerizing factor 1 (ADF1); protein id: supported by cDNA: 1907., supported by cDNA: gi_1408470, by cDNA: gi_14334961 [Arabidopsis thaliana]
  misc_feature (1)..(117): Homolog of NCBI NO: 17366765 NR Description: Actin-depolymerizing factor 2 (ADF 2)
  misc_feature (1)..(119): Homolog of NCBI NO: 4185511 NR Description: actin depolymerizing factor 4 [Arabidopsis
  misc_feature (1)..(119): Homolog of NCBI NO: 17366768 NR Description: Actin-depolymerizing factor 1 (ADF 1)
  misc_feature (1)..(119): Homolog of NCBI NO: 30697295 NR Description: actin depolymerizing factor 3 - like protein
  misc_feature (1)..(119): Homolog of NCBI NO: 30697303 NR Description: actin depolymerizing factor 4 - like protein thaliana] >gi|15215859|gb|AAK91473.1| AT5g59890/mmn10_110 thaliana] >gi|19699262|gb|AAL90997.1| At1g05180/YUP8H12_21
  misc_feature (1)..(117): Homolog of NCBI NO: 22857914 NR Description: pollen specific actin-depolymerizing factor 2

SEQ ID NO: 74441 - DNA, 1656 bp, Arabidopsis thaliana
  misc_feature (1)..(1656): Ceres Seq. ID no. 5674654
  misc_feature: MA Experiment ID: 108434 Result: Up-regulated in Transcription
  misc_feature: MA Experiment 108434 PARAMETER Experiment Name: At_Root_Tips_cDNA_P Parameter: Tissue Value: Root Tips
  misc_feature: MA Experiment ID: 108462 Result: Down-regulated in Transcription
  misc_feature: MA Experiment 108462 PARAMETER Experiment Name: At_Germinating_Seeds_cDNA_P Parameter: Age (day) Value: 2 vs. 0
  misc_feature: MA Experiment 108462 PARAMETER Experiment Name: At_Germinating_Seeds_cDNA_P Parameter: Tissue Value: Germinating Seeds
  misc_feature: MA Experiment ID: 108463 Result: Down-regulated in Transcription
  misc_feature: MA Experiment 108463 PARAMETER Experiment Name: At_Germinating_Seeds_cDNA_P Parameter: Age (day) Value: 3 vs. 0
  misc_feature: MA Experiment 108463 PARAMETER Experiment Name: At_Germinating_Seeds_cDNA_P Parameter: Tissue Value: Germinating Seeds
  misc_feature: MA Experiment ID: 108464 Result: Down-regulated in Transcription
  misc_feature: MA Experiment 108464 PARAMETER Experiment Name: At_Germinating_Seeds_cDNA_P Parameter: Age (day) Value: 4 vs. 0
  misc_feature: MA Experiment 108464 PARAMETER Experiment Name: At_Germinating_Seeds_cDNA_P Parameter: Tissue Value: Germinating Seeds
  misc_feature: MA Experiment ID: 20000224 Result: Up-regulated in Transcription
  misc_feature: MA Experiment ID: 20000227 Result: Up-regulated in Transcription
  misc_feature: MA Experiment 20000227 PARAMETER Experiment Name: At_Root-Tips-vs-Tops_P Parameter: Tissue Value: Root Tips vs. Root Tops
  misc_feature: MA Experiment ID: 20000451 Result: Down-regulated in Transcription
  misc_feature: MA Experiment 20000451 PARAMETER Experiment Name: At_CS6879_Shoots-Roots_P Parameter: Age (day) Value: 14
  misc_feature: MA Experiment 20000451 PARAMETER Experiment Name: At_CS6879_Shoots-Roots_P Parameter: Organism Value: A. thaliana
  misc_feature: MA Experiment 20000451 PARAMETER Experiment Name: At_CS6879_Shoots-Roots_P Parameter: Plant Line Value: CS6879 vs. WS
  misc_feature: MA Experiment 20000451 PARAMETER Experiment Name: At_CS6879_Shoots-Roots_P Parameter: Tissue Value: Roots
  misc_feature: MA Experiment ID: 20000452 Result: Down-regulated in Transcription
  misc_feature: MA Experiment 20000452 PARAMETER Experiment Name: At_CS6879_Shoots-Roots_P Parameter: Age (day) Value: 14
  misc_feature: MA Experiment 20000452 PARAMETER Experiment Name: At_CS6879_Shoots-Roots_P Parameter: Organism Value: A. thaliana
  misc_feature: MA Experiment 20000452 PARAMETER Experiment Name: At_CS6879_Shoots-Roots_P Parameter: Plant Line Value: CS6879 vs. WS
  misc_feature: MA Experiment 20000452 PARAMETER Experiment Name: At_CS6879_Shoots-Roots_P Parameter: Tissue Value: Shoots
  misc_feature: MA Experiment ID: 20000573 Result: Down-regulated in Transcription
  misc_feature: MA Experiment 20000573 PARAMETER Experiment Name: At_100uM_ABA_Mutants__P Parameter: Organism Value: A. thaliana
  misc_feature: MA Experiment 20000573 PARAMETER Experiment Name: At_100uM_ABA_Mutants__P Parameter: Plant Line Value: CS22 vs. Ler wt
  misc_feature: MA Experiment 20000573 PARAMETER Experiment Name: At_100uM_ABA_Mutants__P Parameter: Timepoint (hr) Value: N/A
  misc_feature: MA Experiment 20000573 PARAMETER Experiment Name: At_100uM_ABA_Mutants__P Parameter: Tissue Value: Whole Plant
  misc_feature: MA Experiment 20000573 PARAMETER Experiment Name: At_100uM_ABA_Mutants__P Parameter: Treatment Value: None
  misc_feature: MA Experiment ID: 20000574 Result: Down-regulated in Transcription
  misc_feature: MA Experiment 20000574 PARAMETER Experiment Name: At_100uM_ABA_Mutants__P Parameter: Organism Value: A. thaliana
  misc_feature: MA Experiment 20000574 PARAMETER Experiment Name: At_100uM_ABA_Mutants__P Parameter: Plant Line Value: CS23 vs. Ler wt
  misc_feature: MA Experiment 20000574 PARAMETER Experiment Name: At_100uM_ABA_Mutants__P Parameter: Timepoint (hr) Value: N/A
  misc_feature: MA Experiment 20000574 PARAMETER Experiment Name: At_100uM_ABA_Mutants__P Parameter: Tissue Value: Whole Plant
  misc_feature: MA Experiment 20000574 PARAMETER Experiment Name: At_100uM_ABA_Mutants__P Parameter: Treatment Value: None
  misc_feature: MA Experiment ID: 20001557 Result: Up-regulated in Transcription
  misc_feature: MA Experiment 20001557 PARAMETER Experiment Name: At_Drought_Soil_Dry_P Parameter: Age (day) Value: 27
  misc_feature: MA Experiment 20001557 PARAMETER Experiment Name: At_Drought_Soil_Dry_P Parameter: Organism Value: A. thaliana
  misc_feature: MA Experiment 20001557 PARAMETER Experiment Name: At_Drought_Soil_Dry_P Parameter: Plant Line Value: WS
  misc_feature: MA Experiment 20001557 PARAMETER Experiment Name: At_Drought_Soil_Dry_P Parameter: Post Timepoint (hr) Value: 3
  misc_feature: MA Experiment 20001557 PARAMETER Experiment Name: At_Drought_Soil_Dry_P Parameter: Post-Treatment Value: Re-Water vs. No Drought
  misc_feature: MA Experiment 20001557 PARAMETER Experiment Name: At_Drought_Soil_Dry_P Parameter: Timepoint (day) Value: 13
  misc_feature: MA Experiment 20001557 PARAMETER Experiment Name: At_Drought_Soil_Dry_P Parameter: Treatment Value: Drought vs. No Drought
  misc_feature: MA Experiment ID: 20001558 Result: Up-regulated in Transcription
  misc_feature: MA Experiment 20001558 PARAMETER Experiment Name: At_Drought_Soil_Dry_P Parameter: Age (day) Value: 27
  misc_feature: MA Experiment 20001558 PARAMETER Experiment Name: At_Drought_Soil_Dry_P Parameter: Organism Value: A. thaliana
  misc_feature: MA Experiment 20001558 PARAMETER Experiment Name: At_Drought_Soil_Dry_P Parameter: Plant Line Value: WS
  misc_feature: MA Experiment 20001558 PARAMETER Experiment Name: At_Drought_Soil_Dry_P Parameter: Post Timepoint (hr) Value: 6
  misc_feature: MA Experiment 20001558 PARAMETER Experiment Name: At_Drought_Soil_Dry_P Parameter: Post-Treatment Value: Re-Water vs. No Drought
  misc_feature: MA Experiment 20001558 PARAMETER Experiment Name: At_Drought_Soil_Dry_P Parameter: Timepoint (day) Value: 13
  misc_feature: MA Experiment 20001558 PARAMETER Experiment Name: At_Drought_Soil_Dry_P Parameter: Treatment Value: Drought vs. No Drought
ttttgtcgatttagccctaacctatacggctgctacatccagatttcctcatcctctattagggaagaagaaccaaaaccctaatcctatcttctcctcttataaatcgcttcaacaacagtttctttctcttctgatttgatccatgatttctcatctggaaccctagtttatacatccatcgggtgttactgttctttatctgggcaatcagtggtgtttttgttccttttgtatatctgtcgagacttctaggtgtgaaatcaaagcttgtttggtttatatcgatcttggttttagctgaatcgttgttaagatggctggaggtggaaacaggagagatgaaggatcgatcacgatccagagcactaatttgtttgcagcattggacactcgtaagaagaagaagaagtctgacaaggcagggaagagcaaagggtcttctaagtcacgagagccagagaaggagcctgagcctcaggtctattgggctcctacgcctttgaaagttaagtcttgggctgatattgatgatgaagacgacgatgatgactattatgcaaccactgctcctcctcagtctggttggagtacttctctgccttcccatactgattccaaagacgttcatgttgaggaaagtgaaagtgaggaagatattcttgatgaaggtgatgatgatgtggaggaagagcaggaacaggaaacagaggtacaggttcatccagagcctgaggtgaagaaagctcctgaagttcctgcacctcctaaagaggcagagaggcaactttccaagaaagagaggaaaaagaaggaacttgctgagcttgaagctttgttggctgattttggagttgcccccaaggagaacaatggcctagaggaatctcaagaggctggacaagaaaagaaagaagatgtcaatggagagggagagaagaaggagaatgcagcaggtggggagtcaaaggcatcaaaaaagaagaaaaagaaggataagcagaaggaggtaaaagaatctcaagagcaacaagcaaacaacaatgccgatgctgtagatgaagctgctgggtctgaaccaactgaggaagaatctccaattgacgtcaaggaaaggataaagaagcttgcatccatgaagaagaagaagtcaggcaaagaggtggatgctgcagctaaagctgctgcggaggaggcagctgcaagacgtaagaagctggccgcggcaaagaagaaggagaagaatcactataaccaacagcctgtgcggtaaaatcctgaatcaccaccattttgatcttgatggaaatgcaaatatgaacatgtatttcgccgtatattgttcatatgagtctctgtcctaataaatcttttgaagggtctggttcttagagttaaagacattgaatcctttttctagtcttattacaatgaacaggctaaagacaaaactactctctggagattttcatttctttttgaaacacctttgttttcttaatatcagaccttttttaggttcattatgtcttcaatcagcttcttatgtatggttcgatggtgttattttcttctttttttcgttcagttgcctgtgttttgattcatgccttgtcacaaaatcttttttggttatatgttccaaagtgattcccc

SEQ ID NO: 74442 - protein, 318 aa, Arabidopsis thaliana; identical to SEQ ID NO: 28893
  peptide (1)..(318): Ceres Seq. ID no. 5674655
  misc_feature (95)..(315): Pfam Name: Caldesmon Pfam Description: Caldesmon
  misc_feature (1)..(318): Homolog of NCBI NO: 18400901 NR Description: expressed protein; protein id: At2g25670.1, by cDNA: 12261., supported by cDNA: gi_17529065 [Arabidopsis >gi|25412339|pir||C84651 hypothetical protein At2g25670
  misc_feature (1)..(318): Homolog of NCBI NO: 21537167 NR Description: unknown [Arabidopsis thaliana]
  misc_feature (1)..(318): Homolog of NCBI NO: 17529066 NR Description: unknown protein [Arabidopsis thaliana]
  misc_feature (1)..(318): Homolog of NCBI NO: 15233865 NR Description: putative protein; protein id: At4g32610.1
  misc_feature (1)..(318): Homolog of NCBI NO: 33620414 NR Description: M355 [Lilium longiflorum]
  misc_feature (108)..(318): Homolog of NCBI NO: 34906156 NR Description: P0509B06.15 [Oryza sativa (japonica
  misc_feature (1)..(130): Homolog of NCBI NO: 34906156 NR Description: P0509B06.15 [Oryza sativa (japonica
  misc_feature (107)..(318): Homolog of NCBI NO: 7522210 NR Description: hypothetical protein pAFD103 - apple tree
  misc_feature (25)..(301): Homolog of NCBI NO: 8096269 NR Description: KED [Nicotiana tabacum]
  misc_feature (25)..(308): Homolog of NCBI NO: 23001116 NR Description: hypothetical protein [Magnetococcus sp. MC-1]

SEQ ID NO: 74443 - DNA, 2385 bp, Arabidopsis thaliana
  misc_feature (1)..(2385): Ceres Seq. ID no. 5675054
  misc_feature: MA Experiment ID: 20000184 Result: Down-regulated in Transcription
  misc_feature: MA Experiment 20000184 PARAMETER Experiment Name: At_Shoots__P Parameter: Age (day) Value: 7
  misc_feature: MA Experiment 20000184 PARAMETER Experiment Name: At_Shoots__P Parameter: Tissue Value: Shoots vs. Whole Plant
  misc_feature: MA Experiment ID: 20000234 Result: Down-regulated in Transcription
  misc_feature: MA Experiment 20000234 PARAMETER Experiment Name: At_Siliques_P Parameter: Age (day) Value: 21
  misc_feature: MA Experiment 20000234 PARAMETER Experiment Name: At_Siliques_P Parameter: Organism Value: A. thaliana
  misc_feature: MA Experiment 20000234 PARAMETER Experiment Name: At_Siliques_P Parameter: Plant Line Value: WS
  misc_feature: MA Experiment 20000234 PARAMETER Experiment Name: At_Siliques_P Parameter: Tissue Value: Less Than 5mm Siliques vs. Whole Plant
  misc_feature: MA Experiment ID: 20000235 Result: Down-regulated in Transcription
  misc_feature: MA Experiment 20000235 PARAMETER Experiment Name: At_Siliques_P Parameter: Age (day) Value: 21
  misc_feature: MA Experiment 20000235 PARAMETER Experiment Name: At_Siliques_P Parameter: Organism Value: A. thaliana
  misc_feature: MA Experiment 20000235 PARAMETER Experiment Name: At_Siliques_P Parameter: Plant Line Value: WS
  misc_feature: MA Experiment 20000235 PARAMETER Experiment Name: At_Siliques_P Parameter: Tissue Value: 5-10mm Siliques vs. Whole Plant
  misc_feature: MA Experiment ID: 20000265 Result: Down-regulated in Transcription
  misc_feature: MA Experiment 20000265 PARAMETER Experiment Name: At_Open_Flower_P Parameter: Age (day) Value: 21
  misc_feature: MA Experiment 20000265 PARAMETER Experiment Name: At_Open_Flower_P Parameter: Plant Line Value: WS
  misc_feature: MA Experiment 20000265 PARAMETER Experiment Name: At_Open_Flower_P Parameter: Tissue Value: Closed Flower vs. Whole Plant
  misc_feature: MA Experiment ID: 20000438 Result: Down-regulated in Transcription
  misc_feature: MA Experiment 20000438 PARAMETER Experiment Name: At_Shoots__P Parameter: Age (day) Value: 14
  misc_feature: MA Experiment 20000438 PARAMETER Experiment Name: At_Shoots__P Parameter: Tissue Value: Shoots vs. Whole Plant
  misc_feature: MA Experiment ID: 20000794 Result: Up-regulated in Transcription
  misc_feature: MA Experiment 20000794 PARAMETER Experiment Name: At_Petals_P Parameter: Age (day) Value: 23-25 days
  misc_feature: MA Experiment 20000794 PARAMETER Experiment Name: At_Petals_P Parameter: Plant Line Value: WS
  misc_feature: MA Experiment 20000794 PARAMETER Experiment Name: At_Petals_P Parameter: Tissue Value: Petals vs. Whole plant
  misc_feature: MA Experiment ID: 20001905 Result: Up-regulated in Transcription
  misc_feature: MA Experiment 20001905 PARAMETER Experiment Name: At_Drought_Reproduction_P Parameter: Age (day) Value: 40
  misc_feature: MA Experiment 20001905 PARAMETER Experiment Name: At_Drought_Reproduction_P Parameter: Organism Value: A. thaliana
  misc_feature: MA Experiment 20001905 PARAMETER Experiment Name: At_Drought_Reproduction_P Parameter: Plant Line Value: WS
  misc_feature: MA Experiment 20001905 PARAMETER Experiment Name: At_Drought_Reproduction_P Parameter: Timepoint (day) Value: 10
  misc_feature: MA Experiment 20001905 PARAMETER Experiment Name: At_Drought_Reproduction_P Parameter: Tissue Value: Rosettes
  misc_feature: MA Experiment 20001905 PARAMETER Experiment Name: At_Drought_Reproduction_P Parameter: Treatment Value: Drought vs. No Drought
  misc_feature: MA Experiment ID: 20001906 Result: Up-regulated in Transcription
  misc_feature: MA Experiment 20001906 PARAMETER Experiment Name: At_Drought_Reproduction_P Parameter: Age (day) Value: 35
  misc_feature: MA Experiment 20001906 PARAMETER Experiment Name: At_Drought_Reproduction_P Parameter: Organism Value: A. thaliana
  misc_feature: MA Experiment 20001906 PARAMETER Experiment Name: At_Drought_Reproduction_P Parameter: Plant Line Value: WS
  misc_feature: MA Experiment 20001906 PARAMETER Experiment Name: At_Drought_Reproduction_P Parameter: Timepoint (day) Value: 5
  misc_feature: MA Experiment 20001906 PARAMETER Experiment Name: At_Drought_Reproduction_P Parameter: Tissue Value: Siliques
  misc_feature: MA Experiment 20001906 PARAMETER Experiment Name: At_Drought_Reproduction_P Parameter: Treatment Value: Drought vs. No Drought
  misc_feature: MA Experiment ID: 20001908 Result: Up-regulated in Transcription
  misc_feature: MA Experiment 20001908 PARAMETER Experiment Name: At_Drought_Reproduction_P Parameter: Age (day) Value: 40
  misc_feature: MA Experiment 20001908 PARAMETER Experiment Name: At_Drought_Reproduction_P Parameter: Organism Value: A. thaliana
  misc_feature: MA Experiment 20001908 PARAMETER Experiment Name: At_Drought_Reproduction_P Parameter: Plant Line Value: WS
  misc_feature: MA Experiment 20001908 PARAMETER Experiment Name: At_Drought_Reproduction_P Parameter: Timepoint (day) Value: 10
  misc_feature: MA Experiment 20001908 PARAMETER Experiment Name: At_Drought_Reproduction_P Parameter: Tissue Value: Siliques
  misc_feature: MA Experiment 20001908 PARAMETER Experiment Name: At_Drought_Reproduction_P Parameter: Treatment Value: Drought vs. No Drought
  misc_feature: Pfam Name: Pkinase Pfam Description: Protein kinase domain
ctcgaggtcttagggttttagctgttgacttgtcgcagcttcactggagaattgaatgaattttcttatggtttcaggaaggtgatgaatgttgagatcgatttttgatttcaatcaacgttcaacgaagatggtgatgatttctcataagttggatttgattttggttttcataatcgtaatcggaggatctattttccgacgagtttctgctaatttcaccgtaccttgtaacggaagatgcggtggattgactctgccttatcctttcgggttttcaaacggttgttcgatccgattcgattgctctgcggcggagaaaccgatgatcggagacttttccgttcaaaacgtgacggaaaacagtatatttgtcggtctctctcacaattgtactcggaagattgaagatatgaatccgcttttcggcgagaatttcgcaccaacgtcggagaacagtttcttgatggagaattgtaaccgtaccaccgatggttgctctatcaagcagaagtttctggagaatgtgctgaaactcaaaagttgtgatgctactggaaacataagttgtttttctttagatagtaattcgagttcgaagaactcagctaagtttttcagtatgaagacattaaggaacagctcgtgtagtttgttgttctcgtcgatagctttcgagtctgtaggtgtgaatgcgggtatagcgttagagtttgagcgagttcggttaggttggtggcttaagggaggttgcgagagcggaacttgcgcggctaacaccgattgtacagacgttgaaactcctcatggatatgcaggacaccggtgctcatgtcttgacggtttccacggtgacggatacaccaacccttgccagagagcactaccggagtgccgtggttccaagctcgtctggagacattgtagatctaatcttattactattgtaggaggaactgttggtggagcgtttttactagctgccttggcttttttcttcttttgtaagcggagacggtctactcctttgagaagtcatttaagcgcaaagcgtcttttgtctgaagctgcagggaactcgagtgtcgcctttttcccttacaaggaaatcgagaaagcgacagatggtttctctgaaaagcagaagttaggaataggtgcatatggtacggtctatagaggaaagctccaaaatgatgaatgggttgctatcaaaagacttagacatagagattcagaaagtcttgaccaagtcatgaatgagatcaagcttctttcctctgtgagtcacccgaatcttgtccgtctcttaggatgttgtatagaacaaggcgatccagttctcgtttatgagtacatgccgaatggaactctatctgaacatctacaaagagatagagggagtggtcttccatggaccttgcgtctcactgttgctactcaaacagctaaagcaatcgcgtatctccactcttcaatgaacccaccgatctatcaccgtgacatcaaatctaccaatatccttcttgattatgatttcaactccaaagttgcggatttcggactctctagactgggaatgacggaatcttctcacatatcaacggctcctcaagggactcctggttatcttgacccgcagtaccatcaatgctttcatctctctgataagagcgacgtctacagctttggagtcgtccttgccgagattataacgggattgaaagtcgttgatttcacacgtccacataccgaaatcaacctagcggctcttgctgttgacaaaatcgggtcaggttgtatcgatgagataatagacccgattcttgacttggatctcgacgcatggactctctcatccatacacacggtggctgagcttgcatttcgatgcttagccttccacagtgacatgagaccgacaatgaccgaagtagcggacgagcttgaacagataagactcagtggttggattccaagcatgagcttggattcaccagccggttctctccgttcatctgatcgaggaagcgaaagatcagttaaacaatcatcaataggaagcagaagagtcgttatccctcagaaacaacctgattgcctcgcatccgtcgaagagattagcgatagctcacccatctcagttcaagatccttggttaagtgcacaaagctcaccgtctacaaatacattgctcggtaacattccaagatgatagtatgatctcaaaacacgattaccactttcttgtttatataagtccctcttttgtgtagctttcacaatcattcagtgtttataatgctaagtagagagattaacaatggtgaaaacaggtttatacatgagttataatgtaaacgatcttgaaacaagatctttcaa

SEQ ID NO: 74444 - protein, 708 aa, Arabidopsis thaliana
  peptide (1)..(708): Ceres Seq. ID no. 5675055
  misc_feature: Pfam Name: Pkinase Pfam Description: Protein kinase domain
  misc_feature (48)..(705): Homolog of NCBI NO: 34902300 NR Description: Putative protein kinase [Oryza sativa (japonica group)] >gi|24308627|gb|AAN52750.1| Putative protein kinase
  misc_feature (51)..(625): Homolog of NCBI NO: 9758129 NR Description: contains similarity to protein
  misc_feature (51)..(625): Homolog of NCBI NO: 26450415 NR Description: unknown protein [Arabidopsis thaliana]
  misc_feature (182)..(625): Homolog of NCBI NO: 30698255 NR Description: protein kinase family [Arabidopsis thaliana]
  misc_feature (15)..(262): Homolog of NCBI NO: 18411489 NR Description: Expressed protein; protein id: At4g00955.1, by cDNA: 93818. [Arabidopsis thaliana]
  misc_feature (202)..(644): Homolog of NCBI NO: 15408726 NR Description: P0443D08.8 [Oryza sativa (japonica
  misc_feature (296)..(634): Homolog of NCBI NO: 25402857 NR Description: protein F15H18.11 [imported] - Arabidopsis >gi|6714300|gb|AAF25996.1|AC013354_15 F15H18.11 [Arabidopsis
  misc_feature (283)..(624): Homolog of NCBI NO: 34911340 NR Description: P0034C09.1 [Oryza sativa (japonica
  misc_feature (333)..(634): Homolog of NCBI NO: 15221764 NR Description: wall-associated kinase, putative; protein id:
  misc_feature (328)..(648): Homolog of NCBI NO: 15408730 NR Description: P0443D08.12 [Oryza sativa (japonica
MLRSIFDFNQRSTKMVMISHKLDLILVFIIVIGGSIFRRVSANFTVPCNGRCGGLTLPYPFGFSNGCSIRFDCSAAEKPMIGDFSVQNVTENSIFVGLSHNCTRKIEDMNPLFGENFAPTSENSFLMENCNRTTDGCSIKQKFLENVLKLKSCDATGNISCFSLDSNSSSKNSAKFFSMKTLRNSSCSLLFSSIAFESVGVNAGIALEFERVRLGWWLKGGCESGTCAANTDCTDVETPHGYAGHRCSCLDGFHGDGYTNPCQRALPECRGSKLVWRHCRSNLITIVGGTVGGAFLLAALAFFFFCKRRRSTPLRSHLSAKRLLSEAAGNSSVAFFPYKEIEKATDGFSEKQKLGIGAYGTVYRGKLQNDEWVAIKRLRHRDSESLDQVMNEIKLLSSVSHPNLVRLLGCCIEQGDPVLVYEYMPNGTLSEHLQRDRGSGLPWTLRLTVATQTAKAIAYLHSSMNPPIYHRDIKSTNILLDYDFNSKVADFGLSRLGMTESSHISTAPQGTPGYLDPQYHQCFHLSDKSDVYSFGVVLAEIITGLKVVDFTRPHTEINLAALAVDKIGSGCIDEIIDPILDLDLDAWTLSSIHTVAELAFRCLAFHSDMRPTMTEVADELEQIRLSGWIPSMSLDSPAGSLRSSDRGSERSVKQSSIGSRRVVIPQKQPDCLASVEEISDSSPISVQDPWLSAQSSPSTNTLLGNIPR

SEQ ID NO: 74445 - protein, 694 aa, Arabidopsis thaliana
  peptide (1)..(694): Ceres Seq. ID no. 5675056
  misc_feature: Pfam Name: Pkinase Pfam Description: Protein kinase domain
  misc_feature (34)..(691): Homolog of NCBI NO: 34902300 NR Description: Putative protein kinase [Oryza sativa (japonica group)] >gi|24308627|gb|AAN52750.1| Putative protein kinase
  misc_feature (37)..(611): Homolog of NCBI NO: 9758129 NR Description: contains similarity to protein
  misc_feature (37)..(611): Homolog of NCBI NO: 26450415 NR Description: unknown protein [Arabidopsis thaliana]
  misc_feature (168)..(611): Homolog of NCBI NO: 30698255 NR Description: protein kinase family [Arabidopsis thaliana]
  misc_feature (1)..(248): Homolog of NCBI NO: 18411489 NR Description: Expressed protein; protein id: At4g00955.1, by cDNA: 93818. [Arabidopsis thaliana]
  misc_feature (188)..(630): Homolog of NCBI NO: 15408726 NR Description: P0443D08.8 [Oryza sativa (japonica
  misc_feature (282)..(620): Homolog of NCBI NO: 25402857 NR Description: protein F15H18.11 [imported] - Arabidopsis >gi|6714300|gb|AAF25996.1|AC013354_15 F15H18.11 [Arabidopsis
  misc_feature (269)..(610): Homolog of NCBI NO: 34911340 NR Description: P0034C09.1 [Oryza sativa (japonica
  misc_feature (319)..(620): Homolog of NCBI NO: 15221764 NR Description: wall-associated kinase, putative; protein id:
  misc_feature (314)..(634): Homolog of NCBI NO: 15408730 NR Description: P0443D08.12 [Oryza sativa (japonica
MVMISHKLDLILVFIIVIGGSIFRRVSANFTVPCNGRCGGLTLPYPFGFSNGCSIRFDCSAAEKPMIGDFSVQNVTENSIFVGLSHNCTRKIEDMNPLFGENFAPTSENSFLMENCNRTTDGCSIKQKFLENVLKLKSCDATGNISCFSLDSNSSSKNSAKFFSMKTLRNSSCSLLFSSIAFESVGVNAGIALEFERVRLGWWLKGGCESGTCAANTDCTDVETPHGYAGHRCSCLDGFHGDGYTNPCQRALPECRGSKLVWRHCRSNLITIVGGTVGGAFLLAALAFFFFCKRRRSTPLRSHLSAKRLLSEAAGNSSVAFFPYKEIEKATDGFSEKQKLGIGAYGTVYRGKLQNDEWVAIKRLRHRDSESLDQVMNEIKLLSSVSHPNLVRLLGCCIEQGDPVLVYEYMPNGTLSEHLQRDRGSGLPWTLRLTVATQTAKAIAYLHSSMNPPIYHRDIKSTNILLDYDFNSKVADFGLSRLGMTESSHISTAPQGTPGYLDPQYHQCFHLSDKSDVYSFGVVLAEIITGLKVVDFTRPHTEINLAALAVDKIGSGCIDEIIDPILDLDLDAWTLSSIHTVAELAFRCLAFHSDMRPTMTEVADELEQIRLSGWIPSMSLDSPAGSLRSSDRGSERSVKQSSIGSRRVVIPQKQPDCLASVEEISDSSPISVQDPWLSAQSSPSTNTLLGNIPR

SEQ ID NO: 74446 - protein, 692 aa, Arabidopsis thaliana
  peptide (1)..(692): Ceres Seq. ID no. 5675057
  misc_feature: Pfam Name: Pkinase Pfam Description: Protein kinase domain
  misc_feature (32)..(689): Homolog of NCBI NO: 34902300 NR Description: Putative protein kinase [Oryza sativa (japonica group)] >gi|24308627|gb|AAN52750.1| Putative protein kinase
  misc_feature (35)..(609): Homolog of NCBI NO: 9758129 NR Description: contains similarity to protein
  misc_feature (35)..(609): Homolog of NCBI NO: 26450415 NR Description: unknown protein [Arabidopsis thaliana]
  misc_feature (166)..(609): Homolog of NCBI NO: 30698255 NR Description: protein kinase family [Arabidopsis thaliana]
  misc_feature (1)..(246): Homolog of NCBI NO: 18411489 NR Description: Expressed protein; protein id: At4g00955.1, by cDNA: 93818. [Arabidopsis thaliana]
  misc_feature (186)..(628): Homolog of NCBI NO: 15408726 NR Description: P0443D08.8 [Oryza sativa (japonica
  misc_feature (280)..(618): Homolog of NCBI NO: 25402857 NR Description: protein F15H18.11 [imported] - Arabidopsis >gi|6714300|gb|AAF25996.1|AC013354_15 F15H18.11 [Arabidopsis
  misc_feature (267)..(608): Homolog of NCBI NO: 34911340 NR Description: P0034C09.1 [Oryza sativa (japonica
  misc_feature (317)..(618): Homolog of NCBI NO: 15221764 NR Description: wall-associated kinase, putative; protein id:
  misc_feature (312)..(632): Homolog of NCBI NO: 15408730 NR Description: P0443D08.12 [Oryza sativa (japonica
MISHKLDLILVFIIVIGGSIFRRVSANFTVPCNGRCGGLTLPYPFGFSNGCSIRFDCSAAEKPMIGDFSVQNVTENSIFVGLSHNCTRKIEDMNPLFGENFAPTSENSFLMENCNRTTDGCSIKQKFLENVLKLKSCDATGNISCFSLDSNSSSKNSAKFFSMKTLRNSSCSLLFSSIAFESVGVNAGIALEFERVRLGWWLKGGCESGTCAANTDCTDVETPHGYAGHRCSCLDGFHGDGYTNPCQRALPECRGSKLVWRHCRSNLITIVGGTVGGAFLLAALAFFFFCKRRRSTPLRSHLSAKRLLSEAAGNSSVAFFPYKEIEKATDGFSEKQKLGIGAYGTVYRGKLQNDEWVAIKRLRHRDSESLDQVMNEIKLLSSVSHPNLVRLLGCCIEQGDPVLVYEYMPNGTLSEHLQRDRGSGLPWTLRLTVATQTAKAIAYLHSSMNPPIYHRDIKSTNILLDYDFNSKVADFGLSRLGMTESSHISTAPQGTPGYLDPQYHQCFHLSDKSDVYSFGVVLAEIITGLKVVDFTRPHTEINLAALAVDKIGSGCIDEIIDPILDLDLDAWTLSSIHTVAELAFRCLAFHSDMRPTMTEVADELEQIRLSGWIPSMSLDSPAGSLRSSDRGSERSVKQSSIGSRRVVIPQKQPDCLASVEEISDSSPISVQDPWLSAQSSPSTNTLLGNIPR

SEQ ID NO: 74447 - DNA, 1237 bp, Arabidopsis thaliana
  misc_feature (1)..(1237): Ceres Seq. ID no. 5675381
  misc_feature: MA Experiment ID: 108435 Result: Down-regulated in Transcription
  misc_feature: MA Experiment 108435 PARAMETER Experiment Name: At_stm_Mutants_cDNA_P Parameter: Plant Line Value: wt Landsburg vs stm
  misc_feature: MA Experiment 108435 PARAMETER Experiment Name: At_stm_Mutants_cDNA_P Parameter: Tissue Value: Shoot Apical Meristem Region
  misc_feature: MA Experiment ID: 108462 Result: Up-regulated in Transcription
  misc_feature: MA Experiment 108462 PARAMETER Experiment Name: At_Germinating_Seeds_cDNA_P Parameter: Age (day) Value: 2 vs. 0
  misc_feature: MA Experiment 108462 PARAMETER Experiment Name: At_Germinating_Seeds_cDNA_P Parameter: Tissue Value: Germinating Seeds
  misc_feature: MA Experiment ID: 108464 Result: Up-regulated in Transcription
  misc_feature: MA Experiment 108464 PARAMETER Experiment Name: At_Germinating_Seeds_cDNA_P Parameter: Age (day) Value: 4 vs. 0
  misc_feature: MA Experiment 108464 PARAMETER Experiment Name: At_Germinating_Seeds_cDNA_P Parameter: Tissue Value: Germinating Seeds
  misc_feature: MA Experiment ID: 108561 Result: Down-regulated in Transcription
  misc_feature: MA Experiment 108561 PARAMETER Experiment Name: At_100uM_ABA_cDNA_P Parameter: Timepoint (hr) Value: 6
  misc_feature: MA Experiment 108561 PARAMETER Experiment Name: At_100uM_ABA_cDNA_P Parameter: Tissue Value: Aerial
  misc_feature: MA Experiment 108561 PARAMETER Experiment Name: At_100uM_ABA_cDNA_P Parameter: Treatment Value: 100uM ABA vs. No Treatment
  misc_feature: MA Experiment ID: 108576 Result: Down-regulated in Transcription
  misc_feature: MA Experiment 108576 PARAMETER Experiment Name: At_42deg_Heat_cDNA_P Parameter: Temperature (deg C) Value: 42 vs. 22
  misc_feature: MA Experiment 108576 PARAMETER Experiment Name: At_42deg_Heat_cDNA_P Parameter: Timepoint (hr) Value: 1
  misc_feature: MA Experiment 108576 PARAMETER Experiment Name: At_42deg_Heat_cDNA_P Parameter: Tissue Value: Aerial
  misc_feature: MA Experiment ID: 108595 Result: Down-regulated in Transcription
  misc_feature: MA Experiment 108595 PARAMETER Experiment Name: At_Ler-pi_Ovule_cDNA_P Parameter: Plant Line Value: null
  misc_feature: MA Experiment ID: 108609 Result: Down-regulated in Transcription
  misc_feature: MA Experiment 108609 PARAMETER Experiment Name: At_100uM_ABA_cDNA_P Parameter: Timepoint (hr) Value: 24
  misc_feature: MA Experiment 108609 PARAMETER Experiment Name: At_100uM_ABA_cDNA_P Parameter: Tissue Value: Aerial
  misc_feature: MA Experiment 108609 PARAMETER Experiment Name: At_100uM_ABA_cDNA_P Parameter: Treatment Value: 100uM ABA vs. No Treatment
  misc_feature: MA Experiment ID: 20000070 Result: Down-regulated in Transcription
  misc_feature: MA Experiment 20000070 PARAMETER Experiment Name: At_100uM_ABA_Mutants_cDNA_P Parameter: Plant Line Value: CS24
  misc_feature: MA Experiment 20000070 PARAMETER Experiment Name: At_100uM_ABA_Mutants_cDNA_P Parameter: Timepoint (hr) Value: 6
  misc_feature: MA Experiment 20000070 PARAMETER Experiment Name: At_100uM_ABA_Mutants_cDNA_P Parameter: Tissue Value: Aerial
  misc_feature: MA Experiment 20000070 PARAMETER Experiment Name: At_100uM_ABA_Mutants_cDNA_P Parameter: Treatment Value: 100uM ABA vs. No Treatment
  misc_feature: MA Experiment ID: 20000144 Result: Down-regulated in Transcription
  misc_feature: MA Experiment 20000144 PARAMETER Experiment Name: At_42deg_Heat_cDNA_P Parameter: Temperature (deg C) Value: 42 vs. 22
  misc_feature: MA Experiment 20000144 PARAMETER Experiment Name: At_42deg_Heat_cDNA_P Parameter: Timepoint (hr) Value: 1
  misc_feature: MA Experiment 20000144 PARAMETER Experiment Name: At_42deg_Heat_cDNA_P Parameter: Tissue Value: Aerial
  misc_feature: MA Experiment ID: 20000171 Result: Down-regulated in Transcription
  misc_feature: MA Experiment 20000171 PARAMETER Experiment Name: At_42deg_Heat_P Parameter: Age (day) Value: 14
  misc_feature: MA Experiment 20000171 PARAMETER Experiment Name: At_42deg_Heat_P Parameter: Organism Value: A. thaliana
  misc_feature: MA Experiment 20000171 PARAMETER Experiment Name: At_42deg_Heat_P Parameter: Plant Line Value: WS
  misc_feature: MA Experiment 20000171 PARAMETER Experiment Name: At_42deg_Heat_P Parameter: Temperature (deg C) Value: 42 vs. 22
  misc_feature: MA Experiment 20000171 PARAMETER Experiment Name: At_42deg_Heat_P Parameter: Timepoint (hr) Value: 1
  misc_feature: MA Experiment 20000171 PARAMETER Experiment Name: At_42deg_Heat_P Parameter: Tissue Value: Aerial
  misc_feature: MA Experiment ID: 20000173 Result: Down-regulated in Transcription
  misc_feature: MA Experiment 20000173 PARAMETER Experiment Name: At_42deg_Heat_P Parameter: Age (day) Value: 14
  misc_feature: MA Experiment 20000173 PARAMETER Experiment Name: At_42deg_Heat_P Parameter: Organism Value: A. thaliana
  misc_feature: MA Experiment 20000173 PARAMETER Experiment Name: At_42deg_Heat_P Parameter: Plant Line Value: WS
  misc_feature: MA Experiment 20000173 PARAMETER Experiment Name: At_42deg_Heat_P Parameter: Temperature (deg C) Value: 42 vs. 22
  misc_feature: MA Experiment 20000173 PARAMETER Experiment Name: At_42deg_Heat_P Parameter: Timepoint (hr) Value: 6
  misc_feature: MA Experiment 20000173 PARAMETER Experiment Name: At_42deg_Heat_P Parameter: Tissue Value: Aerial
  misc_feature: MA Experiment ID: 20000184 Result: Up-regulated in Transcription
  misc_feature: MA Experiment 20000184 PARAMETER Experiment Name: At_Shoots__P Parameter: Age (day) Value: 7
  misc_feature: MA Experiment 20000184 PARAMETER Experiment Name: At_Shoots__P Parameter: Tissue Value: Shoots vs. Whole Plant
  misc_feature: MA Experiment ID: 20000234 Result: Up-regulated in Transcription
  misc_feature: MA Experiment 20000234 PARAMETER Experiment Name: At_Siliques_P Parameter: Age (day) Value: 21
  misc_feature: MA Experiment 20000234 PARAMETER Experiment Name: At_Siliques_P Parameter: Organism Value: A. thaliana
  misc_feature: MA Experiment 20000234 PARAMETER Experiment Name: At_Siliques_P Parameter: Plant Line Value: WS
  misc_feature: MA Experiment 20000234 PARAMETER Experiment Name: At_Siliques_P Parameter: Tissue Value: Less Than 5mm Siliques vs. Whole Plant
  misc_feature: MA Experiment ID: 20000437 Result: Down-regulated in Transcription
  misc_feature: MA Experiment 20000437 PARAMETER Experiment Name: At_Drought_P Parameter: Age (day) Value: 8
  misc_feature: MA Experiment 20000437 PARAMETER Experiment Name: At_Drought_P Parameter: Organism Value: A. thaliana
  misc_feature: MA Experiment 20000437 PARAMETER Experiment Name: At_Drought_P Parameter: Plant Line Value: WS
  misc_feature: MA Experiment 20000437 PARAMETER Experiment Name: At_Drought_P Parameter: Timepoint (hr) Value: 24
  misc_feature: MA Experiment 20000437 PARAMETER Experiment Name: At_Drought_P Parameter: Tissue Value: Whole Plant
  misc_feature: MA Experiment 20000437 PARAMETER Experiment Name: At_Drought_P Parameter: Treatment Value: Drought vs. No Drought
  misc_feature: MA Experiment ID: 20000438 Result: Up-regulated in Transcription
  misc_feature: MA Experiment 20000438 PARAMETER Experiment Name: At_Shoots__P Parameter: Age (day) Value: 14
  misc_feature: MA Experiment 20000438 PARAMETER Experiment Name: At_Shoots__P Parameter: Tissue Value: Shoots vs. Whole Plant
  misc_feature: MA Experiment ID: 20001560 Result: Up-regulated in Transcription
  misc_feature: MA Experiment 20001560 PARAMETER Experiment Name: At_Drought_Soil_Dry_P Parameter: Age (day) Value: 28
  misc_feature: MA Experiment 20001560 PARAMETER Experiment Name: At_Drought_Soil_Dry_P Parameter: Organism Value: A. thaliana
  misc_feature: MA Experiment 20001560 PARAMETER Experiment Name: At_Drought_Soil_Dry_P Parameter: Plant Line Value: WS
  misc_feature: MA Experiment 20001560 PARAMETER Experiment Name: At_Drought_Soil_Dry_P Parameter: Post Timepoint (hr) Value: None
  misc_feature: MA Experiment 20001560 PARAMETER Experiment Name: At_Drought_Soil_Dry_P Parameter: Post-Treatment Value: None
  misc_feature: MA Experiment 20001560 PARAMETER Experiment Name: At_Drought_Soil_Dry_P Parameter: Timepoint (day) Value: 14
  misc_feature: MA Experiment 20001560 PARAMETER Experiment Name: At_Drought_Soil_Dry_P Parameter: Treatment Value: Drought vs. No Drought
aattgtaatttttgtcacagtcattaaacaaaacgcttttatgacgatatcaacggttatagcattcatgtccatgttcctagtatttgttatgtctggtccgatagtggtggagggacgtgcttttttcgtgttcggtgactcgctcgtcgacagtggcaacaacaactatctggtgacaactgcacgtgccgactctccaccgtatggaatcgattttccaactcggagaccaaccggccggttttccaacggtcttaacattccagatcttatcagtgaggcaatcggtaacgaagagccaccgttaccttaccttagtccagagctaaggggccggagtcttcttaacggtgctaatttcgcctccgctggtatcggaattctcaatgataccggatttcaattcatcaacattataagaatgtaccaacaactcgattacttccaacaataccaacaacgtgtgagtcgcttgattgggaaaccgcaaactcagcggctcgtgagtcaagcgcttgtattaatcacggtcggtggaaacgattttgtgaacaactatttcttgtttccatattccgctagatcacgccaattcactctaccggattacgtccgactcctaatttctgaatacaaaaaaatactattgaggttaaattcacttggagtgggtcgagttctagtgacaggagctggaccactaggatgtgcaccggccgaactggcgagatcaggtacgtcgaatggaagatgctcggccgagctacaacgagctgcatctctatatgatcctcagctacttcaaatgataaatgaacttaacaaaaaaattgggagaaatgtgtttattgctgctaacactaaccaaatgcaagaggattttctaagcactccacgaagatatggatttgtaacatcgaaggttgcttgttgcggacaagggccgtacaatgggatgggtttgtgtacggttctatcaaacttgtgtccgaaccgtgagttatacgtcttttgggatgcgtttcatccgactgagaaagcaaaccgcatgatagtccgacatatcttgaccggtaccaccaagtatatgaaccccatgaaccttagctctgctcttgccctatgagccacacacgttgaagtgggaaactcggttttgtttatttcactcgcaagatatatgtatcgactaccgagtacaagagtatgaaataagataactcagtctcaattt

SEQ ID NO: 74448 - protein, 375 aa, Arabidopsis thaliana
  peptide (1)..(375): Ceres Seq. ID no. 5675382
  misc_feature (42)..(356): Pfam Name: GDSL-like Lipase/Acylhydrolase Pfam Description: GDSL-like Lipase/Acylhydrolase
  misc_feature (14)..(375): Homolog of NCBI NO: 15238814 NR Description: putative protein; protein id: At5g18430.1
  misc_feature (23)..(375): Homolog of NCBI NO: 15229265 NR Description: putative GDSL-motif lipase/acylhydrolase; protein
  misc_feature (14)..(375): Homolog of NCBI NO: 15242808 NR Description: putative protein; protein id: At5g33370.1,
  misc_feature (16)..(375): Homolog of NCBI NO: 15235421 NR Description: Proline-rich APG - like protein; protein id:
  misc_feature (14)..(375): Homolog of NCBI NO: 32489520 NR Description: OSJNBa0043L24.11 [Oryza sativa (japonica
  misc_feature (40)..(375): Homolog of NCBI NO: 28071322 NR Description: P0705A05.30 [Oryza sativa (japonica
  misc_feature (20)..(375): Homolog of NCBI NO: 37535146 NR Description: putative early nodulin gene (Enod) related
  misc_feature (38)..(375): Homolog of NCBI NO: 22758315 NR Description: putative early nodulin gene (Enod) related
  misc_feature (34)..(202): Homolog of NCBI NO: 37789825 NR Description: putative GDSL-motif lipase [Vitis vinifera]
  misc_feature (41)..(370): Homolog of NCBI NO: 15227849 NR Description: putative GDSL-motif lipase/hydrolase; protein id:
IVIFVTVIKQNAFMTISTVIAFMSMFLVFVMSGPIVVEGRAFFVFGDSLVDSGNNNYLVTTARADSPPYGIDFPTRRPTGRFSNGLNIPDLISEAIGNEEPPLPYLSPELRGRSLLNGANFASAGIGILNDTGFQFINIIRMYQQLDYFQQYQQRVSRLIGKPQTQRLVSQALVLITVGGNDFVNNYFLFPYSARSRQFTLPDYVRLLISEYKKILLRLNSLGVGRVLVTGAGPLGCAPAELARSGTSNGRCSAELQRAASLYDPQLLQMINELNKKIGRNVFIAANTNQMQEDFLSTPRRYGFVTSKVACCGQGPYNGMGLCTVLSNLCPNRELYVFWDAFHPTEKANRMIVRHILTGTTKYMNPMNLSSALAL

SEQ ID NO: 74449 - protein, 362 aa, Arabidopsis thaliana
  peptide (1)..(362): Ceres Seq. ID no. 5675383
  misc_feature (29)..(343): Pfam Name: GDSL-like Lipase/Acylhydrolase Pfam Description: GDSL-like Lipase/Acylhydrolase
  misc_feature (1)..(362): Homolog of NCBI NO: 15238814 NR Description: putative protein; protein id: At5g18430.1
  misc_feature (10)..(362): Homolog of NCBI NO: 15229265 NR Description: putative GDSL-motif lipase/acylhydrolase; protein
  misc_feature (1)..(362): Homolog of NCBI NO: 15242808 NR Description: putative protein; protein id: At5g33370.1,
  misc_feature (3)..(362): Homolog of NCBI NO: 15235421 NR Description: Proline-rich APG - like protein; protein id:
  misc_feature (1)..(362): Homolog of NCBI NO: 32489520 NR Description: OSJNBa0043L24.11 [Oryza sativa (japonica
  misc_feature (27)..(362): Homolog of NCBI NO: 28071322 NR Description: P0705A05.30 [Oryza sativa (japonica
  misc_feature (7)..(362): Homolog of NCBI NO: 37535146 NR Description: putative early nodulin gene (Enod) related
  misc_feature (25)..(362): Homolog of NCBI NO: 22758315 NR Description: putative early nodulin gene (Enod) related
  misc_feature (21)..(189): Homolog of NCBI NO: 37789825 NR Description: putative GDSL-motif lipase [Vitis vinifera]
  misc_feature (28)..(357): Homolog of NCBI NO: 15227849 NR Description: putative GDSL-motif lipase/hydrolase; protein id:
MTISTVIAFMSMFLVFVMSGPIVVEGRAFFVFGDSLVDSGNNNYLVTTARADSPPYGIDFPTRRPTGRFSNGLNIPDLISEAIGNEEPPLPYLSPELRGRSLLNGANFASAGIGILNDTGFQFINIIRMYQQLDYFQQYQQRVSRLIGKPQTQRLVSQALVLITVGGNDFVNNYFLFPYSARSRQFTLPDYVRLLISEYKKILLRLNSLGVGRVLVTGAGPLGCAPAELARSGTSNGRCSAELQRAASLYDPQLLQMINELNKKIGRNVFIAANTNQMQEDFLSTPRRYGFVTSKVACCGQGPYNGMGLCTVLSNLCPNRELYVFWDAFHPTEKANRMIVRHILTGTTKYMNPMNLSSALAL

SEQ ID NO: 74450 - protein, 353 aa, Arabidopsis thaliana
  peptide (1)..(353): Ceres Seq. ID no. 5675384
  misc_feature (20)..(334): Pfam Name: GDSL-like Lipase/Acylhydrolase Pfam Description: GDSL-like Lipase/Acylhydrolase
  misc_feature (1)..(353): Homolog of NCBI NO: 15238814 NR Description: putative protein; protein id: At5g18430.1
  misc_feature (1)..(353): Homolog of NCBI NO: 15229265 NR Description: putative GDSL-motif lipase/acylhydrolase; protein
  misc_feature (1)..(353): Homolog of NCBI NO: 15242808 NR Description: putative protein; protein id: At5g33370.1,
  misc_feature (1)..(353): Homolog of NCBI NO: 15235421 NR Description: Proline-rich APG - like protein; protein id:
  misc_feature (1)..(353): Homolog of NCBI NO: 32489520 NR Description: OSJNBa0043L24.11 [Oryza sativa (japonica
  misc_feature (18)..(353): Homolog of NCBI NO: 28071322 NR Description: P0705A05.30 [Oryza sativa (japonica
  misc_feature (1)..(353): Homolog of NCBI NO: 37535146 NR Description: putative early nodulin gene (Enod) related
  misc_feature (16)..(353): Homolog of NCBI NO: 22758315 NR Description: putative early nodulin gene (Enod) related
  misc_feature (12)..(180): Homolog of NCBI NO: 37789825 NR Description: putative GDSL-motif lipase [Vitis vinifera]
  misc_feature (19)..(348): Homolog of NCBI NO: 15227849 NR Description: putative GDSL-motif lipase/hydrolase; protein id:
MSMFLVFVMSGPIVVEGRAFFVFGDSLVDSGNNNYLVTTARADSPPYGIDFPTRRPTGRFSNGLNIPDLISEAIGNEEPPLPYLSPELRGRSLLNGANFASAGIGILNDTGFQFINIIRMYQQLDYFQQYQQRVSRLIGKPQTQRLVSQALVLITVGGNDFVNNYFLFPYSARSRQFTLPDYVRLLISEYKKILLRLNSLGVGRVLVTGAGPLGCAPAELARSGTSNGRCSAELQRAASLYDPQLLQMINELNKKIGRNVFIAANTNQMQEDFLSTPRRYGFVTSKVACCGQGPYNGMGLCTVLSNLCPNRELYVFWDAFHPTEKANRMIVRHILTGTTKYMNPMNLSSALAL

SEQ ID NO: 74451 - DNA, 669 bp, Arabidopsis thaliana
  misc_feature (1)..(669): Ceres Seq. ID no. 5675408
  misc_feature: MA Experiment ID: 108463 Result: Up-regulated in Transcription
  misc_feature: MA Experiment 108463 PARAMETER Experiment Name: At_Germinating_Seeds_cDNA_P Parameter: Age (day) Value: 3 vs. 0
  misc_feature: MA Experiment 108463 PARAMETER Experiment Name: At_Germinating_Seeds_cDNA_P Parameter: Tissue Value: Germinating Seeds
  misc_feature: MA Experiment ID: 108464 Result: Up-regulated in Transcription
  misc_feature: MA Experiment 108464 PARAMETER Experiment Name: At_Germinating_Seeds_cDNA_P Parameter: Age (day) Value: 4 vs. 0
  misc_feature: MA Experiment 108464 PARAMETER Experiment Name: At_Germinating_Seeds_cDNA_P Parameter: Tissue Value: Germinating Seeds
  misc_feature: MA Experiment ID: 108607 Result: Up-regulated in Transcription
  misc_feature: MA Experiment 108607 PARAMETER Experiment Name: At_100uM_ABA_cDNA_P Parameter: Timepoint (hr) Value: 4
  misc_feature: MA Experiment 108607 PARAMETER Experiment Name: At_100uM_ABA_cDNA_P Parameter: Tissue Value: Aerial
  misc_feature: MA Experiment 108607 PARAMETER Experiment Name: At_100uM_ABA_cDNA_P Parameter: Treatment Value: 100uM ABA vs. No Treatment
  misc_feature: MA Experiment ID: 20000113 Result: Down-regulated in Transcription
  misc_feature: MA Experiment 20000113 PARAMETER Experiment Name: At_42deg_Heat_cDNA_P Parameter: Temperature (deg C) Value: 42 vs. 22
  misc_feature: MA Experiment 20000113 PARAMETER Experiment Name: At_42deg_Heat_cDNA_P Parameter: Timepoint (hr) Value: 8
  misc_feature: MA Experiment 20000113 PARAMETER Experiment Name: At_42deg_Heat_cDNA_P Parameter: Tissue Value: Aerial
  misc_feature: MA Experiment ID: 20000173 Result: Down-regulated in Transcription
  misc_feature: MA Experiment 20000173 PARAMETER Experiment Name: At_42deg_Heat_P Parameter: Age (day) Value: 14
  misc_feature: MA Experiment 20000173 PARAMETER Experiment Name: At_42deg_Heat_P Parameter: Organism Value: A. thaliana
  misc_feature: MA Experiment 20000173 PARAMETER Experiment Name: At_42deg_Heat_P Parameter: Plant Line Value: WS
  misc_feature: MA Experiment 20000173 PARAMETER Experiment Name: At_42deg_Heat_P Parameter: Temperature (deg C) Value: 42 vs. 22
  misc_feature: MA Experiment 20000173 PARAMETER Experiment Name: At_42deg_Heat_P Parameter: Timepoint (hr) Value: 6
  misc_feature: MA Experiment 20000173 PARAMETER Experiment Name: At_42deg_Heat_P Parameter: Tissue Value: Aerial
  misc_feature: MA Experiment ID: 20000179 Result: Up-regulated in Transcription
  misc_feature: MA Experiment 20000179 PARAMETER Experiment Name: At_Germinating_Seeds_P Parameter: Age (hr) Value: 6 vs. 0
  misc_feature: MA Experiment 20000179 PARAMETER Experiment Name: At_Germinating_Seeds_P Parameter: Tissue Value: Germinating Seeds
  misc_feature: MA Experiment ID: 20000180 Result: Up-regulated in Transcription
  misc_feature: MA Experiment 20000180 PARAMETER Experiment Name: At_Germinating_Seeds_P Parameter: Age (hr) Value: 24 vs. 0
  misc_feature: MA Experiment 20000180 PARAMETER Experiment Name: At_Germinating_Seeds_P Parameter: Tissue Value: Germinating Seeds
  misc_feature: MA Experiment ID: 20000184 Result: Down-regulated in Transcription
  misc_feature: MA Experiment 20000184 PARAMETER Experiment Name: At_Shoots__P Parameter: Age (day) Value: 7
  misc_feature: MA Experiment 20000184 PARAMETER Experiment Name: At_Shoots__P Parameter: Tissue Value: Shoots vs. Whole Plant
  misc_feature: MA Experiment ID: 20000224 Result: Up-regulated in Transcription
  misc_feature: MA Experiment ID: 20000264 Result: Up-regulated in Transcription
  misc_feature: MA Experiment 20000264 PARAMETER Experiment Name: At_Open_Flower_P Parameter: Age (day) Value: 21
  misc_feature: MA Experiment 20000264 PARAMETER Experiment Name: At_Open_Flower_P Parameter: Plant Line Value: WS
  misc_feature: MA Experiment 20000264 PARAMETER Experiment Name: At_Open_Flower_P Parameter: Tissue Value: Open Flower vs. Whole Plant
  misc_feature: MA Experiment ID: 20000286 Result: Up-regulated in Transcription
  misc_feature: MA Experiment 20000286 PARAMETER Experiment Name: At_Open_Flower_P Parameter: Age (day) Value: 21
  misc_feature: MA Experiment 20000286 PARAMETER Experiment Name: At_Open_Flower_P Parameter: Plant Line Value: WS
  misc_feature: MA Experiment 20000286 PARAMETER Experiment Name: At_Open_Flower_P Parameter: Tissue Value: Half Open vs. Whole Plant
  misc_feature: MA Experiment ID: 20000573 Result: Down-regulated in Transcription
  misc_feature: MA Experiment 20000573 PARAMETER Experiment Name: At_100uM_ABA_Mutants__P Parameter: Organism Value: A. thaliana
  misc_feature: MA Experiment 20000573 PARAMETER Experiment Name: At_100uM_ABA_Mutants__P Parameter: Plant Line Value: CS22 vs. Ler wt
  misc_feature: MA Experiment 20000573 PARAMETER Experiment Name: At_100uM_ABA_Mutants__P Parameter: Timepoint (hr) Value: N/A
  misc_feature: MA Experiment 20000573 PARAMETER Experiment Name: At_100uM_ABA_Mutants__P Parameter: Tissue Value: Whole Plant
  misc_feature: MA Experiment 20000573 PARAMETER Experiment Name: At_100uM_ABA_Mutants__P Parameter: Treatment Value: None
  misc_feature: MA Experiment ID: 20000574 Result: Down-regulated in Transcription
  misc_feature: MA Experiment 20000574 PARAMETER Experiment Name: At_100uM_ABA_Mutants__P Parameter: Organism Value: A. thaliana
  misc_feature: MA Experiment 20000574 PARAMETER Experiment Name: At_100uM_ABA_Mutants__P Parameter: Plant Line Value: CS23 vs. Ler wt
  misc_feature: MA Experiment 20000574 PARAMETER Experiment Name: At_100uM_ABA_Mutants__P Parameter: Timepoint (hr) Value: N/A
  misc_feature: MA Experiment 20000574 PARAMETER Experiment Name: At_100uM_ABA_Mutants__P Parameter: Tissue Value: Whole Plant
  misc_feature: MA Experiment 20000574 PARAMETER Experiment Name: At_100uM_ABA_Mutants__P Parameter: Treatment Value: None
  misc_feature: MA Experiment ID: 20000794 Result: Up-regulated in Transcription
  misc_feature: MA Experiment 20000794 PARAMETER Experiment Name: At_Petals_P Parameter: Age (day) Value: 23-25 days
  misc_feature: MA Experiment 20000794 PARAMETER Experiment Name: At_Petals_P Parameter: Plant Line Value: WS
  misc_feature: MA Experiment 20000794 PARAMETER Experiment Name: At_Petals_P Parameter: Tissue Value: Petals vs. Whole plant
  misc_feature: MA Experiment ID: 20001911 Result: Down-regulated in Transcription
  misc_feature: MA Experiment 20001911 PARAMETER Experiment Name: At_Drought_Reproduction_P Parameter: Age (day) Value: 40
  misc_feature: MA Experiment 20001911 PARAMETER Experiment Name: At_Drought_Reproduction_P Parameter: Organism Value: A. thaliana
  misc_feature: MA Experiment 20001911 PARAMETER Experiment Name: At_Drought_Reproduction_P Parameter: Plant Line Value: WS
  misc_feature: MA Experiment 20001911 PARAMETER Experiment Name: At_Drought_Reproduction_P Parameter: Timepoint (day) Value: 10
  misc_feature: MA Experiment 20001911 PARAMETER Experiment Name: At_Drought_Reproduction_P Parameter: Tissue Value: Flowers
  misc_feature: MA Experiment 20001911 PARAMETER Experiment Name: At_Drought_Reproduction_P Parameter: Treatment Value: Drought vs. No Drought
atgtcttcaacaacaacagattctacagaattgcaaaatctgatcaaactgtttcaaaattgccaaactcatcctcgtcaacattttcctgcaaaatcttcagctgtattagtttgtctataccaagaacaaagagaagacaaaaacgagctacgcgtaatcttaaccaaacgatctactactctctcttctcatcctggggaagtagcattgcctggaggaaaaagagaccaagaagataaagatgatatagctactgcgttgagagaagctcgtgaagaaatcggtttagatccttctcttgttacaatcatttctgttcttgaaccatttgttaacaagaagggaatgtcggtagcaccagttatcggttttctacacgataagaaagcgtttaaacagttaccaaatccagctgaagtggaagagatctttgatgtgccattagagatgttcctcaaggacagaaacaggcgagcagaggaacgagagcatgaaggagagagatatcttcttcaatactttgattactattccgaagataaagagagaagctttatcatatgggcactcactgctggtattctgatcagagttgcctccattgtttatcagagattaccggagtttcaagaacgtaaaccgagtttctggaatcagcctaactga

SEQ ID NO: 74452 - protein, 222 aa, Arabidopsis thaliana
  peptide (1)..(222): Ceres Seq. ID no. 5675409
  misc_feature (32)..(170): Pfam Name: NUDIX domain Pfam Description: NUDIX domain
  misc_feature (1)..(222): Homolog of NCBI NO: 15242543 NR Description: putative protein; protein id: At5g45940.1, by cDNA: 141753. [Arabidopsis thaliana] gb|AAF24540.1~gene_id:K15I22.14~similar to unknown protein
  misc_feature (1)..(222): Homolog of NCBI NO: 21553389 NR Description: unknown [Arabidopsis thaliana]
  misc_feature (29)..(217): Homolog of NCBI NO: 18396900 NR Description: Expressed protein; protein id: At1g28960.1,
  misc_feature (29)..(217): Homolog of NCBI NO: 30690557 NR Description: MutT/nudix family protein [Arabidopsis thaliana]
  misc_feature (29)..(217): Homolog of NCBI NO: 26450576 NR Description: unknown protein [Arabidopsis thaliana]
  misc_feature (29)..(217): Homolog of NCBI NO: 10764850 NR Description: F1K23.5 [Arabidopsis thaliana]
  misc_feature (29)..(216): Homolog of NCBI NO: 18403412 NR Description: expressed protein; protein id: At2g33980.1, by cDNA: gi_13430755, supported by cDNA: gi_15293224 [Arabidopsis >gi|13430756|gb|AAK26000.1|AF360290_1 unknown protein
  misc_feature (29)..(221): Homolog of NCBI NO: 40253324 NR Description: putative phosphohydrolase [Oryza sativa (japonica group)] >gi|40253358|dbj|BAD05290.1| putative phosphohydrolase
  misc_feature (27)..(204): Homolog of NCBI NO: 23470438 NR Description: hypothetical protein [Pseudomonas syringae pv.
  misc_feature (28)..(211): Homolog of NCBI NO: 18859595 NR Description: nudix (nucleoside diphosphate linked moiety motif 7; RIKEN cDNA 1300007B24 gene; RIKEN cDNA 2210404C19 gene; A diphosphatase [Mus musculus]
MSSTTTDSTELQNLIKLFQNCQTHPRQHFPAKSSAVLVCLYQEQREDKNELRVILTKRSTTLSSHPGEVALPGGKRDQEDKDDIATALREAREEIGLDPSLVTIISVLEPFVNKKGMSVAPVIGFLHDKKAFKQLPNPAEVEEIFDVPLEMFLKDRNRRAEEREHEGERYLLQYFDYYSEDKERSFIIWALTAGILIRVASIVYQRLPEFQERKPSFWNQPN

SEQ ID NO: 74453 - DNA, 1419 bp, Arabidopsis thaliana
  misc_feature (1)..(1419): Ceres Seq. ID no. 5675439
  misc_feature: MA Experiment ID: 108435 Result: Up-regulated in Transcription
  misc_feature: MA Experiment 108435 PARAMETER Experiment Name: At_stm_Mutants_cDNA_P Parameter: Plant Line Value: wt Landsburg vs stm
  misc_feature: MA Experiment 108435 PARAMETER Experiment Name: At_stm_Mutants_cDNA_P Parameter: Tissue Value: Shoot Apical Meristem Region
  misc_feature: MA Experiment ID: 108462 Result: Up-regulated in Transcription
  misc_feature: MA Experiment 108462 PARAMETER Experiment Name: At_Germinating_Seeds_cDNA_P Parameter: Age (day) Value: 2 vs. 0
  misc_feature: MA Experiment 108462 PARAMETER Experiment Name: At_Germinating_Seeds_cDNA_P Parameter: Tissue Value: Germinating Seeds
  misc_feature: MA Experiment ID: 108463 Result: Up-regulated in Transcription
  misc_feature: MA Experiment 108463 PARAMETER Experiment Name: At_Germinating_Seeds_cDNA_P Parameter: Age (day) Value: 3 vs. 0
  misc_feature: MA Experiment 108463 PARAMETER Experiment Name: At_Germinating_Seeds_cDNA_P Parameter: Tissue Value: Germinating Seeds
  misc_feature: MA Experiment ID: 108464 Result: Up-regulated in Transcription
  misc_feature: MA Experiment 108464 PARAMETER Experiment Name: At_Germinating_Seeds_cDNA_P Parameter: Age (day) Value: 4 vs. 0
  misc_feature: MA Experiment 108464 PARAMETER Experiment Name: At_Germinating_Seeds_cDNA_P Parameter: Tissue Value: Germinating Seeds
  misc_feature: MA Experiment ID: 108573 Result: Up-regulated in Transcription
  misc_feature: MA Experiment 108573 PARAMETER Experiment Name: At_Drought_cDNA_P Parameter: Timepoint (hr) Value: 6
  misc_feature: MA Experiment 108573 PARAMETER Experiment Name: At_Drought_cDNA_P Parameter: Tissue Value: Aerial
  misc_feature: MA Experiment 108573 PARAMETER Experiment Name: At_Drought_cDNA_P Parameter: Treatment Value: Drought vs. No Drought
  misc_feature: MA Experiment ID: 108667 Result: Up-regulated in Transcription
  misc_feature: MA Experiment 108667 PARAMETER Experiment Name: At_2mM_SA_cDNA_P Parameter: Plant Line Value: WS
  misc_feature: MA Experiment 108667 PARAMETER Experiment Name: At_2mM_SA_cDNA_P Parameter: Timepoint (hr) Value: 1
  misc_feature: MA Experiment 108667 PARAMETER Experiment Name: At_2mM_SA_cDNA_P Parameter: Treatment Value: 2mM SA vs. No Treatment
  misc_feature: MA Experiment ID: 20000113 Result: Down-regulated in Transcription
  misc_feature: MA Experiment 20000113 PARAMETER Experiment Name: At_42deg_Heat_cDNA_P Parameter: Temperature (deg C) Value: 42 vs. 22
  misc_feature: MA Experiment 20000113 PARAMETER Experiment Name: At_42deg_Heat_cDNA_P Parameter: Timepoint (hr) Value: 8
  misc_feature: MA Experiment 20000113 PARAMETER Experiment Name: At_42deg_Heat_cDNA_P Parameter: Tissue Value: Aerial
  misc_feature: MA Experiment ID: 20000184 Result: Down-regulated in Transcription
  misc_feature: MA Experiment 20000184 PARAMETER Experiment Name: At_Shoots__P Parameter: Age (day) Value: 7
  misc_feature: MA Experiment 20000184 PARAMETER Experiment Name: At_Shoots__P Parameter: Tissue Value: Shoots vs. Whole Plant
  misc_feature: MA Experiment ID: 20000185 Result: Down-regulated in Transcription
  misc_feature: MA Experiment 20000185 PARAMETER Experiment Name: At_Roots__P Parameter: Age (day) Value: 7 vs. 21
  misc_feature: MA Experiment 20000185 PARAMETER Experiment Name: At_Roots__P Parameter: Organism Value: A. thaliana
  misc_feature: MA Experiment 20000185 PARAMETER Experiment Name: At_Roots__P Parameter: Tissue Value: Roots vs. Whole Plant
  misc_feature: MA Experiment ID: 20000234 Result: Down-regulated in Transcription
  misc_feature: MA Experiment 20000234 PARAMETER Experiment Name: At_Siliques_P Parameter: Age (day) Value: 21
  misc_feature: MA Experiment 20000234 PARAMETER Experiment Name: At_Siliques_P Parameter: Organism Value: A. thaliana
  misc_feature: MA Experiment 20000234 PARAMETER Experiment Name: At_Siliques_P Parameter: Plant Line Value: WS
  misc_feature: MA Experiment 20000234 PARAMETER Experiment Name: At_Siliques_P Parameter: Tissue Value: Less Than 5mm Siliques vs. Whole Plant
  misc_feature: MA Experiment ID: 20000235 Result: Down-regulated in Transcription
  misc_feature: MA Experiment 20000235 PARAMETER Experiment Name: At_Siliques_P Parameter: Age (day) Value: 21
  misc_feature: MA Experiment 20000235 PARAMETER Experiment Name: At_Siliques_P Parameter: Organism Value: A. thaliana
  misc_feature: MA Experiment 20000235 PARAMETER Experiment Name: At_Siliques_P Parameter: Plant Line Value: WS
  misc_feature: MA Experiment 20000235 PARAMETER Experiment Name: At_Siliques_P Parameter: Tissue Value: 5-10mm Siliques vs. Whole Plant
  misc_feature: MA Experiment ID: 20000264 Result: Down-regulated in Transcription
  misc_feature: MA Experiment 20000264 PARAMETER Experiment Name: At_Open_Flower_P Parameter: Age (day) Value: 21
  misc_feature: MA Experiment 20000264 PARAMETER Experiment Name: At_Open_Flower_P Parameter: Plant Line Value: WS
  misc_feature: MA Experiment 20000264 PARAMETER Experiment Name: At_Open_Flower_P Parameter: Tissue Value: Open Flower vs. Whole Plant
  misc_feature: MA Experiment ID: 20000265 Result: Down-regulated in Transcription
  misc_feature: MA Experiment 20000265 PARAMETER Experiment Name: At_Open_Flower_P Parameter: Age (day) Value: 21
  misc_feature: MA Experiment 20000265 PARAMETER Experiment Name: At_Open_Flower_P Parameter: Plant Line Value: WS
  misc_feature: MA Experiment 20000265 PARAMETER Experiment Name: At_Open_Flower_P Parameter: Tissue Value: Closed Flower vs. Whole Plant
  misc_feature: MA Experiment ID: 20000286 Result: Down-regulated in Transcription
  misc_feature: MA Experiment 20000286 PARAMETER Experiment Name: At_Open_Flower_P Parameter: Age (day) Value: 21
  misc_feature: MA Experiment 20000286 PARAMETER Experiment Name: At_Open_Flower_P Parameter: Plant Line Value: WS
  misc_feature: MA Experiment 20000286 PARAMETER Experiment Name: At_Open_Flower_P Parameter: Tissue Value: Half Open vs. Whole Plant
  misc_feature: MA Experiment ID: 20000438 Result: Down-regulated in Transcription
  misc_feature: MA Experiment 20000438 PARAMETER Experiment Name: At_Shoots__P Parameter: Age (day) Value: 14
  misc_feature: MA Experiment 20000438 PARAMETER Experiment Name: At_Shoots__P Parameter: Tissue Value: Shoots vs. Whole Plant
  misc_feature: MA Experiment ID: 20000439 Result: Down-regulated in Transcription
  misc_feature: MA Experiment 20000439 PARAMETER Experiment Name: At_Roots__P Parameter: Age (day) Value: 14 vs. 21
  misc_feature: MA Experiment 20000439 PARAMETER Experiment Name: At_Roots__P Parameter: Organism Value: A. thaliana
  misc_feature: MA Experiment 20000439 PARAMETER Experiment Name: At_Roots__P Parameter: Tissue Value: Roots vs. Whole Plant
  misc_feature: MA Experiment ID: 20000573 Result: Down-regulated in Transcription
  misc_feature: MA Experiment 20000573 PARAMETER Experiment Name: At_100uM_ABA_Mutants__P Parameter: Organism Value: A. thaliana
  misc_feature: MA Experiment 20000573 PARAMETER Experiment Name: At_100uM_ABA_Mutants__P Parameter: Plant Line Value: CS22 vs. Ler wt
  misc_feature: MA Experiment 20000573 PARAMETER Experiment Name: At_100uM_ABA_Mutants__P Parameter: Timepoint (hr) Value: N/A
  misc_feature: MA Experiment 20000573 PARAMETER Experiment Name: At_100uM_ABA_Mutants__P Parameter: Tissue Value: Whole Plant
  misc_feature: MA Experiment 20000573 PARAMETER Experiment Name: At_100uM_ABA_Mutants__P Parameter: Treatment Value: None
  misc_feature: MA Experiment ID: 20000574 Result: Down-regulated in Transcription
  misc_feature: MA Experiment 20000574 PARAMETER Experiment Name: At_100uM_ABA_Mutants__P Parameter: Organism Value: A. thaliana
  misc_feature: MA Experiment 20000574 PARAMETER Experiment Name: At_100uM_ABA_Mutants__P Parameter: Plant Line Value: CS23 vs. Ler wt
  misc_feature: MA Experiment 20000574 PARAMETER Experiment Name: At_100uM_ABA_Mutants__P Parameter: Timepoint (hr) Value: N/A
  misc_feature: MA Experiment 20000574 PARAMETER Experiment Name: At_100uM_ABA_Mutants__P Parameter: Tissue Value: Whole Plant
  misc_feature: MA Experiment 20000574 PARAMETER Experiment Name: At_100uM_ABA_Mutants__P Parameter: Treatment Value: None
  misc_feature: MA Experiment ID: 20001247 Result: Up-regulated in Transcription
  misc_feature: MA Experiment 20001247 PARAMETER Experiment Name: At_Far-red-induction_P Parameter: Age (day) Value: 7
  misc_feature: MA Experiment 20001247 PARAMETER Experiment Name: At_Far-red-induction_P Parameter: Light Value: Far-red vs. White
  misc_feature: MA Experiment 20001247 PARAMETER Experiment Name: At_Far-red-induction_P Parameter: Organism Value: A. thaliana
  misc_feature: MA Experiment 20001247 PARAMETER Experiment Name: At_Far-red-induction_P Parameter: Plant Line Value: Columbia
  misc_feature: MA Experiment 20001247 PARAMETER Experiment Name: At_Far-red-induction_P Parameter: Timepoint (hr) Value: 1
  misc_feature: MA Experiment 20001247 PARAMETER Experiment Name: At_Far-red-induction_P Parameter: Tissue Value: Whole Plant
  misc_feature: MA Experiment ID: 20001248 Result: Up-regulated in Transcription
  misc_feature: MA Experiment 20001248 PARAMETER Experiment Name: At_Far-red-induction_P Parameter: Age (day) Value: 7
  misc_feature: MA Experiment 20001248 PARAMETER Experiment Name: At_Far-red-induction_P Parameter: Light Value: Far-red vs. White
  misc_feature: MA Experiment 20001248 PARAMETER Experiment Name: At_Far-red-induction_P Parameter: Organism Value: A. thaliana
  misc_feature: MA Experiment 20001248 PARAMETER Experiment Name: At_Far-red-induction_P Parameter: Plant Line Value: Columbia
  misc_feature: MA Experiment 20001248 PARAMETER Experiment Name: At_Far-red-induction_P Parameter: Timepoint (hr) Value: 4
  misc_feature: MA Experiment 20001248 PARAMETER Experiment Name: At_Far-red-induction_P Parameter: Tissue Value: Whole Plant
gctaaactccatcatcttctctttcttttttttcacttgtcccatttttttatattttcatctttctcttttggagtttcttcttctactgactctactggtaggtgtatggatttgtgagagaagaaaaaaaagcacaatctttgaatggactggaatttcaaacttagctctggttatttatctggattcgatcaagaaccagatttatcaccaatggatggttcgatctcgtttggtgggtcgtcacagtcaaaagcggatttttcatttgatctaaaacttggaagaaacattggaaactcttcctctgtttttggtgatacagagcaagtgattagtcttagtaagtggaaagatagtgctttagctaaaccagaaggttcaagaagctcgagttcaaagagaacaagagggaatggtgttggaaccaaccagatgccgatttgtcttgttgatggatgtgattctgattttagtaattgtagagagtatcataagagacataaagtttgtgatgttcattcaaaaactcctgtggttactattaatggtcataaacagaggttttgtcaacaatgcagcaggtttcatgctttggaggagtttgatgaagggaagagaagttgtaggaaacgtcttgatggacataatcgaagacgacggaagccgcagcctgaacatatcggtcgtcctgccaacttctttacgggttttcaaggtagcaaattgctagagttttctggtggttcacatgtgtttccaactacatctgtgttgaacccgagctggggaaatagtcttgtaagcgttgctgtagccgccaatggttcgagttatgggcagagccagagctatgttgttggttcttctcctgcaaagacagggataatgtttccaatctcttcttctccaaacagtaccagaagcatagcaaaacaattccctttcttgcaagaagaagaaagctcgagaaccgcatcgttgtgtgagagaatgacgagttgcatccatgactctgattgtgctctctctcttctgtcatcctcctcgtcgtcagtccctcatttgcttcaaccaccactttctttgtcccaagaagcagttgagacagttttttacgggtcgggattgtttgagaatgcgagtgcagtctctgatggatcggttatatccggtaacgaggctgtccgtcttccgcagacattcccgtttcattgggagtagtagaagaagaagtaggtagatagatagaatcagaaagatctatttgtgtctcttctcttctccctcatttttcaatgttctttatcatcatcattgttcttgttaacactacaagaaatatggacattcttaacacaccgaaaacgctataataacgtttacatagcggattcataaacgctgtgtttgccg

SEQ ID NO: 74454 - protein, 359 aa, Arabidopsis thaliana
  peptide (1)..(359): Ceres Seq. ID no. 5675440
  misc_feature (100)..(178): Pfam Name: SBP domain Pfam Description: SBP domain
  misc_feature (1)..(359): Homolog of NCBI NO: 18423163 NR Description: putative protein; protein id: At5g50570.1, by cDNA: 113229. [Arabidopsis thaliana] putative protein; protein id: At5g50670.1, supported by cDNA:
  misc_feature (24)..(359): Homolog of NCBI NO: 21536841 NR Description: unknown [Arabidopsis thaliana]
  misc_feature (190)..(359): Homolog of NCBI NO: 20260414 NR Description: unknown protein [Arabidopsis thaliana]
  misc_feature (85)..(312): Homolog of NCBI NO: 13877707 NR Description: similar to squamosa-promoter binding protein 1
  misc_feature (85)..(312): Homolog of NCBI NO: 30697804 NR Description: squamosa-promoter binding protein -related
  misc_feature (79)..(177): Homolog of NCBI NO: 15028115 NR Description: putative squamosa-promoter binding protein
  misc_feature (79)..(177): Homolog of NCBI NO: 25352586 NR Description: squamosa promoter binding protein homolog 9 - Arabidopsis thaliana >gi|5931675|emb|CAB56591.1| squamosa
  misc_feature (79)..(177): Homolog of NCBI NO: 30688933 NR Description: squamosa-promoter binding protein -related
  misc_feature (79)..(177): Homolog of NCBI NO: 15227896 NR Description: putative squamosa-promoter binding protein; id: At2g42200.1, supported by cDNA: gi_15028114 [Arabidopsis
  misc_feature (34)..(311): Homolog of NCBI NO: 18396302 NR Description: putative squamosa-promoter binding protein 2; id: At1g27360.1, supported by cDNA: 42666., supported by cDNA:
MDWNFKLSSGYLSGFDQEPDLSPMDGSISFGGSSQSKADFSFDLKLGRNIGNSSSVFGDTEQVISLSKWKDSALAKPEGSRSSSSKRTRGNGVGTNQMPICLVDGCDSDFSNCREYHKRHKVCDVHSKTPVVTINGHKQRFCQQCSRFHALEEFDEGKRSCRKRLDGHNRRRRKPQPEHIGRPANFFTGFQGSKLLEFSGGSHVFPTTSVLNPSWGNSLVSVAVAANGSSYGQSQSYVVGSSPAKTGIMFPISSSPNSTRSIAKQFPFLQEEESSRTASLCERMTSCIHDSDCALSLLSSSSSSVPHLLQPPLSLSQEAVETVFYGSGLFENASAVSDGSVISGNEAVRLPQTFPFHWE

SEQ ID NO: 74455 - protein, 336 aa, Arabidopsis thaliana
  peptide (1)..(336): Ceres Seq. ID no. 5675441
  misc_feature (77)..(155): Pfam Name: SBP domain Pfam Description: SBP domain
  misc_feature (1)..(336): Homolog of NCBI NO: 18423163 NR Description: putative protein; protein id: At5g50570.1, by cDNA: 113229. [Arabidopsis thaliana] putative protein; protein id: At5g50670.1, supported by cDNA:
  misc_feature (1)..(336): Homolog of NCBI NO: 21536841 NR Description: unknown [Arabidopsis thaliana]
  misc_feature (167)..(336): Homolog of NCBI NO: 20260414 NR Description: unknown protein [Arabidopsis thaliana]
  misc_feature (62)..(289): Homolog of NCBI NO: 13877707 NR Description: similar to squamosa-promoter binding protein 1
  misc_feature (62)..(289): Homolog of NCBI NO: 30697804 NR Description: squamosa-promoter binding protein -related
  misc_feature (56)..(154): Homolog of NCBI NO: 15028115 NR Description: putative squamosa-promoter binding protein
  misc_feature (56)..(154): Homolog of NCBI NO: 15227896 NR Description: putative squamosa-promoter binding protein; id: At2g42200.1, supported by cDNA: gi_15028114 [Arabidopsis
  misc_feature (56)..(154): Homolog of NCBI NO: 30688933 NR Description: squamosa-promoter binding protein -related
  misc_feature (56)..(154): Homolog of NCBI NO: 25352586 NR Description: squamosa promoter binding protein homolog 9 - Arabidopsis thaliana >gi|5931675|emb|CAB56591.1| squamosa
  misc_feature (11)..(288): Homolog of NCBI NO: 18396302 NR Description: putative squamosa-promoter binding protein 2; id: At1g27360.1, supported by cDNA: 42666., supported by cDNA:
MDGSISFGGSSQSKADFSFDLKLGRNIGNSSSVFGDTEQVISLSKWKDSALAKPEGSRSSSSKRTRGNGVGTNQMPICLVDGCDSDFSNCREYHKRHKVCDVHSKTPVVTINGHKQRFCQQCSRFHALEEFDEGKRSCRKRLDGHNRRRRKPQPEHIGRPANFFTGFQGSKLLEFSGGSHVFPTTSVLNPSWGNSLVSVAVAANGSSYGQSQSYVVGSSPAKTGIMFPISSSPNSTRSIAKQFPFLQEEESSRTASLCERMTSCIHDSDCALSLLSSSSSSVPHLLQPPLSLSQEAVETVFYGSGLFENASAVSDGSVISGNEAVRLPQTFPFHWE

SEQ ID NO: 74456 - protein, 262 aa, Arabidopsis thaliana
  peptide (1)..(262): Ceres Seq. ID no. 5675442
  misc_feature (3)..(81): Pfam Name: SBP domain Pfam Description: SBP domain
  misc_feature (1)..(262): Homolog of NCBI NO: 18423163 NR Description: putative protein; protein id: At5g50570.1, by cDNA: 113229. [Arabidopsis thaliana] putative protein; protein id: At5g50670.1, supported by cDNA:
  misc_feature (1)..(262): Homolog of NCBI NO: 21536841 NR Description: unknown [Arabidopsis thaliana]
  misc_feature (93)..(262): Homolog of NCBI NO: 20260414 NR Description: unknown protein [Arabidopsis thaliana]
  misc_feature (1)..(215): Homolog of NCBI NO: 13877707 NR Description: similar to squamosa-promoter binding protein 1
  misc_feature (1)..(215): Homolog of NCBI NO: 30697804 NR Description: squamosa-promoter binding protein -related
  misc_feature (1)..(80): Homolog of NCBI NO: 15028115 NR Description: putative squamosa-promoter binding protein
  misc_feature (1)..(80): Homolog of NCBI NO: 30688933 NR Description: squamosa-promoter binding protein -related
  misc_feature (1)..(80): Homolog of NCBI NO: 25352586 NR Description: squamosa promoter binding protein homolog 9 - Arabidopsis thaliana >gi|5931675|emb|CAB56591.1| squamosa
  misc_feature (1)..(80): Homolog of NCBI NO: 15227896 NR Description: putative squamosa-promoter binding protein; id: At2g42200.1, supported by cDNA: gi_15028114 [Arabidopsis
  misc_feature (1)..(214): Homolog of NCBI NO: 18396302 NR Description: putative squamosa-promoter binding protein 2; id: At1g27360.1, supported by cDNA: 42666., supported by cDNA:
MPICLVDGCDSDFSNCREYHKRHKVCDVHSKTPVVTINGHKQRFCQQCSRFHALEEFDEGKRSCRKRLDGHNRRRRKPQPEHIGRPANFFTGFQGSKLLEFSGGSHVFPTTSVLNPSWGNSLVSVAVAANGSSYGQSQSYVVGSSPAKTGIMFPISSSPNSTRSIAKQFPFLQEEESSRTASLCERMTSCIHDSDCALSLLSSSSSSVPHLLQPPLSLSQEAVETVFYGSGLFENASAVSDGSVISGNEAVRLPQTFPFHWE

SEQ ID NO: 74457 - DNA, 1461 bp, Arabidopsis thaliana
  misc_feature (1)..(1461): Ceres Seq. ID no. 5675813
  misc_feature: MA Experiment ID: 108488 Result: Down-regulated in Transcription
  misc_feature: MA Experiment ID: 108574 Result: Up-regulated in Transcription
  misc_feature: MA Experiment 108574 PARAMETER Experiment Name: At_Wounding__cDNA_P Parameter: Timepoint (hr) Value: 1
  misc_feature: MA Experiment 108574 PARAMETER Experiment Name: At_Wounding__cDNA_P Parameter: Tissue Value: Aerial
  misc_feature: MA Experiment 108574 PARAMETER Experiment Name: At_Wounding__cDNA_P Parameter: Treatment Value: Wounding vs. No Wounding
  misc_feature: MA Experiment ID: 108594 Result: Up-regulated in Transcription
  misc_feature: MA Experiment 108594 PARAMETER Experiment Name: At_Ler-rhl_Root_cDNA_P Parameter: Plant Line Value: null
  misc_feature: MA Experiment ID: 20000069 Result: Up-regulated in Transcription
  misc_feature: MA Experiment 20000069 PARAMETER Experiment Name: At_100uM_ABA_Mutants_cDNA_P Parameter: Plant Line Value: CS23
  misc_feature: MA Experiment 20000069 PARAMETER Experiment Name: At_100uM_ABA_Mutants_cDNA_P Parameter: Timepoint (hr) Value: 6
  misc_feature: MA Experiment 20000069 PARAMETER Experiment Name: At_100uM_ABA_Mutants_cDNA_P Parameter: Tissue Value: Aerial
  misc_feature: MA Experiment 20000069 PARAMETER Experiment Name: At_100uM_ABA_Mutants_cDNA_P Parameter: Treatment Value: 100uM ABA vs. No Treatment
  misc_feature: MA Experiment ID: 20000171 Result: Down-regulated in Transcription
  misc_feature: MA Experiment 20000171 PARAMETER Experiment Name: At_42deg_Heat_P Parameter: Age (day) Value: 14
  misc_feature: MA Experiment 20000171 PARAMETER Experiment Name: At_42deg_Heat_P Parameter: Organism Value: A. thaliana
  misc_feature: MA Experiment 20000171 PARAMETER Experiment Name: At_42deg_Heat_P Parameter: Plant Line Value: WS
  misc_feature: MA Experiment 20000171 PARAMETER Experiment Name: At_42deg_Heat_P Parameter: Temperature (deg C) Value: 42 vs. 22
  misc_feature: MA Experiment 20000171 PARAMETER Experiment Name: At_42deg_Heat_P Parameter: Timepoint (hr) Value: 1
  misc_feature: MA Experiment 20000171 PARAMETER Experiment Name: At_42deg_Heat_P Parameter: Tissue Value: Aerial
  misc_feature: MA Experiment ID: 20000184 Result: Down-regulated in Transcription
  misc_feature: MA Experiment 20000184 PARAMETER Experiment Name: At_Shoots__P Parameter: Age (day) Value: 7
  misc_feature: MA Experiment 20000184 PARAMETER Experiment Name: At_Shoots__P Parameter: Tissue Value: Shoots vs. Whole Plant
  misc_feature: MA Experiment ID: 20000234 Result: Down-regulated in Transcription
  misc_feature: MA Experiment 20000234 PARAMETER Experiment Name: At_Siliques_P Parameter: Age (day) Value: 21
  misc_feature: MA Experiment 20000234 PARAMETER Experiment Name: At_Siliques_P Parameter: Organism Value: A. thaliana
  misc_feature: MA Experiment 20000234 PARAMETER Experiment Name: At_Siliques_P Parameter: Plant Line Value: WS
  misc_feature: MA Experiment 20000234 PARAMETER Experiment Name: At_Siliques_P Parameter: Tissue Value: Less Than 5mm Siliques vs. Whole Plant
  misc_feature: MA Experiment ID: 20000235 Result: Down-regulated in Transcription
  misc_feature: MA Experiment 20000235 PARAMETER Experiment Name: At_Siliques_P Parameter: Age (day) Value: 21
  misc_feature: MA Experiment 20000235 PARAMETER Experiment Name: At_Siliques_P Parameter: Organism Value: A. thaliana
  misc_feature: MA Experiment 20000235 PARAMETER Experiment Name: At_Siliques_P Parameter: Plant Line Value: WS
  misc_feature: MA Experiment 20000235 PARAMETER Experiment Name: At_Siliques_P Parameter: Tissue Value: 5-10mm Siliques vs. Whole Plant
  misc_feature: MA Experiment ID: 20000264 Result: Down-regulated in Transcription
  misc_feature: MA Experiment 20000264 PARAMETER Experiment Name: At_Open_Flower_P Parameter: Age (day) Value: 21
  misc_feature: MA Experiment 20000264 PARAMETER Experiment Name: At_Open_Flower_P Parameter: Plant Line Value: WS
  misc_feature: MA Experiment 20000264 PARAMETER Experiment Name: At_Open_Flower_P Parameter: Tissue Value: Open Flower vs. Whole Plant
  misc_feature: MA Experiment ID: 20000265 Result: Down-regulated in Transcription
  misc_feature: MA Experiment 20000265 PARAMETER Experiment Name: At_Open_Flower_P Parameter: Age (day) Value: 21
  misc_feature: MA Experiment 20000265 PARAMETER Experiment Name: At_Open_Flower_P Parameter: Plant Line Value: WS
  misc_feature: MA Experiment 20000265 PARAMETER Experiment Name: At_Open_Flower_P Parameter: Tissue Value: Closed Flower vs. Whole Plant
  misc_feature: MA Experiment ID: 20000286 Result: Down-regulated in Transcription
  misc_feature: MA Experiment 20000286 PARAMETER Experiment Name: At_Open_Flower_P Parameter: Age (day) Value: 21
  misc_feature: MA Experiment 20000286 PARAMETER Experiment Name: At_Open_Flower_P Parameter: Plant Line Value: WS
  misc_feature: MA Experiment 20000286 PARAMETER Experiment Name: At_Open_Flower_P Parameter: Tissue Value: Half Open vs. Whole Plant
  misc_feature: MA Experiment ID: 20000436 Result: Up-regulated in Transcription
  misc_feature: MA Experiment 20000436 PARAMETER Experiment Name: At_Drought_P Parameter: Age (day) Value: 7
  misc_feature: MA Experiment 20000436 PARAMETER Experiment Name: At_Drought_P Parameter: Organism Value: A. thaliana
  misc_feature: MA Experiment 20000436 PARAMETER Experiment Name: At_Drought_P Parameter: Plant Line Value: WS
  misc_feature: MA Experiment 20000436 PARAMETER Experiment Name: At_Drought_P Parameter: Timepoint (hr) Value: 12
  misc_feature: MA Experiment 20000436 PARAMETER Experiment Name: At_Drought_P Parameter: Tissue Value: Whole Plant
  misc_feature: MA Experiment 20000436 PARAMETER Experiment Name: At_Drought_P Parameter: Treatment Value: Drought vs. No Drought
  misc_feature: MA Experiment ID: 20000437 Result: Up-regulated in Transcription
  misc_feature: MA Experiment 20000437 PARAMETER Experiment Name: At_Drought_P Parameter: Age (day) Value: 8
  misc_feature: MA Experiment 20000437 PARAMETER Experiment Name: At_Drought_P Parameter: Organism Value: A. thaliana
  misc_feature: MA Experiment 20000437 PARAMETER Experiment Name: At_Drought_P Parameter: Plant Line Value: WS
  misc_feature: MA Experiment 20000437 PARAMETER Experiment Name: At_Drought_P Parameter: Timepoint (hr) Value: 24
  misc_feature: MA Experiment 20000437 PARAMETER Experiment Name: At_Drought_P Parameter: Tissue Value: Whole Plant
  misc_feature: MA Experiment 20000437 PARAMETER Experiment Name: At_Drought_P Parameter: Treatment Value: Drought vs. No Drought
  misc_feature: MA Experiment ID: 20000438 Result: Down-regulated in Transcription
  misc_feature: MA Experiment 20000438 PARAMETER Experiment Name: At_Shoots__P Parameter: Age (day) Value: 14
  misc_feature: MA Experiment 20000438 PARAMETER Experiment Name: At_Shoots__P Parameter: Tissue Value: Shoots vs. Whole Plant
  misc_feature: MA Experiment ID: 20000439 Result: Down-regulated in Transcription
  misc_feature: MA Experiment 20000439 PARAMETER Experiment Name: At_Roots__P Parameter: Age (day) Value: 14 vs. 21
  misc_feature: MA Experiment 20000439 PARAMETER Experiment Name: At_Roots__P Parameter: Organism Value: A. thaliana
  misc_feature: MA Experiment 20000439 PARAMETER Experiment Name: At_Roots__P Parameter: Tissue Value: Roots vs. Whole Plant
  misc_feature: MA Experiment ID: 20000453 Result: Up-regulated in Transcription
  misc_feature: MA Experiment 20000453 PARAMETER Experiment Name: At_100uM_ABA_P Parameter: Age (day) Value: 15
  misc_feature: MA Experiment 20000453 PARAMETER Experiment Name: At_100uM_ABA_P Parameter: Organism Value: A. thaliana
  misc_feature: MA Experiment 20000453 PARAMETER Experiment Name: At_100uM_ABA_P Parameter: Plant Line Value: WS
  misc_feature: MA Experiment 20000453 PARAMETER Experiment Name: At_100uM_ABA_P Parameter: Timepoint (hr) Value: 24
  misc_feature: MA Experiment 20000453 PARAMETER Experiment Name: At_100uM_ABA_P Parameter: Tissue Value: Aerial
  misc_feature: MA Experiment 20000453 PARAMETER Experiment Name: At_100uM_ABA_P Parameter: Treatment Value: 100uM ABA vs. No Treatment
  misc_feature: MA Experiment ID: 20001247 Result: Up-regulated in Transcription
  misc_feature: MA Experiment 20001247 PARAMETER Experiment Name: At_Far-red-induction_P Parameter: Age (day) Value: 7
  misc_feature: MA Experiment 20001247 PARAMETER Experiment Name: At_Far-red-induction_P Parameter: Light Value: Far-red vs. White
  misc_feature: MA Experiment 20001247 PARAMETER Experiment Name: At_Far-red-induction_P Parameter: Organism Value: A. thaliana
  misc_feature: MA Experiment 20001247 PARAMETER Experiment Name: At_Far-red-induction_P Parameter: Plant Line Value: Columbia
  misc_feature: MA Experiment 20001247 PARAMETER Experiment Name: At_Far-red-induction_P Parameter: Timepoint (hr) Value: 1
  misc_feature: MA Experiment 20001247 PARAMETER Experiment Name: At_Far-red-induction_P Parameter: Tissue Value: Whole Plant
  misc_feature: MA Experiment ID: 20001757 Result: Down-regulated in Transcription
  misc_feature: MA Experiment 20001757 PARAMETER Experiment Name: At_50mM_NH4NO3_L-to-H_P Parameter: Timepoint (hr) Value: 6
  misc_feature: MA Experiment 20001757 PARAMETER Experiment Name: At_50mM_NH4NO3_L-to-H_P Parameter: Tissue Value: Leaf
  misc_feature: MA Experiment 20001757 PARAMETER Experiment Name: At_50mM_NH4NO3_L-to-H_P Parameter: Treatment Value: 50mM NH4NO3 vs 100mM Mannitol
  misc_feature: MA Experiment ID: 20001911 Result: Up-regulated in Transcription
  misc_feature: MA Experiment 20001911 PARAMETER Experiment Name: At_Drought_Reproduction_P Parameter: Age (day) Value: 40
  misc_feature: MA Experiment 20001911 PARAMETER Experiment Name: At_Drought_Reproduction_P Parameter: Organism Value: A. thaliana
  misc_feature: MA Experiment 20001911 PARAMETER Experiment Name: At_Drought_Reproduction_P Parameter: Plant Line Value: WS
  misc_feature: MA Experiment 20001911 PARAMETER Experiment Name: At_Drought_Reproduction_P Parameter: Timepoint (day) Value: 10
  misc_feature: MA Experiment 20001911 PARAMETER Experiment Name: At_Drought_Reproduction_P Parameter: Tissue Value: Flowers
  misc_feature: MA Experiment 20001911 PARAMETER Experiment Name: At_Drought_Reproduction_P Parameter: Treatment Value: Drought vs. No Drought
gtgttagcttcctttacgtgtttctttcctttctctctcctctgtcacgcaagaacaataaatactatgatcacttgattttctccgacgaaattttccccagaaacaacaacagttcgagcaacaaaaccctgaactctatgtttctgttaaactcattcacaattttatgagaaattggacaaaaccctgatgtcggattccgtcaaaacgacggtggatccgcttttgaaagatttggatgggaaaaaagagagtttcaggcggaacgttgtgtctatggcagctgagttaaagcaagtgagaggtcgtttggtttctcaagaacaattctttgttaaagaaagcttttgtagaaaagaagcagagaagaaagctaagaacatggaaatggagatctgtaaattgcagaagaagttggaagatagaaattgtgagcttgtagcttcaacttctgctgctgaaaagtttctagaagaagtggacgatctgagatcacagctagctttaacaaaggacattgcagaaacaagtgctgcttctgctcaatccgcacagcttcaatgctcagtgctaacagaacaacttgacgacaaaacacgttctctaagagaacacgaagaccgtgtaactcatctcggtcaccagcttgataatcttcagagagatttgaagacaagagaatgttctcaaaaacagctgagagaggaagttatgagaatcgagcgtgagataactgaagctgttgcaaagtctgggaaaggcacagaatgtgagctcaggaaacttcttgaagaggtttctccaaagaactttgagagaatgaacatgttattggcggtaaaagacgaagagattgcaaagttaaaagatgatgtgaagttaatgtcagctcattggaaactcaaaactaaggaacttgaatctcagttggagagacaaagaagagcagatcaagagttgaagaagaaggtactgaaactagagttttgcctgcaagaagctcgtagtcagacaagaaagctacagagggcgggggagagacgagacaaggcaatcaaagagctaagtgatcagattactggaaaacagttgaatgaatcggtttcaggggagaaacaaaacttctgggatacttcagggttcaagatcgttgtgtcaatgtcgatgttgatattagttattatctccaaaagatgagttcttttgtcttgaactctctttctttttgttggtgtgtaaatgcagtagttgcagatagtagtcagataatggtgcatattattactccttgaggtttagcgaagagaaatcttgcttccctttgttaagttataagtttgttcatgtgtatttgaatcatttctcaaaaagaaaatgggaaaaatgtcattcaaataatcagtttaccattttcgttggttttaaacataaattttggacctggtgatttaaatcctc

SEQ ID NO: 74458 - protein, 335 aa, Arabidopsis thaliana; identical to SEQ ID NO: 38831
  peptide (1)..(335): Ceres Seq. ID no. 5675814
  misc_feature (5)..(319): Pfam Name: Myosin tail Pfam Description: Myosin tail
  misc_feature (1)..(335): Homolog of NCBI NO: 18421042 NR Description: putative protein; protein id: At5g26770.1,
  misc_feature (1)..(326): Homolog of NCBI NO: 7485248 NR Description: hypothetical protein A_IG002P16.20 - Arabidopsis >gi|2191168|gb|AAB61054.1| contains similarity to myosin heavy
  misc_feature (1)..(335): Homolog of NCBI NO: 18397379 NR Description: expressed protein; protein id: At3g05830.1, by cDNA: 110680., supported by cDNA: gi_4097949 [Arabidopsis >gi|6714396|gb|AAF26085.1|AC012393_11 hypothetical protein
  misc_feature (4)..(335): Homolog of NCBI NO: 4097950 NR Description: plant IF-like protein [Arabidopsis thaliana]
  misc_feature (10)..(335): Homolog of NCBI NO: 22329439 NR Description: hypothetical protein; protein id: At1g09470.1
  misc_feature (10)..(280): Homolog of NCBI NO: 25402551 NR Description: hypothetical protein [imported] - Arabidopsis >gi|3482922|gb|AAC33207.1| Hypothetical protein [Arabidopsis
  misc_feature (232)..(325): Homolog of NCBI NO: 22329441 NR Description: similar to contains similarity to myosin heavy
  misc_feature (82)..(335): Homolog of NCBI NO: 34894370 NR Description: unnamed protein product [Oryza sativa (japonica group)] >gi|8468034|dbj|BAA96634.1| unnamed protein product
  misc_feature (5)..(319): Homolog of NCBI NO: 4249699 NR Description: myosin heavy chain [Rana catesbeiana]
  misc_feature (1)..(310): Homolog of NCBI NO: 1335313 NR Description: translated region (partial) [Homo sapiens]

SEQ ID NO: 74459 - protein, 306 aa, Arabidopsis thaliana; identical to SEQ ID NO: 38832
  peptide (1)..(306): Ceres Seq. ID no. 5675815
  misc_feature (1)..(290): Pfam Name: Myosin tail Pfam Description: Myosin tail
  misc_feature (1)..(306): Homolog of NCBI NO: 18421042 NR Description: putative protein; protein id: At5g26770.1,
  misc_feature (1)..(297): Homolog of NCBI NO: 7485248 NR Description: hypothetical protein A_IG002P16.20 - Arabidopsis >gi|2191168|gb|AAB61054.1| contains similarity to myosin heavy
  misc_feature (1)..(306): Homolog of NCBI NO: 18397379 NR Description: expressed protein; protein id: At3g05830.1, by cDNA: 110680., supported by cDNA: gi_4097949 [Arabidopsis >gi|6714396|gb|AAF26085.1|AC012393_11 hypothetical protein
  misc_feature (1)..(306): Homolog of NCBI NO: 4097950 NR Description: plant IF-like protein [Arabidopsis thaliana]
  misc_feature (1)..(306): Homolog of NCBI NO: 22329439 NR Description: hypothetical protein; protein id: At1g09470.1
  misc_feature (1)..(251): Homolog of NCBI NO: 25402551 NR Description: hypothetical protein [imported] - Arabidopsis >gi|3482922|gb|AAC33207.1| Hypothetical protein [Arabidopsis
  misc_feature (203)..(296): Homolog of NCBI NO: 22329441 NR Description: similar to contains similarity to myosin heavy
  misc_feature (53)..(306): Homolog of NCBI NO: 34894370 NR Description: unnamed protein product [Oryza sativa (japonica group)] >gi|8468034|dbj|BAA96634.1| unnamed protein product
  misc_feature (1)..(290): Homolog of NCBI NO: 4249699 NR Description: myosin heavy chain [Rana catesbeiana]
  misc_feature (1)..(281): Homolog of NCBI NO: 1335313 NR Description: translated region (partial) [Homo sapiens]

SEQ ID NO: 74460 - protein, 271 aa, Arabidopsis thaliana; identical to SEQ ID NO: 38833
  peptide (1)..(271): Ceres Seq. ID no. 5675816
  misc_feature (1)..(255): Pfam Name: Myosin tail Pfam Description: Myosin tail
  misc_feature (1)..(271): Homolog of NCBI NO: 18421042 NR Description: putative protein; protein id: At5g26770.1,
  misc_feature (1)..(262): Homolog of NCBI NO: 7485248 NR Description: hypothetical protein A_IG002P16.20 - Arabidopsis >gi|2191168|gb|AAB61054.1| contains similarity to myosin heavy
  misc_feature (1)..(271): Homolog of NCBI NO: 18397379 NR Description: expressed protein; protein id: At3g05830.1, by cDNA: 110680., supported by cDNA: gi_4097949 [Arabidopsis >gi|6714396|gb|AAF26085.1|AC012393_11 hypothetical protein
  misc_feature (1)..(271): Homolog of NCBI NO: 4097950 NR Description: plant IF-like protein [Arabidopsis thaliana]
  misc_feature (1)..(271): Homolog of NCBI NO: 22329439 NR Description: hypothetical protein; protein id: At1g09470.1
  misc_feature (1)..(216): Homolog of NCBI NO: 25402551 NR Description: hypothetical protein [imported] - Arabidopsis >gi|3482922|gb|AAC33207.1| Hypothetical protein [Arabidopsis
  misc_feature (168)..(261): Homolog of NCBI NO: 22329441 NR Description: similar to contains similarity to myosin heavy
  misc_feature (18)..(271): Homolog of NCBI NO: 34894370 NR Description: unnamed protein product [Oryza sativa (japonica group)] >gi|8468034|dbj|BAA96634.1| unnamed protein product
  misc_feature (1)..(255): Homolog of NCBI NO: 4249699 NR Description: myosin heavy chain [Rana catesbeiana]
  misc_feature (1)..(246): Homolog of NCBI NO: 1335313 NR Description: translated region (partial) [Homo sapiens]

SEQ ID NO: 74461 - DNA, 757 bp, Arabidopsis thaliana
  misc_feature (1)..(757): Ceres Seq. ID no. 5676142
  misc_feature: MA Experiment ID: 108433 Result: Up-regulated in Transcription
  misc_feature: MA Experiment 108433 PARAMETER Experiment Name: At_rhl_Mutant2_cDNA_P Parameter: Age (day) Value: 7
  misc_feature: MA Experiment 108433 PARAMETER Experiment Name: At_rhl_Mutant2_cDNA_P Parameter: Organism Value: A. thaliana
  misc_feature: MA Experiment 108433 PARAMETER Experiment Name: At_rhl_Mutant2_cDNA_P Parameter: Plant Line Value: rhl Mutant vs. wt landsburg
  misc_feature: MA Experiment 108433 PARAMETER Experiment Name: At_rhl_Mutant2_cDNA_P Parameter: Tissue Value: Roots
  misc_feature: MA Experiment ID: 108435 Result: Down-regulated in Transcription
  misc_feature: MA Experiment 108435 PARAMETER Experiment Name: At_stm_Mutants_cDNA_P Parameter: Plant Line Value: wt Landsburg vs stm
  misc_feature: MA Experiment 108435 PARAMETER Experiment Name: At_stm_Mutants_cDNA_P Parameter: Tissue Value: Shoot Apical Meristem Region
  misc_feature: MA Experiment ID: 20000439 Result: Down-regulated in Transcription
  misc_feature: MA Experiment 20000439 PARAMETER Experiment Name: At_Roots__P Parameter: Age (day) Value: 14 vs. 21
  misc_feature: MA Experiment 20000439 PARAMETER Experiment Name: At_Roots__P Parameter: Organism Value: A. thaliana
  misc_feature: MA Experiment 20000439 PARAMETER Experiment Name: At_Roots__P Parameter: Tissue Value: Roots vs. Whole Plant
  misc_feature: MA Experiment ID: 20000495 Result: Down-regulated in Transcription
  misc_feature: MA Experiment 20000495 PARAMETER Experiment Name: At_Guard_Cells_P Parameter: Harvest Date Value: 8/2/2002
  misc_feature: MA Experiment 20000495 PARAMETER Experiment Name: At_Guard_Cells_P Parameter: Organism Value: A. thaliana
  misc_feature: MA Experiment 20000495 PARAMETER Experiment Name: At_Guard_Cells_P Parameter: Tissue Value: Guard Cells vs. Leaves
  misc_feature: MA Experiment ID: 20000573 Result: Up-regulated in Transcription
  misc_feature: MA Experiment 20000573 PARAMETER Experiment Name: At_100uM_ABA_Mutants__P Parameter: Organism Value: A. thaliana
  misc_feature: MA Experiment 20000573 PARAMETER Experiment Name: At_100uM_ABA_Mutants__P Parameter: Plant Line Value: CS22 vs. Ler wt
  misc_feature: MA Experiment 20000573 PARAMETER Experiment Name: At_100uM_ABA_Mutants__P Parameter: Timepoint (hr) Value: N/A
  misc_feature: MA Experiment 20000573 PARAMETER Experiment Name: At_100uM_ABA_Mutants__P Parameter: Tissue Value: Whole Plant
  misc_feature: MA Experiment 20000573 PARAMETER Experiment Name: At_100uM_ABA_Mutants__P Parameter: Treatment Value: None
  misc_feature: MA Experiment ID: 20000574 Result: Up-regulated in Transcription
  misc_feature: MA Experiment 20000574 PARAMETER Experiment Name: At_100uM_ABA_Mutants__P Parameter: Organism Value: A. thaliana
  misc_feature: MA Experiment 20000574 PARAMETER Experiment Name: At_100uM_ABA_Mutants__P Parameter: Plant Line Value: CS23 vs. Ler wt
  misc_feature: MA Experiment 20000574 PARAMETER Experiment Name: At_100uM_ABA_Mutants__P Parameter: Timepoint (hr) Value: N/A
  misc_feature: MA Experiment 20000574 PARAMETER Experiment Name: At_100uM_ABA_Mutants__P Parameter: Tissue Value: Whole Plant
  misc_feature: MA Experiment 20000574 PARAMETER Experiment Name: At_100uM_ABA_Mutants__P Parameter: Treatment Value: None
atacgattgcgataatttcatctatacttatcgggtttataacaccgataatccgatttggtcaaaatccggcggagaaaaaccctaaaaatggagaaagagacgaaggagaagatcgagaaaactgtgatagagatactcagtgaatcggatatgaaagagataacagagttcaaggttcgtaaactcgcttcggagaaactcgcaatcgatctctcggagaaatctcacaaagcatttgtacgaagcgtcgtggagaaattcctcgacgaagagagagcgagagaatatgaaaactcacaagtgaataaggaagaagaagatggagataaggattgtggtaaaggaaacaaagagtttgatgatgacggcgatcttatcatttgcaggttatcggataagagaagagtgacgattcaggaatttaaagggaagagtttggtttctatcagagagtattacaagaaagatggcaaagaacttcctacttctaaaggaataagcttaacagatgaacaatggtcaaccttcaagaaaaacatgccagccatcgaaaatgctgtcaagaaaatggaatcgcgtgtctgaatgaagaacatgtgatactttatctctaaacatgtgtaagtgtcttcttaagtagttagttgttcgaatgttcaggtctctcatgtaactgtcttttttattttcttctctcgaattggtcgttatgtgtctcgtactgagttgtatccatttcgctttaaccgattcc

SEQ ID NO: 74462 - protein, 165 aa, Arabidopsis thaliana; identical to SEQ ID NO: 30872
  peptide (1)..(165): Ceres Seq. ID no. 5676143
  misc_feature (68)..(158): Pfam Name: Transcriptional Coactivator p15 (PC4) Pfam Description: Transcriptional Coactivator p15 (PC4)
  misc_feature (1)..(165): Homolog of NCBI NO: 15236980 NR Description: putative protein; protein id: At4g10920.1, by cDNA: 19449., supported by cDNA: gi_2997685 [Arabidopsis
  misc_feature (1)..(165): Homolog of NCBI NO: 13699910 NR Description: putative transcriptional coactivator [Brassica
  misc_feature (62)..(161): Homolog of NCBI NO: 34910378 NR Description: P0684B02.23 [Oryza sativa (japonica
  misc_feature (1)..(165): Homolog of NCBI NO: 30678785 NR Description: contains similarity to gag proteins [Arabidopsis >gi|26451026|dbj|BAC42619.1| unknown protein [Arabidopsis
  misc_feature (1)..(165): Homolog of NCBI NO: 16610191 NR Description: PBF68 protein [Nicotiana tabacum]
  misc_feature (1)..(93): Homolog of NCBI NO: 34910378 NR Description: P0684B02.23 [Oryza sativa (japonica
  misc_feature (65)..(161): Homolog of NCBI NO: 15242365 NR Description: putative transcriptional co-activator (KIWI); id: At5g09250.1, supported by cDNA: gi_2997683 [Arabidopsis
  misc_feature (88)..(155): Homolog of NCBI NO: 40739125 NR Description: hypothetical protein AN5806.2 [Aspergillus
  misc_feature (1)..(59): Homolog of NCBI NO: 7485280 NR Description: hypothetical protein A_TM018A10.1 - Arabidopsis >gi|2252849|gb|AAB62847.1| contains similarity to gag proteins
  misc_feature (136)..(165): Homolog of NCBI NO: 7485280 NR Description: hypothetical protein A_TM018A10.1 - Arabidopsis >gi|2252849|gb|AAB62847.1| contains similarity to gag proteins

SEQ ID NO: 74463 - protein, 144 aa, Arabidopsis thaliana; identical to SEQ ID NO: 30873
  peptide (1)..(144): Ceres Seq. ID no. 5676144
  misc_feature (47)..(137): Pfam Name: Transcriptional Coactivator p15 (PC4) Pfam Description: Transcriptional Coactivator p15 (PC4)
  misc_feature (1)..(144): Homolog of NCBI NO: 15236980 NR Description: putative protein; protein id: At4g10920.1, by cDNA: 19449., supported by cDNA: gi_2997685 [Arabidopsis
  misc_feature (1)..(144): Homolog of NCBI NO: 13699910 NR Description: putative transcriptional coactivator [Brassica
  misc_feature (41)..(140): Homolog of NCBI NO: 34910378 NR Description: P0684B02.23 [Oryza sativa (japonica
  misc_feature (1)..(144): Homolog of NCBI NO: 30678785 NR Description: contains similarity to gag proteins [Arabidopsis >gi|26451026|dbj|BAC42619.1| unknown protein [Arabidopsis
  misc_feature (1)..(144): Homolog of NCBI NO: 16610191 NR Description: PBF68 protein [Nicotiana tabacum]
  misc_feature (1)..(72): Homolog of NCBI NO: 34910378 NR Description: P0684B02.23 [Oryza sativa (japonica
  misc_feature (44)..(140): Homolog of NCBI NO: 15242365 NR Description: putative transcriptional co-activator (KIWI); id: At5g09250.1, supported by cDNA: gi_2997683 [Arabidopsis
  misc_feature (67)..(134): Homolog of NCBI NO: 40739125 NR Description: hypothetical protein AN5806.2 [Aspergillus
  misc_feature (1)..(38): Homolog of NCBI NO: 7485280 NR Description: hypothetical protein A_TM018A10.1 - Arabidopsis >gi|2252849|gb|AAB62847.1| contains similarity to gag proteins
  misc_feature (115)..(144): Homolog of NCBI NO: 7485280 NR Description: hypothetical protein A_TM018A10.1 - Arabidopsis >gi|2252849|gb|AAB62847.1| contains similarity to gag proteins

SEQ ID NO: 74464 - DNA, 1176 bp, Arabidopsis thaliana
  misc_feature (1)..(1176): Ceres Seq. ID no. 5676319
  misc_feature: MA Experiment ID: 108434 Result: Up-regulated in Transcription
  misc_feature: MA Experiment 108434 PARAMETER Experiment Name: At_Root_Tips_cDNA_P Parameter: Tissue Value: Root Tips
  misc_feature: MA Experiment ID: 108461 Result: Down-regulated in Transcription
  misc_feature: MA Experiment 108461 PARAMETER Experiment Name: At_Germinating_Seeds_cDNA_P Parameter: Age (day) Value: 1 vs. 0
  misc_feature: MA Experiment 108461 PARAMETER Experiment Name: At_Germinating_Seeds_cDNA_P Parameter: Tissue Value: Germinating Seeds
  misc_feature: MA Experiment ID: 108462 Result: Down-regulated in Transcription
  misc_feature: MA Experiment 108462 PARAMETER Experiment Name: At_Germinating_Seeds_cDNA_P Parameter: Age (day) Value: 2 vs. 0
  misc_feature: MA Experiment 108462 PARAMETER Experiment Name: At_Germinating_Seeds_cDNA_P Parameter: Tissue Value: Germinating Seeds
  misc_feature: MA Experiment ID: 108463 Result: Down-regulated in Transcription
  misc_feature: MA Experiment 108463 PARAMETER Experiment Name: At_Germinating_Seeds_cDNA_P Parameter: Age (day) Value: 3 vs. 0
  misc_feature: MA Experiment 108463 PARAMETER Experiment Name: At_Germinating_Seeds_cDNA_P Parameter: Tissue Value: Germinating Seeds
  misc_feature: MA Experiment ID: 108464 Result: Down-regulated in Transcription
  misc_feature: MA Experiment 108464 PARAMETER Experiment Name: At_Germinating_Seeds_cDNA_P Parameter: Age (day) Value: 4 vs. 0
  misc_feature: MA Experiment 108464 PARAMETER Experiment Name: At_Germinating_Seeds_cDNA_P Parameter: Tissue Value: Germinating Seeds
  misc_feature: MA Experiment ID: 108573 Result: Up-regulated in Transcription
  misc_feature: MA Experiment 108573 PARAMETER Experiment Name: At_Drought_cDNA_P Parameter: Timepoint (hr) Value: 6
  misc_feature: MA Experiment 108573 PARAMETER Experiment Name: At_Drought_cDNA_P Parameter: Tissue Value: Aerial
  misc_feature: MA Experiment 108573 PARAMETER Experiment Name: At_Drought_cDNA_P Parameter: Treatment Value: Drought vs. No Drought
  misc_feature: MA Experiment ID: 108585 Result: Up-regulated in Transcription
  misc_feature: MA Experiment 108585 PARAMETER Experiment Name: At_5mM_NaNP_cDNA_P Parameter: Timepoint (hr) Value: 6
  misc_feature: MA Experiment 108585 PARAMETER Experiment Name: At_5mM_NaNP_cDNA_P Parameter: Tissue Value: Aerial
  misc_feature: MA Experiment 108585 PARAMETER Experiment Name: At_5mM_NaNP_cDNA_P Parameter: Treatment Value: null
  misc_feature: MA Experiment ID: 108595 Result: Down-regulated in Transcription
  misc_feature: MA Experiment 108595 PARAMETER Experiment Name: At_Ler-pi_Ovule_cDNA_P Parameter: Plant Line Value: null
  misc_feature: MA Experiment ID: 20000179 Result: Down-regulated in Transcription
  misc_feature: MA Experiment 20000179 PARAMETER Experiment Name: At_Germinating_Seeds_P Parameter: Age (hr) Value: 6 vs. 0
  misc_feature: MA Experiment 20000179 PARAMETER Experiment Name: At_Germinating_Seeds_P Parameter: Tissue Value: Germinating Seeds
  misc_feature: MA Experiment ID: 20000180 Result: Down-regulated in Transcription
  misc_feature: MA Experiment 20000180 PARAMETER Experiment Name: At_Germinating_Seeds_P Parameter: Age (hr) Value: 24 vs. 0
  misc_feature: MA Experiment 20000180 PARAMETER Experiment Name: At_Germinating_Seeds_P Parameter: Tissue Value: Germinating Seeds
atactgtcgtctccctggattctatcttctcgattttggtgattcgaacacgattttacctatccttgagcgatctcgatcccaactttttgagttgattttatttcaggagttttcaaaaaatctgttgttaagtggtgaatcggaaaatgtcgcagtcttccgtcgatataccgccaaaaggtgggtttagcttcgatctgtgcaaaaggaatgatatgctgacacagaagggtcttaaagcgccgtcgtttctcaagactggaacgactatcgttggattgatatttaaggatggtgtaatacttggggctgatacacgggcaactgaagggcctattgtggctgataagaactgtgagaagattcactacatggcaccaaacatttactgttgtggtgcaggaaccgctgctgacactgaagcagtaactgatatggtcagctcacagctgcggttgcatagataccagactggccgagattctcgagtcgttactgcattgacccttctcaaaaaacatcttttcagctaccaaggccatgtctcagctgctcttgtgcttggtggagttgatattaccgggcctcatcttcacacgatatacccacacggttctactgacactctaccatttgctacaatgggttctggttcccttgctgccatgtcagtgtttgaagcaaagtataaagaaggtctaactagagatgaaggaatcaagttggttgctgaagccatatgctctggtatattcaacgaccttggtagtggtagcaatgtggatatctgtgtgatcactaaggggcacaaggaatacttgaggaattacatggaaccaaacccaagaacctatgttagcagcaaaggctattcattcaccaagaaaaccgaggttctactcaccaaaattacaccattattggagcgagtcgaaattgtagaagtggctggtgaagctatggaggaatgaatctcgtgtgagagacagatactaagagtgaaaccattgttctacctcacatgacagtcatgtttacattttctactttgttcaatatgaacgactaaaatcgaatcgtagttgcctccatttcgtctttaaatttggcttgaacttgtgattaatgattatggatgattcggttttgaaatttagctctcacataattttc

SEQ ID NO: 74465 - protein, 274 aa, Arabidopsis thaliana; identical to SEQ ID NO: 24362
  peptide (1)..(274): Ceres Seq. ID no. 5676320
  misc_feature (36)..(217): Pfam Name: Proteasome A-type and B-type Pfam Description: Proteasome A-type and B-type
  misc_feature (1)..(274): Homolog of NCBI NO: 15237451 NR Description: 20S proteasome beta subunit B (PBB2); protein id: supported by cDNA: 38185., supported by cDNA: gi_20260223, by cDNA: gi_3421103 [Arabidopsis thaliana]
  misc_feature (1)..(274): Homolog of NCBI NO: 20260224 NR Description: 20S proteasome beta subunit PBB2 [Arabidopsis >gi|21387013|gb|AAM47910.1| 20S proteasome beta subunit PBB2
  misc_feature (1)..(274): Homolog of NCBI NO: 21593337 NR Description: 20S proteasome beta subunit PBB2 [Arabidopsis
  misc_feature (1)..(274): Homolog of NCBI NO: 18405364 NR Description: 20S proteasome beta subunit B (PBB1); protein id: supported by cDNA: 25264., supported by cDNA: gi_3421101
  misc_feature (1)..(274): Homolog of NCBI NO: 2511578 NR Description: multicatalytic endopeptidase [Arabidopsis
  misc_feature (1)..(248): Homolog of NCBI NO: 30688785 NR Description: 20S proteasome beta subunit B (PBB1) [Arabidopsis
  misc_feature (5)..(274): Homolog of NCBI NO: 8671504 NR Description: beta 2 subunit of 20S proteasome [Oryza sativa
  misc_feature (57)..(274): Homolog of NCBI NO: 2511576 NR Description: multicatalytic endopeptidase [Arabidopsis
  misc_feature (10)..(265): Homolog of NCBI NO: 24664391 NR Description: Proteasome beta2 subunit CG3329-PA
  misc_feature (10)..(265): Homolog of NCBI NO: 2582506 NR Description: 20S proteasome beta2 subunit [Drosophila

SEQ ID NO: 74466 - protein, 251 aa, Arabidopsis thaliana; identical to SEQ ID NO: 24363
  peptide (1)..(251): Ceres Seq. ID no. 5676321
  misc_feature (13)..(194): Pfam Name: Proteasome A-type and B-type Pfam Description: Proteasome A-type and B-type
  misc_feature (1)..(251): Homolog of NCBI NO: 15237451 NR Description: 20S proteasome beta subunit B (PBB2); protein id: supported by cDNA: 38185., supported by cDNA: gi_20260223, by cDNA: gi_3421103 [Arabidopsis thaliana]
  misc_feature (1)..(251): Homolog of NCBI NO: 20260224 NR Description: 20S proteasome beta subunit PBB2 [Arabidopsis >gi|21387013|gb|AAM47910.1| 20S proteasome beta subunit PBB2
  misc_feature (1)..(251): Homolog of NCBI NO: 21593337 NR Description: 20S proteasome beta subunit PBB2 [Arabidopsis
  misc_feature (1)..(251): Homolog of NCBI NO: 18405364 NR Description: 20S proteasome beta subunit B (PBB1); protein id: supported by cDNA: 25264., supported by cDNA: gi_3421101
  misc_feature (1)..(251): Homolog of NCBI NO: 2511578 NR Description: multicatalytic endopeptidase [Arabidopsis
  misc_feature (1)..(225): Homolog of NCBI NO: 30688785 NR Description: 20S proteasome beta subunit B (PBB1) [Arabidopsis
  misc_feature (1)..(251): Homolog of NCBI NO: 8671504 NR Description: beta 2 subunit of 20S proteasome [Oryza sativa
  misc_feature (34)..(251): Homolog of NCBI NO: 2511576 NR Description: multicatalytic endopeptidase [Arabidopsis
  misc_feature (1)..(242): Homolog of NCBI NO: 24664391 NR Description: Proteasome beta2 subunit CG3329-PA
  misc_feature (1)..(242): Homolog of NCBI NO: 2582506 NR Description: 20S proteasome beta2 subunit [Drosophila

SEQ ID NO: 74467 - protein, 199 aa, Arabidopsis thaliana; identical to SEQ ID NO: 24364
  peptide (1)..(199): Ceres Seq. ID no. 5676322
  misc_feature (1)..(142): Pfam Name: Proteasome A-type and B-type Pfam Description: Proteasome A-type and B-type
  misc_feature (1)..(199): Homolog of NCBI NO: 15237451 NR Description: 20S proteasome beta subunit B (PBB2); protein id: supported by cDNA: 38185., supported by cDNA: gi_20260223, by cDNA: gi_3421103 [Arabidopsis thaliana]
  misc_feature (1)..(199): Homolog of NCBI NO: 20260224 NR Description: 20S proteasome beta subunit PBB2 [Arabidopsis >gi|21387013|gb|AAM47910.1| 20S proteasome beta subunit PBB2
  misc_feature (1)..(199): Homolog of NCBI NO: 21593337 NR Description: 20S proteasome beta subunit PBB2 [Arabidopsis
  misc_feature (1)..(199): Homolog of NCBI NO: 18405364 NR Description: 20S proteasome beta subunit B (PBB1); protein id: supported by cDNA: 25264., supported by cDNA: gi_3421101
  misc_feature (1)..(199): Homolog of NCBI NO: 2511578 NR Description: multicatalytic endopeptidase [Arabidopsis
  misc_feature (1)..(173): Homolog of NCBI NO: 30688785 NR Description: 20S proteasome beta subunit B (PBB1) [Arabidopsis
  misc_feature (1)..(199): Homolog of NCBI NO: 8671504 NR Description: beta 2 subunit of 20S proteasome [Oryza sativa
  misc_feature (1)..(199): Homolog of NCBI NO: 2511576 NR Description: multicatalytic endopeptidase [Arabidopsis
  misc_feature (1)..(190): Homolog of NCBI NO: 24664391 NR Description: Proteasome beta2 subunit CG3329-PA
  misc_feature (1)..(190): Homolog of NCBI NO: 2582506 NR Description: 20S proteasome beta2 subunit [Drosophila

SEQ ID NO: 74468 - DNA, 716 bp, Arabidopsis thaliana
  misc_feature (1)..(716): Ceres Seq. ID no. 5677129
  misc_feature: MA Experiment ID: 108488 Result: Down-regulated in Transcription
  misc_feature: MA Experiment ID: 108576 Result: Down-regulated in Transcription
  misc_feature: MA Experiment 108576 PARAMETER Experiment Name: At_42deg_Heat_cDNA_P Parameter: Temperature (deg C) Value: 42 vs. 22
  misc_feature: MA Experiment 108576 PARAMETER Experiment Name: At_42deg_Heat_cDNA_P Parameter: Timepoint (hr) Value: 1
  misc_feature: MA Experiment 108576 PARAMETER Experiment Name: At_42deg_Heat_cDNA_P Parameter: Tissue Value: Aerial
  misc_feature: MA Experiment ID: 108577 Result: Down-regulated in Transcription
  misc_feature: MA Experiment 108577 PARAMETER Experiment Name: At_42deg_Heat_cDNA_P Parameter: Temperature (deg C) Value: 42 vs. 22
  misc_feature: MA Experiment 108577 PARAMETER Experiment Name: At_42deg_Heat_cDNA_P Parameter: Timepoint (hr) Value: 6
  misc_feature: MA Experiment 108577 PARAMETER Experiment Name: At_42deg_Heat_cDNA_P Parameter: Tissue Value: Aerial
  misc_feature: MA Experiment ID: 20000111 Result: Down-regulated in Transcription
  misc_feature: MA Experiment 20000111 PARAMETER Experiment Name: At_42deg_Heat_cDNA_P Parameter: Temperature (deg C) Value: 42 vs. 22
  misc_feature: MA Experiment 20000111 PARAMETER Experiment Name: At_42deg_Heat_cDNA_P Parameter: Timepoint (hr) Value: 6
  misc_feature: MA Experiment 20000111 PARAMETER Experiment Name: At_42deg_Heat_cDNA_P Parameter: Tissue Value: Aerial
  misc_feature: MA Experiment ID: 20000113 Result: Down-regulated in Transcription
  misc_feature: MA Experiment 20000113 PARAMETER Experiment Name: At_42deg_Heat_cDNA_P Parameter: Temperature (deg C) Value: 42 vs. 22
  misc_feature: MA Experiment 20000113 PARAMETER Experiment Name: At_42deg_Heat_cDNA_P Parameter: Timepoint (hr) Value: 8
  misc_feature: MA Experiment 20000113 PARAMETER Experiment Name: At_42deg_Heat_cDNA_P Parameter: Tissue Value: Aerial
  misc_feature: MA Experiment ID: 20000144 Result: Down-regulated in Transcription
  misc_feature: MA Experiment 20000144 PARAMETER Experiment Name: At_42deg_Heat_cDNA_P Parameter: Temperature (deg C) Value: 42 vs. 22
  misc_feature: MA Experiment 20000144 PARAMETER Experiment Name: At_42deg_Heat_cDNA_P Parameter: Timepoint (hr) Value: 1
  misc_feature: MA Experiment 20000144 PARAMETER Experiment Name: At_42deg_Heat_cDNA_P Parameter: Tissue Value: Aerial
  misc_feature: MA Experiment ID: 20000224 Result: Down-regulated in Transcription
  misc_feature: MA Experiment ID: 20000227 Result: Down-regulated in Transcription
  misc_feature: MA Experiment 20000227 PARAMETER Experiment Name: At_Root-Tips-vs-Tops_P Parameter: Tissue Value: Root Tips vs. Root Tops
aatattatctttttcgaattcggagctcaagtttgaaattcggagaagctagagagttttctgagatggctcgtactaagcaaacagctcgtaagtctactggaggaaaggctcctaggaagcagcttgctacaaaggctgcacgtaagtctgcaccaaccactggaggagtcaagaagccccatcgttaccgtccaggaactgttgcactacgtgaaattcgtaagtaccagaagagtaccgagttgctgatcaggaagctccctttccagaggctagttcgtgagattgcccaggatttcaagactgacttgcgtttccagagccatgctgtgcttgcactccaggaggctgctgaagcataccttgtgggtctctttgaggacactaacctctgcgccatccatgccaagcgtgtgaccataatgcccaaagacattcagctcgctcgcaggatcagaggagaacgtgcttaattgtgattgggaagtagttggattatgtgaatgtgggtggttttctaaatagatagttggaattagataatggcttaaaaagcttttgggtgtaggagacttggaaacaatggtgttttttttttcttttctttctgtttcttgtctagtcggtttatgatttgcttgtgttcttcttagctacgttttgtggtgtgtattgctttcttctttggcaatgttgaacaccttttgttgttg

SEQ ID NO: 74469 - protein, 157 aa, Arabidopsis thaliana
  peptide (1)..(157): Ceres Seq. ID no. 5677130
  misc_feature (38)..(156): Pfam Name: Core histone H2A/H2B/H3/H4 Pfam Description: Core histone H2A/H2B/H3/H4
  misc_feature (22)..(157): Homolog of NCBI NO: 15236103 NR Description: histone H3.3; protein id: At4g40030.1, supported cDNA: gi_14326561 [Arabidopsis thaliana] Histon H3; protein id: At4g40040.1, supported by cDNA: 2670.
  misc_feature (22)..(157): Homolog of NCBI NO: 18698662 NR Description: disease-resistent-related protein [Oryza sativa]
  misc_feature (10)..(157): Homolog of NCBI NO: 34876396 NR Description: similar to H3 histone family, member I [Rattus
  misc_feature (21)..(157): Homolog of NCBI NO: 34876364 NR Description: similar to CG31613-PA [Rattus norvegicus]
  misc_feature (7)..(157): Homolog of NCBI NO: 31210957 NR Description: ENSANGP00000016056 [Anopheles gambiae] ENSANGP00000014197 [Anopheles gambiae] ENSANGP00000014197 [Anopheles gambiae str. PEST]
  misc_feature (20)..(157): Homolog of NCBI NO: 34858254 NR Description: similar to histone protein Hist2h3c1 [Rattus
  misc_feature (20)..(157): Homolog of NCBI NO: 34858260 NR Description: similar to histone protein Hist2h3c1 [Rattus
  misc_feature (22)..(157): Homolog of NCBI NO: 2119013 NR Description: histone H3.2 protein - shrew mouse
  misc_feature (22)..(157): Homolog of NCBI NO: 7305139 NR Description: histone 1, H3f; histone gene complex 1 [Mus
  misc_feature (22)..(157): Homolog of NCBI NO: 30061401 NR Description: histone 2, H3ca1 [Mus musculus]
YYLFRIRSSSLKFGEAREFSEMARTKQTARKSTGGKAPRKQLATKAARKSAPTTGGVKKPHRYRPGTVALREIRKYQKSTELLIRKLPFQRLVREIAQDFKTDLRFQSHAVLALQEAAEAYLVGLFEDTNLCAIHAKRVTIMPKDIQLARRIRGERA

SEQ ID NO: 74470 - protein, 136 aa, Arabidopsis thaliana; identical to SEQ ID NO: 26403
  peptide (1)..(136): Ceres Seq. ID no. 5677131
  misc_feature (17)..(135): Pfam Name: Core histone H2A/H2B/H3/H4 Pfam Description: Core histone H2A/H2B/H3/H4
  misc_feature (1)..(136): Homolog of NCBI NO: 15236103 NR Description: histone H3.3; protein id: At4g40030.1, supported cDNA: gi_14326561 [Arabidopsis thaliana] Histon H3; protein id: At4g40040.1, supported by cDNA: 2670.
  misc_feature (1)..(136): Homolog of NCBI NO: 18698662 NR Description: disease-resistent-related protein [Oryza sativa]
  misc_feature (1)..(136): Homolog of NCBI NO: 34876396 NR Description: similar to H3 histone family, member I [Rattus
  misc_feature (1)..(136): Homolog of NCBI NO: 34876364 NR Description: similar to CG31613-PA [Rattus norvegicus]
  misc_feature (1)..(136): Homolog of NCBI NO: 31210957 NR Description: ENSANGP00000016056 [Anopheles gambiae] ENSANGP00000014197 [Anopheles gambiae] ENSANGP00000014197 [Anopheles gambiae str. PEST]
  misc_feature (1)..(136): Homolog of NCBI NO: 34858254 NR Description: similar to histone protein Hist2h3c1 [Rattus
  misc_feature (1)..(136): Homolog of NCBI NO: 34858260 NR Description: similar to histone protein Hist2h3c1 [Rattus
  misc_feature (1)..(136): Homolog of NCBI NO: 2119013 NR Description: histone H3.2 protein - shrew mouse
  misc_feature (1)..(136): Homolog of NCBI NO: 7305139 NR Description: histone 1, H3f; histone gene complex 1 [Mus
  misc_feature (1)..(136): Homolog of NCBI NO: 30061401 NR Description: histone 2, H3ca1 [Mus musculus]

SEQ ID NO: 74471 - DNA, 1314 bp, Arabidopsis thaliana
  misc_feature (1)..(1314): Ceres Seq. ID no. 5677569
  misc_feature: MA Experiment ID: 108433 Result: Up-regulated in Transcription
  misc_feature: MA Experiment 108433 PARAMETER Experiment Name: At_rhl_Mutant2_cDNA_P Parameter: Age (day) Value: 7
  misc_feature: MA Experiment 108433 PARAMETER Experiment Name: At_rhl_Mutant2_cDNA_P Parameter: Organism Value: A. thaliana
  misc_feature: MA Experiment 108433 PARAMETER Experiment Name: At_rhl_Mutant2_cDNA_P Parameter: Plant Line Value: rhl Mutant vs. wt landsburg
  misc_feature: MA Experiment 108433 PARAMETER Experiment Name: At_rhl_Mutant2_cDNA_P Parameter: Tissue Value: Roots
  misc_feature: MA Experiment ID: 108434 Result: Down-regulated in Transcription
  misc_feature: MA Experiment 108434 PARAMETER Experiment Name: At_Root_Tips_cDNA_P Parameter: Tissue Value: Root Tips
  misc_feature: MA Experiment ID: 108461 Result: Down-regulated in Transcription
  misc_feature: MA Experiment 108461 PARAMETER Experiment Name: At_Germinating_Seeds_cDNA_P Parameter: Age (day) Value: 1 vs. 0
  misc_feature: MA Experiment 108461 PARAMETER Experiment Name: At_Germinating_Seeds_cDNA_P Parameter: Tissue Value: Germinating Seeds
  misc_feature: MA Experiment ID: 108572 Result: Up-regulated in Transcription
  misc_feature: MA Experiment 108572 PARAMETER Experiment Name: At_Drought_cDNA_P Parameter: Timepoint (hr) Value: 1
  misc_feature: MA Experiment 108572 PARAMETER Experiment Name: At_Drought_cDNA_P Parameter: Tissue Value: Aerial
  misc_feature: MA Experiment 108572 PARAMETER Experiment Name: At_Drought_cDNA_P Parameter: Treatment Value: Drought vs. No Drought
  misc_feature: MA Experiment ID: 108573 Result: Up-regulated in Transcription
  misc_feature: MA Experiment 108573 PARAMETER Experiment Name: At_Drought_cDNA_P Parameter: Timepoint (hr) Value: 6
  misc_feature: MA Experiment 108573 PARAMETER Experiment Name: At_Drought_cDNA_P Parameter: Tissue Value: Aerial
  misc_feature: MA Experiment 108573 PARAMETER Experiment Name: At_Drought_cDNA_P Parameter: Treatment Value: Drought vs. No Drought
  misc_feature: MA Experiment ID: 108577 Result: Down-regulated in Transcription
  misc_feature: MA Experiment 108577 PARAMETER Experiment Name: At_42deg_Heat_cDNA_P Parameter: Temperature (deg C) Value: 42 vs. 22
  misc_feature: MA Experiment 108577 PARAMETER Experiment Name: At_42deg_Heat_cDNA_P Parameter: Timepoint (hr) Value: 6
  misc_feature: MA Experiment 108577 PARAMETER Experiment Name: At_42deg_Heat_cDNA_P Parameter: Tissue Value: Aerial
  misc_feature: MA Experiment ID: 108585 Result: Down-regulated in Transcription
  misc_feature: MA Experiment 108585 PARAMETER Experiment Name: At_5mM_NaNP_cDNA_P Parameter: Timepoint (hr) Value: 6
  misc_feature: MA Experiment 108585 PARAMETER Experiment Name: At_5mM_NaNP_cDNA_P Parameter: Tissue Value: Aerial
  misc_feature: MA Experiment 108585 PARAMETER Experiment Name: At_5mM_NaNP_cDNA_P Parameter: Treatment Value: null
  misc_feature: MA Experiment ID: 108594 Result: Down-regulated in Transcription
  misc_feature: MA Experiment 108594 PARAMETER Experiment Name: At_Ler-rhl_Root_cDNA_P Parameter: Plant Line Value: null
  misc_feature: MA Experiment ID: 108595 Result: Down-regulated in Transcription
  misc_feature: MA Experiment 108595 PARAMETER Experiment Name: At_Ler-pi_Ovule_cDNA_P Parameter: Plant Line Value: null
  misc_feature: MA Experiment ID: 108605 Result: Up-regulated in Transcription
  misc_feature: MA Experiment 108605 PARAMETER Experiment Name: At_100uM_ABA_cDNA_P Parameter: Timepoint (hr) Value: 6
  misc_feature: MA Experiment 108605 PARAMETER Experiment Name: At_100uM_ABA_cDNA_P Parameter: Tissue Value: Aerial
  misc_feature: MA Experiment 108605 PARAMETER Experiment Name: At_100uM_ABA_cDNA_P Parameter: Treatment Value: 100uM ABA vs. No Treatment
  misc_feature: MA Experiment ID: 20000069 Result: Up-regulated in Transcription
  misc_feature: MA Experiment 20000069 PARAMETER Experiment Name: At_100uM_ABA_Mutants_cDNA_P Parameter: Plant Line Value: CS23
  misc_feature: MA Experiment 20000069 PARAMETER Experiment Name: At_100uM_ABA_Mutants_cDNA_P Parameter: Timepoint (hr) Value: 6
  misc_feature: MA Experiment 20000069 PARAMETER Experiment Name: At_100uM_ABA_Mutants_cDNA_P Parameter: Tissue Value: Aerial
  misc_feature: MA Experiment 20000069 PARAMETER Experiment Name: At_100uM_ABA_Mutants_cDNA_P Parameter: Treatment Value: 100uM ABA vs. No Treatment
  misc_feature: MA Experiment ID: 20000071 Result: Up-regulated in Transcription
  misc_feature: MA Experiment 20000071 PARAMETER Experiment Name: At_100uM_ABA_Mutants_cDNA_P Parameter: Plant Line Value: CS8104
  misc_feature: MA Experiment 20000071 PARAMETER Experiment Name: At_100uM_ABA_Mutants_cDNA_P Parameter: Timepoint (hr) Value: 6
  misc_feature: MA Experiment 20000071 PARAMETER Experiment Name: At_100uM_ABA_Mutants_cDNA_P Parameter: Tissue Value: Aerial
  misc_feature: MA Experiment 20000071 PARAMETER Experiment Name: At_100uM_ABA_Mutants_cDNA_P Parameter: Treatment Value: 100uM ABA vs. No Treatment
  misc_feature: MA Experiment ID: 20000111 Result: Down-regulated in Transcription
  misc_feature: MA Experiment 20000111 PARAMETER Experiment Name: At_42deg_Heat_cDNA_P Parameter: Temperature (deg C) Value: 42 vs. 22
  misc_feature: MA Experiment 20000111 PARAMETER Experiment Name: At_42deg_Heat_cDNA_P Parameter: Timepoint (hr) Value: 6
  misc_feature: MA Experiment 20000111 PARAMETER Experiment Name: At_42deg_Heat_cDNA_P Parameter: Tissue Value: Aerial
  misc_feature: MA Experiment ID: 20000169 Result: Up-regulated in Transcription
  misc_feature: MA Experiment 20000169 PARAMETER Experiment Name: At_100uM_ABA_P Parameter: Age (day) Value: 14
  misc_feature: MA Experiment 20000169 PARAMETER Experiment Name: At_100uM_ABA_P Parameter: Organism Value: A. thaliana
  misc_feature: MA Experiment 20000169 PARAMETER Experiment Name: At_100uM_ABA_P Parameter: Plant Line Value: WS
  misc_feature: MA Experiment 20000169 PARAMETER Experiment Name: At_100uM_ABA_P Parameter: Timepoint (hr) Value: 6
  misc_feature: MA Experiment 20000169 PARAMETER Experiment Name: At_100uM_ABA_P Parameter: Tissue Value: Aerial
  misc_feature: MA Experiment 20000169 PARAMETER Experiment Name: At_100uM_ABA_P Parameter: Treatment Value: 100uM ABA vs. No Treatment
  misc_feature: MA Experiment ID: 20000173 Result: Down-regulated in Transcription
  misc_feature: MA Experiment 20000173 PARAMETER Experiment Name: At_42deg_Heat_P Parameter: Age (day) Value: 14
  misc_feature: MA Experiment 20000173 PARAMETER Experiment Name: At_42deg_Heat_P Parameter: Organism Value: A. thaliana
  misc_feature: MA Experiment 20000173 PARAMETER Experiment Name: At_42deg_Heat_P Parameter: Plant Line Value: WS
  misc_feature: MA Experiment 20000173 PARAMETER Experiment Name: At_42deg_Heat_P Parameter: Temperature (deg C) Value: 42 vs. 22
  misc_feature: MA Experiment 20000173 PARAMETER Experiment Name: At_42deg_Heat_P Parameter: Timepoint (hr) Value: 6
  misc_feature: MA Experiment 20000173 PARAMETER Experiment Name: At_42deg_Heat_P Parameter: Tissue Value: Aerial
  misc_feature: MA Experiment ID: 20000184 Result: Down-regulated in Transcription
  misc_feature: MA Experiment 20000184 PARAMETER Experiment Name: At_Shoots__P Parameter: Age (day) Value: 7
  misc_feature: MA Experiment 20000184 PARAMETER Experiment Name: At_Shoots__P Parameter: Tissue Value: Shoots vs. Whole Plant
  misc_feature: MA Experiment ID: 20000227 Result: Down-regulated in Transcription
  misc_feature: MA Experiment 20000227 PARAMETER Experiment Name: At_Root-Tips-vs-Tops_P Parameter: Tissue Value: Root Tips vs. Root Tops
  misc_feature: MA Experiment ID: 20000234 Result: Down-regulated in Transcription
  misc_feature: MA Experiment 20000234 PARAMETER Experiment Name: At_Siliques_P Parameter: Age (day) Value: 21
  misc_feature: MA Experiment 20000234 PARAMETER Experiment Name: At_Siliques_P Parameter: Organism Value: A. thaliana
  misc_feature: MA Experiment 20000234 PARAMETER Experiment Name: At_Siliques_P Parameter: Plant Line Value: WS
  misc_feature: MA Experiment 20000234 PARAMETER Experiment Name: At_Siliques_P Parameter: Tissue Value: Less Than 5mm Siliques vs. Whole Plant
  misc_feature: MA Experiment ID: 20000235 Result: Down-regulated in Transcription
  misc_feature: MA Experiment 20000235 PARAMETER Experiment Name: At_Siliques_P Parameter: Age (day) Value: 21
  misc_feature: MA Experiment 20000235 PARAMETER Experiment Name: At_Siliques_P Parameter: Organism Value: A. thaliana
  misc_feature: MA Experiment 20000235 PARAMETER Experiment Name: At_Siliques_P Parameter: Plant Line Value: WS
  misc_feature: MA Experiment 20000235 PARAMETER Experiment Name: At_Siliques_P Parameter: Tissue Value: 5-10mm Siliques vs. Whole Plant
  misc_feature: MA Experiment ID: 20000265 Result: Down-regulated in Transcription
  misc_feature: MA Experiment 20000265 PARAMETER Experiment Name: At_Open_Flower_P Parameter: Age (day) Value: 21
  misc_feature: MA Experiment 20000265 PARAMETER Experiment Name: At_Open_Flower_P Parameter: Plant Line Value: WS
  misc_feature: MA Experiment 20000265 PARAMETER Experiment Name: At_Open_Flower_P Parameter: Tissue Value: Closed Flower vs. Whole Plant
  misc_feature: MA Experiment ID: 20000286 Result: Down-regulated in Transcription
  misc_feature: MA Experiment 20000286 PARAMETER Experiment Name: At_Open_Flower_P Parameter: Age (day) Value: 21
  misc_feature: MA Experiment 20000286 PARAMETER Experiment Name: At_Open_Flower_P Parameter: Plant Line Value: WS
  misc_feature: MA Experiment 20000286 PARAMETER Experiment Name: At_Open_Flower_P Parameter: Tissue Value: Half Open vs. Whole Plant
  misc_feature: MA Experiment ID: 20000436 Result: Up-regulated in Transcription
  misc_feature: MA Experiment 20000436 PARAMETER Experiment Name: At_Drought_P Parameter: Age (day) Value: 7
  misc_feature: MA Experiment 20000436 PARAMETER Experiment Name: At_Drought_P Parameter: Organism Value: A. thaliana
  misc_feature: MA Experiment 20000436 PARAMETER Experiment Name: At_Drought_P Parameter: Plant Line Value: WS
  misc_feature: MA Experiment 20000436 PARAMETER Experiment Name: At_Drought_P Parameter: Timepoint (hr) Value: 12
  misc_feature: MA Experiment 20000436 PARAMETER Experiment Name: At_Drought_P Parameter: Tissue Value: Whole Plant
  misc_feature: MA Experiment 20000436 PARAMETER Experiment Name: At_Drought_P Parameter: Treatment Value: Drought vs. No Drought
  misc_feature: MA Experiment ID: 20000437 Result: Up-regulated in Transcription
  misc_feature: MA Experiment 20000437 PARAMETER Experiment Name: At_Drought_P Parameter: Age (day) Value: 8
  misc_feature: MA Experiment 20000437 PARAMETER Experiment Name: At_Drought_P Parameter: Organism Value: A. thaliana
  misc_feature: MA Experiment 20000437 PARAMETER Experiment Name: At_Drought_P Parameter: Plant Line Value: WS
  misc_feature: MA Experiment 20000437 PARAMETER Experiment Name: At_Drought_P Parameter: Timepoint (hr) Value: 24
  misc_feature: MA Experiment 20000437 PARAMETER Experiment Name: At_Drought_P Parameter: Tissue Value: Whole Plant
  misc_feature: MA Experiment 20000437 PARAMETER Experiment Name: At_Drought_P Parameter: Treatment Value: Drought vs. No Drought
  misc_feature: MA Experiment ID: 20000573 Result: Down-regulated in Transcription
  misc_feature: MA Experiment 20000573 PARAMETER Experiment Name: At_100uM_ABA_Mutants__P Parameter: Organism Value: A. thaliana
  misc_feature: MA Experiment 20000573 PARAMETER Experiment Name: At_100uM_ABA_Mutants__P Parameter: Plant Line Value: CS22 vs. Ler wt
  misc_feature: MA Experiment 20000573 PARAMETER Experiment Name: At_100uM_ABA_Mutants__P Parameter: Timepoint (hr) Value: N/A
  misc_feature: MA Experiment 20000573 PARAMETER Experiment Name: At_100uM_ABA_Mutants__P Parameter: Tissue Value: Whole Plant
  misc_feature: MA Experiment 20000573 PARAMETER Experiment Name: At_100uM_ABA_Mutants__P Parameter: Treatment Value: None
  misc_feature: MA Experiment ID: 20000574 Result: Down-regulated in Transcription
  misc_feature: MA Experiment 20000574 PARAMETER Experiment Name: At_100uM_ABA_Mutants__P Parameter: Organism Value: A. thaliana
  misc_feature: MA Experiment 20000574 PARAMETER Experiment Name: At_100uM_ABA_Mutants__P Parameter: Plant Line Value: CS23 vs. Ler wt
  misc_feature: MA Experiment 20000574 PARAMETER Experiment Name: At_100uM_ABA_Mutants__P Parameter: Timepoint (hr) Value: N/A
  misc_feature: MA Experiment 20000574 PARAMETER Experiment Name: At_100uM_ABA_Mutants__P Parameter: Tissue Value: Whole Plant
  misc_feature: MA Experiment 20000574 PARAMETER Experiment Name: At_100uM_ABA_Mutants__P Parameter: Treatment Value: None
  misc_feature: MA Experiment ID: 20000794 Result: Up-regulated in Transcription
  misc_feature: MA Experiment 20000794 PARAMETER Experiment Name: At_Petals_P Parameter: Age (day) Value: 23-25 days
  misc_feature: MA Experiment 20000794 PARAMETER Experiment Name: At_Petals_P Parameter: Plant Line Value: WS
  misc_feature: MA Experiment 20000794 PARAMETER Experiment Name: At_Petals_P Parameter: Tissue Value: Petals vs. Whole plant
  misc_feature: MA Experiment ID: 20001557 Result: Down-regulated in Transcription
  misc_feature: MA Experiment 20001557 PARAMETER Experiment Name: At_Drought_Soil_Dry_P Parameter: Age (day) Value: 27
  misc_feature: MA Experiment 20001557 PARAMETER Experiment Name: At_Drought_Soil_Dry_P Parameter: Organism Value: A. thaliana
  misc_feature: MA Experiment 20001557 PARAMETER Experiment Name: At_Drought_Soil_Dry_P Parameter: Plant Line Value: WS
  misc_feature: MA Experiment 20001557 PARAMETER Experiment Name: At_Drought_Soil_Dry_P Parameter: Post Timepoint (hr) Value: 3
  misc_feature: MA Experiment 20001557 PARAMETER Experiment Name: At_Drought_Soil_Dry_P Parameter: Post-Treatment Value: Re-Water vs. No Drought
  misc_feature: MA Experiment 20001557 PARAMETER Experiment Name: At_Drought_Soil_Dry_P Parameter: Timepoint (day) Value: 13
  misc_feature: MA Experiment 20001557 PARAMETER Experiment Name: At_Drought_Soil_Dry_P Parameter: Treatment Value: Drought vs. No Drought
  misc_feature: MA Experiment ID: 20001558 Result: Down-regulated in Transcription
  misc_feature: MA Experiment 20001558 PARAMETER Experiment Name: At_Drought_Soil_Dry_P Parameter: Age (day) Value: 27
  misc_feature: MA Experiment 20001558 PARAMETER Experiment Name: At_Drought_Soil_Dry_P Parameter: Organism Value: A. thaliana
  misc_feature: MA Experiment 20001558 PARAMETER Experiment Name: At_Drought_Soil_Dry_P Parameter: Plant Line Value: WS
  misc_feature: MA Experiment 20001558 PARAMETER Experiment Name: At_Drought_Soil_Dry_P Parameter: Post Timepoint (hr) Value: 6
  misc_feature: MA Experiment 20001558 PARAMETER Experiment Name: At_Drought_Soil_Dry_P Parameter: Post-Treatment Value: Re-Water vs. No Drought
  misc_feature: MA Experiment 20001558 PARAMETER Experiment Name: At_Drought_Soil_Dry_P Parameter: Timepoint (day) Value: 13
  misc_feature: MA Experiment 20001558 PARAMETER Experiment Name: At_Drought_Soil_Dry_P Parameter: Treatment Value: Drought vs. No Drought
  misc_feature: MA Experiment ID: 20001560 Result: Down-regulated in Transcription
  misc_feature: MA Experiment 20001560 PARAMETER Experiment Name: At_Drought_Soil_Dry_P Parameter: Age (day) Value: 28
  misc_feature: MA Experiment 20001560 PARAMETER Experiment Name: At_Drought_Soil_Dry_P Parameter: Organism Value: A. thaliana
  misc_feature: MA Experiment 20001560 PARAMETER Experiment Name: At_Drought_Soil_Dry_P Parameter: Plant Line Value: WS
  misc_feature: MA Experiment 20001560 PARAMETER Experiment Name: At_Drought_Soil_Dry_P Parameter: Post Timepoint (hr) Value: None
  misc_feature: MA Experiment 20001560 PARAMETER Experiment Name: At_Drought_Soil_Dry_P Parameter: Post-Treatment Value: None
  misc_feature: MA Experiment 20001560 PARAMETER Experiment Name: At_Drought_Soil_Dry_P Parameter: Timepoint (day) Value: 14
  misc_feature: MA Experiment 20001560 PARAMETER Experiment Name: At_Drought_Soil_Dry_P Parameter: Treatment Value: Drought vs. No Drought
  misc_feature: MA Experiment ID: 20001911 Result: Up-regulated in Transcription
  misc_feature: MA Experiment 20001911 PARAMETER Experiment Name: At_Drought_Reproduction_P Parameter: Age (day) Value: 40
  misc_feature: MA Experiment 20001911 PARAMETER Experiment Name: At_Drought_Reproduction_P Parameter: Organism Value: A. thaliana
  misc_feature: MA Experiment 20001911 PARAMETER Experiment Name: At_Drought_Reproduction_P Parameter: Plant Line Value: WS
  misc_feature: MA Experiment 20001911 PARAMETER Experiment Name: At_Drought_Reproduction_P Parameter: Timepoint (day) Value: 10
  misc_feature: MA Experiment 20001911 PARAMETER Experiment Name: At_Drought_Reproduction_P Parameter: Tissue Value: Flowers
  misc_feature: MA Experiment 20001911 PARAMETER Experiment Name: At_Drought_Reproduction_P Parameter: Treatment Value: Drought vs. No Drought
ctacttcttcccaagtttgatcactcagcgaaacaaagcaaactaagtaacaaagttaaaaaaacaaagaatttgattgtttttttttcttatagatggcggtaggaatctttggattgatcccaagctcatcaccagacgagctaaggaagattcttcaagcgctttcgacgaaatggggagacgtagttgaggattttgagagtcttgaagtgaagccaatgaaaggagcgatgactaacgaagtgttcatggttagttggcctagaaaagaaacgaatcttcgatgtaggaagcttcttgttcgtgtttatggtgaaggtgttgagcttttcttcaatagagacgatgagattcgtacttttgagtatgttgctcgtcatggtcacggtcctacacttcttggtcgcttcgccggcggtagagtcgaagagtttatccatgcccggacactatcggcaaccgatcttcgtgatccgaacatatcagctcttgttgcatctaagctaagaagatttcacagcatacacattcctggagatagaattatgctcatctgggacaggatgaggacttgggtaggacaagccaagaatctatgttcaaatgaacattcaacagagtttggtctagacgacattgaagatgaaatcaacctgctggaacaagaagtgaacaatgaacaagagattggcttctgtcacaatgacttgcagtatggtaacatcatgattgatgaagaaaccaatgcaattactatcattgattatgagtatgcaagttataatccgatcgcttacgacatagcaaatcatttctgtgaaatggcggcagattatcattcaaacactcctcatatcttggactacactctatatccaggggaagaagaaaggaggagattcatatgtaactacttaacctcttcaggtgaagaagcaagagaagaagacatagaacaacttttggatgatattgagaagtatacattggcaagccatctcttctggggtttatggggaatcatatctggttatgtgaacaagattgagtttgattatatcgagtattcgaggcagagattcaaacagtattggcttcgcaagccaaagcttttatctttcttcccatcctaataagtaaattctctgtttacttatgtttactctttgcgaataacgcggtaaaaacccgatgatggatccatgatatagctatgccaaagctaaaactatgtgtaattcttctgttctgaacttctgatactatgtaataagtaaaagatataaatattccatactataatatttccac

SEQ ID NO: 74472 - protein, 346 aa, Arabidopsis thaliana
  peptide (1)..(346): Ceres Seq. ID no. 5677570
  misc_feature (64)..(335): Pfam Name: Choline/ethanolamine kinase Pfam Description: Choline/ethanolamine kinase
  misc_feature (1)..(346): Homolog of NCBI NO: 15234032 NR Description: choline kinase GmCK2p -like protein; protein id: supported by cDNA: 126037., supported by cDNA: 7395. [Arabidopsis >gi|7484868|pir||T04023 choline kinase 2 homolog [Arabidopsis
  misc_feature (1)..(346): Homolog of NCBI NO: 21594823 NR Description: choline kinase GmCK2p-like protein [Arabidopsis
  misc_feature (1)..(346): Homolog of NCBI NO: 21537276 NR Description: choline kinase GmCK2p-like protein [Arabidopsis
  misc_feature (8)..(341): Homolog of NCBI NO: 15217543 NR Description: choline kinase, putative; protein id: At1g71697.1
  misc_feature (1)..(341): Homolog of NCBI NO: 7488653 NR Description: choline kinase (EC 2.7.1.32) CK2 - soybean
  misc_feature (1)..(341): Homolog of NCBI NO: 12311795 NR Description: choline kinase [Pisum sativum]
  misc_feature (14)..(342): Homolog of NCBI NO: 22330627 NR Description: putative choline kinase; protein id: At1g74320.1, by cDNA: gi_20453121 [Arabidopsis thaliana] At1g74320/F1O17_1 [Arabidopsis thaliana]
  misc_feature (14)..(342): Homolog of NCBI NO: 25348157 NR Description: protein choline kinase F1O17.1 [imported] -
  misc_feature (1)..(341): Homolog of NCBI NO: 7488652 NR Description: choline kinase (EC 2.7.1.32) CK1 - soybean
  misc_feature (8)..(341): Homolog of NCBI NO: 12323732 NR Description: putative choline kinase; 4535-2895 [Arabidopsis
MAVGIFGLIPSSSPDELRKILQALSTKWGDVVEDFESLEVKPMKGAMTNEVFMVSWPRKETNLRCRKLLVRVYGEGVELFFNRDDEIRTFEYVARHGHGPTLLGRFAGGRVEEFIHARTLSATDLRDPNISALVASKLRRFHSIHIPGDRIMLIWDRMRTWVGQAKNLCSNEHSTEFGLDDIEDEINLLEQEVNNEQEIGFCHNDLQYGNIMIDEETNAITIIDYEYASYNPIAYDIANHFCEMAADYHSNTPHILDYTLYPGEEERRRFICNYLTSSGEEAREEDIEQLLDDIEKYTLASHLFWGLWGIISGYVNKIEFDYIEYSRQRFKQYWLRKPKLLSFFPS

SEQ ID NO: 74473 - protein, 304 aa, Arabidopsis thaliana; identical to SEQ ID NO: 42058
  peptide (1)..(304): Ceres Seq. ID no. 5677571
  misc_feature (22)..(293): Pfam Name: Choline/ethanolamine kinase Pfam Description: Choline/ethanolamine kinase
  misc_feature (1)..(304): Homolog of NCBI NO: 15234032 NR Description: choline kinase GmCK2p -like protein; protein id: supported by cDNA: 126037., supported by cDNA: 7395. [Arabidopsis >gi|7484868|pir||T04023 choline kinase 2 homolog [Arabidopsis
  misc_feature (1)..(304): Homolog of NCBI NO: 21594823 NR Description: choline kinase GmCK2p-like protein [Arabidopsis
  misc_feature (1)..(304): Homolog of NCBI NO: 21537276 NR Description: choline kinase GmCK2p-like protein [Arabidopsis
  misc_feature (1)..(299): Homolog of NCBI NO: 15217543 NR Description: choline kinase, putative; protein id: At1g71697.1
  misc_feature (1)..(299): Homolog of NCBI NO: 7488653 NR Description: choline kinase (EC 2.7.1.32) CK2 - soybean
  misc_feature (1)..(299): Homolog of NCBI NO: 12311795 NR Description: choline kinase [Pisum sativum]
  misc_feature (1)..(300): Homolog of NCBI NO: 22330627 NR Description: putative choline kinase; protein id: At1g74320.1, by cDNA: gi_20453121 [Arabidopsis thaliana] At1g74320/F1O17_1 [Arabidopsis thaliana]
  misc_feature (1)..(300): Homolog of NCBI NO: 25348157 NR Description: protein choline kinase F1O17.1 [imported] -
  misc_feature (1)..(299): Homolog of NCBI NO: 7488652 NR Description: choline kinase (EC 2.7.1.32) CK1 - soybean
  misc_feature (1)..(299): Homolog of NCBI NO: 12323732 NR Description: putative choline kinase; 4535-2895 [Arabidopsis

SEQ ID NO: 74474 - protein, 300 aa, Arabidopsis thaliana; identical to SEQ ID NO: 42059
  peptide (1)..(300): Ceres Seq. ID no. 5677572
  misc_feature (18)..(289): Pfam Name: Choline/ethanolamine kinase Pfam Description: Choline/ethanolamine kinase
  misc_feature (1)..(300): Homolog of NCBI NO: 15234032 NR Description: choline kinase GmCK2p -like protein; protein id: supported by cDNA: 126037., supported by cDNA: 7395. [Arabidopsis >gi|7484868|pir||T04023 choline kinase 2 homolog [Arabidopsis
  misc_feature (1)..(300): Homolog of NCBI NO: 21594823 NR Description: choline kinase GmCK2p-like protein [Arabidopsis
  misc_feature (1)..(300): Homolog of NCBI NO: 21537276 NR Description: choline kinase GmCK2p-like protein [Arabidopsis
  misc_feature (1)..(295): Homolog of NCBI NO: 15217543 NR Description: choline kinase, putative; protein id: At1g71697.1
  misc_feature (1)..(295): Homolog of NCBI NO: 7488653 NR Description: choline kinase (EC 2.7.1.32) CK2 - soybean
  misc_feature (1)..(295): Homolog of NCBI NO: 12311795 NR Description: choline kinase [Pisum sativum]
  misc_feature (1)..(296): Homolog of NCBI NO: 22330627 NR Description: putative choline kinase; protein id: At1g74320.1, by cDNA: gi_20453121 [Arabidopsis thaliana] At1g74320/F1O17_1 [Arabidopsis thaliana]
  misc_feature (1)..(296): Homolog of NCBI NO: 25348157 NR Description: protein choline kinase F1O17.1 [imported] -
  misc_feature (1)..(295): Homolog of NCBI NO: 7488652 NR Description: choline kinase (EC 2.7.1.32) CK1 - soybean
  misc_feature (1)..(295): Homolog of NCBI NO: 12323732 NR Description: putative choline kinase; 4535-2895 [Arabidopsis

SEQ ID NO: 74475 - DNA, 1133 bp, Arabidopsis thaliana
  misc_feature (1)..(1133): Ceres Seq. ID no. 5677590
  misc_feature: MA Experiment ID: 108461 Result: Up-regulated in Transcription
  misc_feature: MA Experiment 108461 PARAMETER Experiment Name: At_Germinating_Seeds_cDNA_P Parameter: Age (day) Value: 1 vs. 0
  misc_feature: MA Experiment 108461 PARAMETER Experiment Name: At_Germinating_Seeds_cDNA_P Parameter: Tissue Value: Germinating Seeds
  misc_feature: MA Experiment ID: 108585 Result: Down-regulated in Transcription
  misc_feature: MA Experiment 108585 PARAMETER Experiment Name: At_5mM_NaNP_cDNA_P Parameter: Timepoint (hr) Value: 6
  misc_feature: MA Experiment 108585 PARAMETER Experiment Name: At_5mM_NaNP_cDNA_P Parameter: Tissue Value: Aerial
  misc_feature: MA Experiment 108585 PARAMETER Experiment Name: At_5mM_NaNP_cDNA_P Parameter: Treatment Value: null
  misc_feature: MA Experiment ID: 20001905 Result: Down-regulated in Transcription
  misc_feature: MA Experiment 20001905 PARAMETER Experiment Name: At_Drought_Reproduction_P Parameter: Age (day) Value: 40
  misc_feature: MA Experiment 20001905 PARAMETER Experiment Name: At_Drought_Reproduction_P Parameter: Organism Value: A. thaliana
  misc_feature: MA Experiment 20001905 PARAMETER Experiment Name: At_Drought_Reproduction_P Parameter: Plant Line Value: WS
  misc_feature: MA Experiment 20001905 PARAMETER Experiment Name: At_Drought_Reproduction_P Parameter: Timepoint (day) Value: 10
  misc_feature: MA Experiment 20001905 PARAMETER Experiment Name: At_Drought_Reproduction_P Parameter: Tissue Value: Rosettes
  misc_feature: MA Experiment 20001905 PARAMETER Experiment Name: At_Drought_Reproduction_P Parameter: Treatment Value: Drought vs. No Drought
agtgttccggaggagaaggacgatcgatctaaggagacgatgaagatcttccacgttccttgtctgcaagacaactactcttatctgataatcgatgagagcaccggagacgcggcggttgtggatccagttgatccggagaaggtgatcgcatcggctgagaagcaccaagctaagatcaagttcgtactcactacgcatcatcactgggatcatgccggtggaaacgagaagattaagcagttggttcctgatatcaaagtatatggaggttctctggataaggtgaagggttgcactgatgcggttgataatggtgacaagctgactttgggtcaggatattaacatattggctctccacactccttggtttgtttttttttttttttttttttccaatgaatttagatgcatctaatctacttgatgtttaactcagtcattttctcttgtcatcgctgattcctctgatatatctacttgttacagtcacaccaagggtcacattagttattatgtgaacggaaaagaaggagaaaacccagccgtgttcaccggagatacactttttgttgctggatgtgggaagttttttgaagggacagctgagcagatgtatcagtcgttgtgtgtgactctggctgcattacctaaaccgacacaggtttactgcggccatgagtacaccgttaagaacttggaatttgctctaactgtggaaccaaacaacgggaagatacaacagaagttagcatgggcccgtcaacagcgccaagcagatcttcccacaatcccttcaacactggaggaagagctcgaaacaaatccatttatgcgtgttgataagccagagatacaggagaaactcggttgcaagtcgccaattgatacaatgagggaagttcggaacaagaaggatcagtggaggggatgatgataaatggagagcttcttgcctatgttttgtgtacttgtgttgaatgatcctgtaaaaggtgtatgaaccagtaatgttgatattctgtgtgaaactgtgaaccggtttggtaaaccgaaatcagaccgacctgtaagccgtactccctttttgaattttcagtttactatggataataatttcagtgtctacac

SEQ ID NO: 74476 - protein, 139 aa, Arabidopsis thaliana
  peptide (1)..(139): Ceres Seq. ID no. 5677591
  misc_feature (24)..(123): Pfam Name: Metallo-beta-lactamase superfamily Pfam Description: Metallo-beta-lactamase superfamily
  misc_feature (14)..(123): Homolog of NCBI NO: 15228389 NR Description: glyoxalase II (hydroxyacylglutathione protein id: At3g10850.1, supported by cDNA: gi_15450456, by cDNA: gi_2570341 [Arabidopsis thaliana]
  misc_feature (14)..(123): Homolog of NCBI NO: 2570342 NR Description: glyoxalase II cytoplasmic isozyme [Arabidopsis
  misc_feature (14)..(123): Homolog of NCBI NO: 21729786 NR Description: hydroxyacyl glutathione hydrolase; glyoxylase 2; II; round spermatid protein RSP29 [Mus musculus] Hydroxyacylglutathione hydrolase (Glyoxalase II) (Glx II)
  misc_feature (14)..(123): Homolog of NCBI NO: 15375320 NR Description: hydroxyacyl glutathione hydrolase; glyoxalase II; spermatid protein RSP29 [Rattus norvegicus] Hydroxyacylglutathione hydrolase (Glyoxalase II) (Glx II) (Round
  misc_feature (14)..(123): Homolog of NCBI NO: 4885389 NR Description: hydroxyacyl glutathione hydrolase; hydroxyacyl hydrolase; glyoxalase 2; Hydroxyacyl glutathione hydrolase; II; hydroxyacylglutathione hydroxylase [Homo sapiens]
  misc_feature (14)..(123): Homolog of NCBI NO: 2494848 NR Description: Hydroxyacylglutathione hydrolase (Glyoxalase II) II) (Germ cell specific protein) >gi|1167481|emb|CAA64612.1| ORF
  misc_feature (7)..(123): Homolog of NCBI NO: 21356335 NR Description: CG4365-PA [Drosophila melanogaster]
  misc_feature (7)..(123): Homolog of NCBI NO: 24667703 NR Description: CG4365-PC [Drosophila melanogaster]
  misc_feature (7)..(123): Homolog of NCBI NO: 24667711 NR Description: CG4365-PB [Drosophila melanogaster]
  misc_feature (14)..(123): Homolog of NCBI NO: 29841459 NR Description: similar to probable hydroxyacylglutathione
SVPEEKDDRSKETMKIFHVPCLQDNYSYLIIDESTGDAAVVDPVDPEKVIASAEKHQAKIKFVLTTHHHWDHAGGNEKIKQLVPDIKVYGGSLDKVKGCTDAVDNGDKLTLGQDINILALHTPWFVFFFFFFSNEFRCI

SEQ ID NO: 74477 - protein, 126 aa, Arabidopsis thaliana
  peptide (1)..(126): Ceres Seq. ID no. 5677592
  misc_feature (11)..(110): Pfam Name: Metallo-beta-lactamase superfamily Pfam Description: Metallo-beta-lactamase superfamily
  misc_feature (1)..(110): Homolog of NCBI NO: 15228389 NR Description: glyoxalase II (hydroxyacylglutathione protein id: At3g10850.1, supported by cDNA: gi_15450456, by cDNA: gi_2570341 [Arabidopsis thaliana]
  misc_feature (1)..(110): Homolog of NCBI NO: 2570342 NR Description: glyoxalase II cytoplasmic isozyme [Arabidopsis
  misc_feature (1)..(110): Homolog of NCBI NO: 21729786 NR Description: hydroxyacyl glutathione hydrolase; glyoxylase 2; II; round spermatid protein RSP29 [Mus musculus] Hydroxyacylglutathione hydrolase (Glyoxalase II) (Glx II)
  misc_feature (1)..(110): Homolog of NCBI NO: 15375320 NR Description: hydroxyacyl glutathione hydrolase; glyoxalase II; spermatid protein RSP29 [Rattus norvegicus] Hydroxyacylglutathione hydrolase (Glyoxalase II) (Glx II) (Round
  misc_feature (1)..(110): Homolog of NCBI NO: 4885389 NR Description: hydroxyacyl glutathione hydrolase; hydroxyacyl hydrolase; glyoxalase 2; Hydroxyacyl glutathione hydrolase; II; hydroxyacylglutathione hydroxylase [Homo sapiens]
  misc_feature (1)..(110): Homolog of NCBI NO: 2494848 NR Description: Hydroxyacylglutathione hydrolase (Glyoxalase II) II) (Germ cell specific protein) >gi|1167481|emb|CAA64612.1| ORF
  misc_feature (1)..(110): Homolog of NCBI NO: 21356335 NR Description: CG4365-PA [Drosophila melanogaster]
  misc_feature (1)..(110): Homolog of NCBI NO: 24667703 NR Description: CG4365-PC [Drosophila melanogaster]
  misc_feature (1)..(110): Homolog of NCBI NO: 24667711 NR Description: CG4365-PB [Drosophila melanogaster]
  misc_feature (1)..(110): Homolog of NCBI NO: 29841459 NR Description: similar to probable hydroxyacylglutathione
MKIFHVPCLQDNYSYLIIDESTGDAAVVDPVDPEKVIASAEKHQAKIKFVLTTHHHWDHAGGNEKIKQLVPDIKVYGGSLDKVKGCTDAVDNGDKLTLGQDINILALHTPWFVFFFFFFSNEFRCI

SEQ ID NO: 74478 - protein, 106 aa, Arabidopsis thaliana; identical to SEQ ID NO: 35938
  peptide (1)..(106): Ceres Seq. ID no. 5677593
  misc_feature (1)..(106): Homolog of NCBI NO: 15228389 NR Description: glyoxalase II (hydroxyacylglutathione protein id: At3g10850.1, supported by cDNA: gi_15450456, by cDNA: gi_2570341 [Arabidopsis thaliana]
  misc_feature (1)..(106): Homolog of NCBI NO: 2570342 NR Description: glyoxalase II cytoplasmic isozyme [Arabidopsis
  misc_feature (1)..(105): Homolog of NCBI NO: 21729786 NR Description: hydroxyacyl glutathione hydrolase; glyoxylase 2; II; round spermatid protein RSP29 [Mus musculus] Hydroxyacylglutathione hydrolase (Glyoxalase II) (Glx II)
  misc_feature (1)..(105): Homolog of NCBI NO: 15375320 NR Description: hydroxyacyl glutathione hydrolase; glyoxalase II; spermatid protein RSP29 [Rattus norvegicus] Hydroxyacylglutathione hydrolase (Glyoxalase II) (Glx II) (Round
  misc_feature (1)..(105): Homolog of NCBI NO: 4885389 NR Description: hydroxyacyl glutathione hydrolase; hydroxyacyl hydrolase; glyoxalase 2; Hydroxyacyl glutathione hydrolase; II; hydroxyacylglutathione hydroxylase [Homo sapiens]
  misc_feature (1)..(105): Homolog of NCBI NO: 2494848 NR Description: Hydroxyacylglutathione hydrolase (Glyoxalase II) II) (Germ cell specific protein) >gi|1167481|emb|CAA64612.1| ORF
  misc_feature (1)..(105): Homolog of NCBI NO: 21356335 NR Description: CG4365-PA [Drosophila melanogaster]
  misc_feature (1)..(105): Homolog of NCBI NO: 24667703 NR Description: CG4365-PC [Drosophila melanogaster]
  misc_feature (1)..(105): Homolog of NCBI NO: 24667711 NR Description: CG4365-PB [Drosophila melanogaster]
  misc_feature (1)..(104): Homolog of NCBI NO: 29841459 NR Description: similar to probable hydroxyacylglutathione

SEQ ID NO: 74479 - DNA, 1160 bp, Arabidopsis thaliana
  misc_feature (1)..(1160): Ceres Seq. ID no. 5677598
  misc_feature: MA Experiment ID: 108434 Result: Down-regulated in Transcription
  misc_feature: MA Experiment 108434 PARAMETER Experiment Name: At_Root_Tips_cDNA_P Parameter: Tissue Value: Root Tips
  misc_feature: MA Experiment ID: 108462 Result: Up-regulated in Transcription
  misc_feature: MA Experiment 108462 PARAMETER Experiment Name: At_Germinating_Seeds_cDNA_P Parameter: Age (day) Value: 2 vs. 0
  misc_feature: MA Experiment 108462 PARAMETER Experiment Name: At_Germinating_Seeds_cDNA_P Parameter: Tissue Value: Germinating Seeds
  misc_feature: MA Experiment ID: 108463 Result: Up-regulated in Transcription
  misc_feature: MA Experiment 108463 PARAMETER Experiment Name: At_Germinating_Seeds_cDNA_P Parameter: Age (day) Value: 3 vs. 0
  misc_feature: MA Experiment 108463 PARAMETER Experiment Name: At_Germinating_Seeds_cDNA_P Parameter: Tissue Value: Germinating Seeds
  misc_feature: MA Experiment ID: 108464 Result: Up-regulated in Transcription
  misc_feature: MA Experiment 108464 PARAMETER Experiment Name: At_Germinating_Seeds_cDNA_P Parameter: Age (day) Value: 4 vs. 0
  misc_feature: MA Experiment 108464 PARAMETER Experiment Name: At_Germinating_Seeds_cDNA_P Parameter: Tissue Value: Germinating Seeds
  misc_feature: MA Experiment ID: 108469 Result: Up-regulated in Transcription
  misc_feature: MA Experiment ID: 108595 Result: Down-regulated in Transcription
  misc_feature: MA Experiment 108595 PARAMETER Experiment Name: At_Ler-pi_Ovule_cDNA_P Parameter: Plant Line Value: null
  misc_feature: MA Experiment ID: 20000185 Result: Up-regulated in Transcription
  misc_feature: MA Experiment 20000185 PARAMETER Experiment Name: At_Roots__P Parameter: Age (day) Value: 7 vs. 21
  misc_feature: MA Experiment 20000185 PARAMETER Experiment Name: At_Roots__P Parameter: Organism Value: A. thaliana
  misc_feature: MA Experiment 20000185 PARAMETER Experiment Name: At_Roots__P Parameter: Tissue Value: Roots vs. Whole Plant
  misc_feature: MA Experiment ID: 20000227 Result: Down-regulated in Transcription
  misc_feature: MA Experiment 20000227 PARAMETER Experiment Name: At_Root-Tips-vs-Tops_P Parameter: Tissue Value: Root Tips vs. Root Tops
  misc_feature: MA Experiment ID: 20000234 Result: Down-regulated in Transcription
  misc_feature: MA Experiment 20000234 PARAMETER Experiment Name: At_Siliques_P Parameter: Age (day) Value: 21
  misc_feature: MA Experiment 20000234 PARAMETER Experiment Name: At_Siliques_P Parameter: Organism Value: A. thaliana
  misc_feature: MA Experiment 20000234 PARAMETER Experiment Name: At_Siliques_P Parameter: Plant Line Value: WS
  misc_feature: MA Experiment 20000234 PARAMETER Experiment Name: At_Siliques_P Parameter: Tissue Value: Less Than 5mm Siliques vs. Whole Plant
  misc_feature: MA Experiment ID: 20000235 Result: Down-regulated in Transcription
  misc_feature: MA Experiment 20000235 PARAMETER Experiment Name: At_Siliques_P Parameter: Age (day) Value: 21
  misc_feature: MA Experiment 20000235 PARAMETER Experiment Name: At_Siliques_P Parameter: Organism Value: A. thaliana
  misc_feature: MA Experiment 20000235 PARAMETER Experiment Name: At_Siliques_P Parameter: Plant Line Value: WS
  misc_feature: MA Experiment 20000235 PARAMETER Experiment Name: At_Siliques_P Parameter: Tissue Value: 5-10mm Siliques vs. Whole Plant
  misc_feature: MA Experiment ID: 20000265 Result: Down-regulated in Transcription
  misc_feature: MA Experiment 20000265 PARAMETER Experiment Name: At_Open_Flower_P Parameter: Age (day) Value: 21
  misc_feature: MA Experiment 20000265 PARAMETER Experiment Name: At_Open_Flower_P Parameter: Plant Line Value: WS
  misc_feature: MA Experiment 20000265 PARAMETER Experiment Name: At_Open_Flower_P Parameter: Tissue Value: Closed Flower vs. Whole Plant
  misc_feature: MA Experiment ID: 20000286 Result: Down-regulated in Transcription
  misc_feature: MA Experiment 20000286 PARAMETER Experiment Name: At_Open_Flower_P Parameter: Age (day) Value: 21
  misc_feature: MA Experiment 20000286 PARAMETER Experiment Name: At_Open_Flower_P Parameter: Plant Line Value: WS
  misc_feature: MA Experiment 20000286 PARAMETER Experiment Name: At_Open_Flower_P Parameter: Tissue Value: Half Open vs. Whole Plant
  misc_feature: MA Experiment ID: 20001557 Result: Down-regulated in Transcription
  misc_feature: MA Experiment 20001557 PARAMETER Experiment Name: At_Drought_Soil_Dry_P Parameter: Age (day) Value: 27
  misc_feature: MA Experiment 20001557 PARAMETER Experiment Name: At_Drought_Soil_Dry_P Parameter: Organism Value: A. thaliana
  misc_feature: MA Experiment 20001557 PARAMETER Experiment Name: At_Drought_Soil_Dry_P Parameter: Plant Line Value: WS
  misc_feature: MA Experiment 20001557 PARAMETER Experiment Name: At_Drought_Soil_Dry_P Parameter: Post Timepoint (hr) Value: 3
  misc_feature: MA Experiment 20001557 PARAMETER Experiment Name: At_Drought_Soil_Dry_P Parameter: Post-Treatment Value: Re-Water vs. No Drought
  misc_feature: MA Experiment 20001557 PARAMETER Experiment Name: At_Drought_Soil_Dry_P Parameter: Timepoint (day) Value: 13
  misc_feature: MA Experiment 20001557 PARAMETER Experiment Name: At_Drought_Soil_Dry_P Parameter: Treatment Value: Drought vs. No Drought
  misc_feature: MA Experiment ID: 20001905 Result: Down-regulated in Transcription
  misc_feature: MA Experiment 20001905 PARAMETER Experiment Name: At_Drought_Reproduction_P Parameter: Age (day) Value: 40
  misc_feature: MA Experiment 20001905 PARAMETER Experiment Name: At_Drought_Reproduction_P Parameter: Organism Value: A. thaliana
  misc_feature: MA Experiment 20001905 PARAMETER Experiment Name: At_Drought_Reproduction_P Parameter: Plant Line Value: WS
  misc_feature: MA Experiment 20001905 PARAMETER Experiment Name: At_Drought_Reproduction_P Parameter: Timepoint (day) Value: 10
  misc_feature: MA Experiment 20001905 PARAMETER Experiment Name: At_Drought_Reproduction_P Parameter: Tissue Value: Rosettes
  misc_feature: MA Experiment 20001905 PARAMETER Experiment Name: At_Drought_Reproduction_P Parameter: Treatment Value: Drought vs. No Drought
actgggtcttcttcagcttctgagtcttctcctctctctctatctctcaagtgggctttgctttgctgtttttgtcttccttcgacgactcacttttgcagattctcataaattcttcaaagctttgagtcttttttcagattcgagggtcggttttatatatgcttcaaatctcttacccaaatcaggtatggagactctgcatccattctctcacctacctatctctgaccaccggttcgttgttcaagagatggtgagcttacacagctcgagtagcggtagctggactaaagaagagaacaagatgttcgaacgagctcttgcgatatacgctgaagactcgcctgatcgctggtttaaagttgcttccatgatccctggaaagactgtttttgatgttatgaagcaatatagtaagcttgaagaagacgttttcgatattgaagcaggacgtgttcccattcctggttatcctgcagcttcttctcccttggggtttgacacggacatgtgtcgtaaacggcctagtggagctagaggatctgatcaagatcgaaagaaaggagtcccttggacagaggaagaacacaggagattcttgttaggccttctcaagtacggtaaaggagattggagaaacatatcgagaaacttcgtggtgtcaaagacgccaacgcaagtggcgagccacgcccaaaagtattaccagagacagctctccggagccaaggacaaacgcaggccaagtatccatgacatcacaaccggcaatcttctcaatgccaatctcaaccgttccttttccgatcatagagatattctccctgatttagggtttatcgataaggatgatacggaggagggagtaatatttatgggtcagaatctctcttcagaaaatctgttttctccatcaccaacttcattcgaagctgccattaacttcgccggagaaaatgtcttcagtgccggagcttaaggcaacatagaatccccaaactcagcgttcttaagaatctgagttttgaaactgtaattagagaaatataagcaaaaccaagtttattatatatgtattgtgtggtttaaaagtaagaacttgtttttactctgtatttttgtgtttctgtctactaaatacctgttatgttaaaaaa

SEQ ID NO: 74480 - protein, 326 aa, Arabidopsis thaliana
  peptide (1)..(326): Ceres Seq. ID no. 5677599
  misc_feature (189)..(236): Pfam Name: Myb-like DNA-binding domain Pfam Description: Myb-like DNA-binding domain
  misc_feature (64)..(326): Homolog of NCBI NO: 15229712 NR Description: MYB-family transcription factor, putative; id: At3g11280.1, supported by cDNA: 109398., supported by cDNA: supported by cDNA: gi_20258976 [Arabidopsis thaliana]
  misc_feature (64)..(326): Homolog of NCBI NO: 21618234 NR Description: MYB-family transcription factor, putative
  misc_feature (64)..(325): Homolog of NCBI NO: 15239231 NR Description: putative protein; protein id: At5g05790.1
  misc_feature (157)..(314): Homolog of NCBI NO: 30687381 NR Description: MYB family transcription factor -related thaliana] >gi|26451319|dbj|BAC42760.1| putative MYB family factor [Arabidopsis thaliana] >gi|29824293|gb|AAP04107.1|
  misc_feature (63)..(168): Homolog of NCBI NO: 30687381 NR Description: MYB family transcription factor -related thaliana] >gi|26451319|dbj|BAC42760.1| putative MYB family factor [Arabidopsis thaliana] >gi|29824293|gb|AAP04107.1|
  misc_feature (157)..(314): Homolog of NCBI NO: 7446171 NR Description: probable MYB family transcription factor - Arabidopsis thaliana >gi|3335378|gb|AAC27179.1| putative MYB
  misc_feature (88)..(168): Homolog of NCBI NO: 7446171 NR Description: probable MYB family transcription factor - Arabidopsis thaliana >gi|3335378|gb|AAC27179.1| putative MYB
  misc_feature (63)..(259): Homolog of NCBI NO: 12005328 NR Description: unknown [Hevea brasiliensis]
  misc_feature (64)..(259): Homolog of NCBI NO: 15237776 NR Description: I-box binding factor - like protein; protein id:
  misc_feature (64)..(259): Homolog of NCBI NO: 18874263 NR Description: MYB-like transcription factor DIVARICATA
LGLLQLLSLLLSLYLSSGLCFAVFVFLRRLTFADSHKFFKALSLFSDSRVGFIYASNLLPKSGMETLHPFSHLPISDHRFVVQEMVSLHSSSSGSWTKEENKMFERALAIYAEDSPDRWFKVASMIPGKTVFDVMKQYSKLEEDVFDIEAGRVPIPGYPAASSPLGFDTDMCRKRPSGARGSDQDRKKGVPWTEEEHRRFLLGLLKYGKGDWRNISRNFVVSKTPTQVASHAQKYYQRQLSGAKDKRRPSIHDITTGNLLNANLNRSFSDHRDILPDLGFIDKDDTEEGVIFMGQNLSSENLFSPSPTSFEAAINFAGENVFSAGA

SEQ ID NO: 74481 - protein, 263 aa, Arabidopsis thaliana
  peptide (1)..(263): Ceres Seq. ID no. 5677600
  misc_feature (126)..(173): Pfam Name: Myb-like DNA-binding domain Pfam Description: Myb-like DNA-binding domain
  misc_feature (1)..(263): Homolog of NCBI NO: 15229712 NR Description: MYB-family transcription factor, putative; id: At3g11280.1, supported by cDNA: 109398., supported by cDNA: supported by cDNA: gi_20258976 [Arabidopsis thaliana]
  misc_feature (1)..(263): Homolog of NCBI NO: 21618234 NR Description: MYB-family transcription factor, putative
  misc_feature (1)..(262): Homolog of NCBI NO: 15239231 NR Description: putative protein; protein id: At5g05790.1
  misc_feature (94)..(251): Homolog of NCBI NO: 30687381 NR Description: MYB family transcription factor -related thaliana] >gi|26451319|dbj|BAC42760.1| putative MYB family factor [Arabidopsis thaliana] >gi|29824293|gb|AAP04107.1|
  misc_feature (1)..(105): Homolog of NCBI NO: 30687381 NR Description: MYB family transcription factor -related thaliana] >gi|26451319|dbj|BAC42760.1| putative MYB family factor [Arabidopsis thaliana] >gi|29824293|gb|AAP04107.1|
  misc_feature (94)..(251): Homolog of NCBI NO: 7446171 NR Description: probable MYB family transcription factor - Arabidopsis thaliana >gi|3335378|gb|AAC27179.1| putative MYB
  misc_feature (25)..(105): Homolog of NCBI NO: 7446171 NR Description: probable MYB family transcription factor - Arabidopsis thaliana >gi|3335378|gb|AAC27179.1| putative MYB
  misc_feature (1)..(196): Homolog of NCBI NO: 12005328 NR Description: unknown [Hevea brasiliensis]
  misc_feature (1)..(196): Homolog of NCBI NO: 15237776 NR Description: I-box binding factor - like protein; protein id:
  misc_feature (1)..(196): Homolog of NCBI NO: 18874263 NR Description: MYB-like transcription factor DIVARICATA
METLHPFSHLPISDHRFVVQEMVSLHSSSSGSWTKEENKMFERALAIYAEDSPDRWFKVASMIPGKTVFDVMKQYSKLEEDVFDIEAGRVPIPGYPAASSPLGFDTDMCRKRPSGARGSDQDRKKGVPWTEEEHRRFLLGLLKYGKGDWRNISRNFVVSKTPTQVASHAQKYYQRQLSGAKDKRRPSIHDITTGNLLNANLNRSFSDHRDILPDLGFIDKDDTEEGVIFMGQNLSSENLFSPSPTSFEAAINFAGENVFSAGA

SEQ ID NO: 74482 - protein, 242 aa, Arabidopsis thaliana
  peptide (1)..(242): Ceres Seq. ID no. 5677601
  misc_feature (105)..(152): Pfam Name: Myb-like DNA-binding domain Pfam Description: Myb-like DNA-binding domain
  misc_feature (1)..(242): Homolog of NCBI NO: 15229712 NR Description: MYB-family transcription factor, putative; id: At3g11280.1, supported by cDNA: 109398., supported by cDNA: supported by cDNA: gi_20258976 [Arabidopsis thaliana]
  misc_feature (1)..(242): Homolog of NCBI NO: 21618234 NR Description: MYB-family transcription factor, putative
  misc_feature (1)..(241): Homolog of NCBI NO: 15239231 NR Description: putative protein; protein id: At5g05790.1
  misc_feature (73)..(230): Homolog of NCBI NO: 30687381 NR Description: MYB family transcription factor -related thaliana] >gi|26451319|dbj|BAC42760.1| putative MYB family factor [Arabidopsis thaliana] >gi|29824293|gb|AAP04107.1|
  misc_feature (1)..(84): Homolog of NCBI NO: 30687381 NR Description: MYB family transcription factor -related thaliana] >gi|26451319|dbj|BAC42760.1| putative MYB family factor [Arabidopsis thaliana] >gi|29824293|gb|AAP04107.1|
  misc_feature (73)..(230): Homolog of NCBI NO: 7446171 NR Description: probable MYB family transcription factor - Arabidopsis thaliana >gi|3335378|gb|AAC27179.1| putative MYB
  misc_feature (4)..(84): Homolog of NCBI NO: 7446171 NR Description: probable MYB family transcription factor - Arabidopsis thaliana >gi|3335378|gb|AAC27179.1| putative MYB
  misc_feature (1)..(175): Homolog of NCBI NO: 12005328 NR Description: unknown [Hevea brasiliensis]
  misc_feature (1)..(175): Homolog of NCBI NO: 15237776 NR Description: I-box binding factor - like protein; protein id:
  misc_feature (1)..(175): Homolog of NCBI NO: 18874263 NR Description: MYB-like transcription factor DIVARICATA
MVSLHSSSSGSWTKEENKMFERALAIYAEDSPDRWFKVASMIPGKTVFDVMKQYSKLEEDVFDIEAGRVPIPGYPAASSPLGFDTDMCRKRPSGARGSDQDRKKGVPWTEEEHRRFLLGLLKYGKGDWRNISRNFVVSKTPTQVASHAQKYYQRQLSGAKDKRRPSIHDITTGNLLNANLNRSFSDHRDILPDLGFIDKDDTEEGVIFMGQNLSSENLFSPSPTSFEAAINFAGENVFSAGA

SEQ ID NO: 74483 - DNA, 860 bp, Arabidopsis thaliana
  misc_feature (1)..(860): Ceres Seq. ID no. 5677606
  misc_feature: MA Experiment ID: 108433 Result: Down-regulated in Transcription
  misc_feature: MA Experiment 108433 PARAMETER Experiment Name: At_rhl_Mutant2_cDNA_P Parameter: Age (day) Value: 7
  misc_feature: MA Experiment 108433 PARAMETER Experiment Name: At_rhl_Mutant2_cDNA_P Parameter: Organism Value: A. thaliana
  misc_feature: MA Experiment 108433 PARAMETER Experiment Name: At_rhl_Mutant2_cDNA_P Parameter: Plant Line Value: rhl Mutant vs. wt landsburg
  misc_feature: MA Experiment 108433 PARAMETER Experiment Name: At_rhl_Mutant2_cDNA_P Parameter: Tissue Value: Roots
  misc_feature: MA Experiment ID: 108434 Result: Up-regulated in Transcription
  misc_feature: MA Experiment 108434 PARAMETER Experiment Name: At_Root_Tips_cDNA_P Parameter: Tissue Value: Root Tips
  misc_feature: MA Experiment ID: 108462 Result: Down-regulated in Transcription
  misc_feature: MA Experiment 108462 PARAMETER Experiment Name: At_Germinating_Seeds_cDNA_P Parameter: Age (day) Value: 2 vs. 0
  misc_feature: MA Experiment 108462 PARAMETER Experiment Name: At_Germinating_Seeds_cDNA_P Parameter: Tissue Value: Germinating Seeds
  misc_feature: MA Experiment ID: 108463 Result: Down-regulated in Transcription
  misc_feature: MA Experiment 108463 PARAMETER Experiment Name: At_Germinating_Seeds_cDNA_P Parameter: Age (day) Value: 3 vs. 0
  misc_feature: MA Experiment 108463 PARAMETER Experiment Name: At_Germinating_Seeds_cDNA_P Parameter: Tissue Value: Germinating Seeds
  misc_feature: MA Experiment ID: 108464 Result: Down-regulated in Transcription
  misc_feature: MA Experiment 108464 PARAMETER Experiment Name: At_Germinating_Seeds_cDNA_P Parameter: Age (day) Value: 4 vs. 0
  misc_feature: MA Experiment 108464 PARAMETER Experiment Name: At_Germinating_Seeds_cDNA_P Parameter: Tissue Value: Germinating Seeds
  misc_feature: MA Experiment ID: 108576 Result: Down-regulated in Transcription
  misc_feature: MA Experiment 108576 PARAMETER Experiment Name: At_42deg_Heat_cDNA_P Parameter: Temperature (deg C) Value: 42 vs. 22
  misc_feature: MA Experiment 108576 PARAMETER Experiment Name: At_42deg_Heat_cDNA_P Parameter: Timepoint (hr) Value: 1
  misc_feature: MA Experiment 108576 PARAMETER Experiment Name: At_42deg_Heat_cDNA_P Parameter: Tissue Value: Aerial
  misc_feature: MA Experiment ID: 20000111 Result: Up-regulated in Transcription
  misc_feature: MA Experiment 20000111 PARAMETER Experiment Name: At_42deg_Heat_cDNA_P Parameter: Temperature (deg C) Value: 42 vs. 22
  misc_feature: MA Experiment 20000111 PARAMETER Experiment Name: At_42deg_Heat_cDNA_P Parameter: Timepoint (hr) Value: 6
  misc_feature: MA Experiment 20000111 PARAMETER Experiment Name: At_42deg_Heat_cDNA_P Parameter: Tissue Value: Aerial
  misc_feature: MA Experiment ID: 20000173 Result: Up-regulated in Transcription
  misc_feature: MA Experiment 20000173 PARAMETER Experiment Name: At_42deg_Heat_P Parameter: Age (day) Value: 14
  misc_feature: MA Experiment 20000173 PARAMETER Experiment Name: At_42deg_Heat_P Parameter: Organism Value: A. thaliana
  misc_feature: MA Experiment 20000173 PARAMETER Experiment Name: At_42deg_Heat_P Parameter: Plant Line Value: WS
  misc_feature: MA Experiment 20000173 PARAMETER Experiment Name: At_42deg_Heat_P Parameter: Temperature (deg C) Value: 42 vs. 22
  misc_feature: MA Experiment 20000173 PARAMETER Experiment Name: At_42deg_Heat_P Parameter: Timepoint (hr) Value: 6
  misc_feature: MA Experiment 20000173 PARAMETER Experiment Name: At_42deg_Heat_P Parameter: Tissue Value: Aerial
  misc_feature: MA Experiment ID: 20000184 Result: Up-regulated in Transcription
  misc_feature: MA Experiment 20000184 PARAMETER Experiment Name: At_Shoots__P Parameter: Age (day) Value: 7
  misc_feature: MA Experiment 20000184 PARAMETER Experiment Name: At_Shoots__P Parameter: Tissue Value: Shoots vs. Whole Plant
  misc_feature: MA Experiment ID: 20000224 Result: Down-regulated in Transcription
  misc_feature: MA Experiment ID: 20000794 Result: Down-regulated in Transcription
  misc_feature: MA Experiment 20000794 PARAMETER Experiment Name: At_Petals_P Parameter: Age (day) Value: 23-25 days
  misc_feature: MA Experiment 20000794 PARAMETER Experiment Name: At_Petals_P Parameter: Plant Line Value: WS
  misc_feature: MA Experiment 20000794 PARAMETER Experiment Name: At_Petals_P Parameter: Tissue Value: Petals vs. Whole plant
  misc_feature: MA Experiment ID: 20001557 Result: Up-regulated in Transcription
  misc_feature: MA Experiment 20001557 PARAMETER Experiment Name: At_Drought_Soil_Dry_P Parameter: Age (day) Value: 27
  misc_feature: MA Experiment 20001557 PARAMETER Experiment Name: At_Drought_Soil_Dry_P Parameter: Organism Value: A. thaliana
  misc_feature: MA Experiment 20001557 PARAMETER Experiment Name: At_Drought_Soil_Dry_P Parameter: Plant Line Value: WS
  misc_feature: MA Experiment 20001557 PARAMETER Experiment Name: At_Drought_Soil_Dry_P Parameter: Post Timepoint (hr) Value: 3
  misc_feature: MA Experiment 20001557 PARAMETER Experiment Name: At_Drought_Soil_Dry_P Parameter: Post-Treatment Value: Re-Water vs. No Drought
  misc_feature: MA Experiment 20001557 PARAMETER Experiment Name: At_Drought_Soil_Dry_P Parameter: Timepoint (day) Value: 13
  misc_feature: MA Experiment 20001557 PARAMETER Experiment Name: At_Drought_Soil_Dry_P Parameter: Treatment Value: Drought vs. No Drought
  misc_feature: MA Experiment ID: 20001558 Result: Up-regulated in Transcription
  misc_feature: MA Experiment 20001558 PARAMETER Experiment Name: At_Drought_Soil_Dry_P Parameter: Age (day) Value: 27
  misc_feature: MA Experiment 20001558 PARAMETER Experiment Name: At_Drought_Soil_Dry_P Parameter: Organism Value: A. thaliana
  misc_feature: MA Experiment 20001558 PARAMETER Experiment Name: At_Drought_Soil_Dry_P Parameter: Plant Line Value: WS
  misc_feature: MA Experiment 20001558 PARAMETER Experiment Name: At_Drought_Soil_Dry_P Parameter: Post Timepoint (hr) Value: 6
  misc_feature: MA Experiment 20001558 PARAMETER Experiment Name: At_Drought_Soil_Dry_P Parameter: Post-Treatment Value: Re-Water vs. No Drought
  misc_feature: MA Experiment 20001558 PARAMETER Experiment Name: At_Drought_Soil_Dry_P Parameter: Timepoint (day) Value: 13
  misc_feature: MA Experiment 20001558 PARAMETER Experiment Name: At_Drought_Soil_Dry_P Parameter: Treatment Value: Drought vs. No Drought
  misc_feature: MA Experiment ID: 20001560 Result: Up-regulated in Transcription
  misc_feature: MA Experiment 20001560 PARAMETER Experiment Name: At_Drought_Soil_Dry_P Parameter: Age (day) Value: 28
  misc_feature: MA Experiment 20001560 PARAMETER Experiment Name: At_Drought_Soil_Dry_P Parameter: Organism Value: A. thaliana
  misc_feature: MA Experiment 20001560 PARAMETER Experiment Name: At_Drought_Soil_Dry_P Parameter: Plant Line Value: WS
  misc_feature: MA Experiment 20001560 PARAMETER Experiment Name: At_Drought_Soil_Dry_P Parameter: Post Timepoint (hr) Value: None
  misc_feature: MA Experiment 20001560 PARAMETER Experiment Name: At_Drought_Soil_Dry_P Parameter: Post-Treatment Value: None
  misc_feature: MA Experiment 20001560 PARAMETER Experiment Name: At_Drought_Soil_Dry_P Parameter: Timepoint (day) Value: 14
  misc_feature: MA Experiment 20001560 PARAMETER Experiment Name: At_Drought_Soil_Dry_P Parameter: Treatment Value: Drought vs. No Drought
  misc_feature: MA Experiment ID: 20001757 Result: Up-regulated in Transcription
  misc_feature: MA Experiment 20001757 PARAMETER Experiment Name: At_50mM_NH4NO3_L-to-H_P Parameter: Timepoint (hr) Value: 6
  misc_feature: MA Experiment 20001757 PARAMETER Experiment Name: At_50mM_NH4NO3_L-to-H_P Parameter: Tissue Value: Leaf
  misc_feature: MA Experiment 20001757 PARAMETER Experiment Name: At_50mM_NH4NO3_L-to-H_P Parameter: Treatment Value: 50mM NH4NO3 vs 100mM Mannitol
  misc_feature: Pfam Name: Ribosomal_S7 Pfam Description: Ribosomal protein S7p/S5e
attcgcgcgacgcaaacgatcttcaggtgatcttctttctccaaatcctctctcataactctgatttcgtacttgtgtatttgagctcacgctctgtttctctcaccacagccatggccaccgccgcagatgttgacgctgagattcagcaggcgctcactaacgaagtcaagctcttcaaccgctggacctatgacgacgttacggtcacagacatcagtcttgttgactacattggagttcaggcagctaaacatgctacctttgttccccacaccgctggaagatactctgtgaagagattcaggaaggctcagtgccccattgttgagaggctcaccaactctctcatgatgcacgggaggaacaacggtaagaaattgatggctgtcaggatcgtcaagcacgccatggagattatccacctcttgtctgacttgaacccaattcaggtcatcattgacgccattgtcaacagtggtccacgtgaagatgctaccagaattggatctgctggtgttgttaggagacaagctgttgatatctctcctctaagacgtgttaaccaggctatcttcttgattaccactggtgctcgtgaagctgctttcagaaacatcaagactatagctgagtgccttgctgatgaattgatcaacgcagccaagggctcttccaacagctatgccatcaagaagaaggatgagattgaaagagttgccaaggctaatcgttaaggattttccctttgccctgtgcgttacaatctcgtatcaatgagtttaatgttttatcttcatttagattgaaatatgtatctcagatgtttgctcttttgttttatgaagtttatttcgtct

SEQ ID NO: 74484 - protein, 244 aa, Arabidopsis thaliana; identical to SEQ ID NO: 21372
  peptide (1)..(244): Ceres Seq. ID no. 5677607
  misc_feature: Pfam Name: Ribosomal_S7 Pfam Description: Ribosomal protein S7p/S5e
  misc_feature (38)..(244): Homolog of NCBI NO: 15229897 NR Description: 40S ribosomal protein S5, putative; protein id: supported by cDNA: 29782., supported by cDNA: gi_15027978, by cDNA: gi_20259198 [Arabidopsis thaliana]
  misc_feature (38)..(244): Homolog of NCBI NO: 15228111 NR Description: 40S ribosomal protein S5; protein id: supported by cDNA: 8397., supported by cDNA: gi_16648958, by cDNA: gi_20148680 [Arabidopsis thaliana]
  misc_feature (38)..(244): Homolog of NCBI NO: 21617886 NR Description: 40S ribosomal protein S5 [Arabidopsis thaliana]
  misc_feature (55)..(244): Homolog of NCBI NO: 6831665 NR Description: 40S RIBOSOMAL PROTEIN S5
  misc_feature (46)..(244): Homolog of NCBI NO: 34893994 NR Description: putative 40S ribosomal protein S5 [Oryza sativa
  misc_feature (38)..(244): Homolog of NCBI NO: 40748265 NR Description: 40S ribosomal protein S5 [Capsicum annuum]
  misc_feature (51)..(244): Homolog of NCBI NO: 32400987 NR Description: 40S ribosome protein S5 [Griffithsia japonica]
  misc_feature (36)..(244): Homolog of NCBI NO: 13904870 NR Description: ribosomal protein S5; 40S ribosomal protein S5 sapiens] >gi|22002064|sp|P46782|RS5_HUMAN 40S ribosomal protein >gi|15929961|gb|AAH15405.1|AAH15405 ribosomal protein S5 [Homo
  misc_feature (42)..(244): Homolog of NCBI NO: 15294021 NR Description: 40S ribosomal protein S5 [Ictalurus punctatus]
  misc_feature (51)..(244): Homolog of NCBI NO: 3717978 NR Description: 5S ribosomal protein [Mus musculus] unnamed protein product [Mus musculus] unnamed protein product [Mus musculus]

SEQ ID NO: 74485 - protein, 207 aa, Arabidopsis thaliana [sequence omitted]

SEQ ID NO: 74486 - protein, 128 aa, Arabidopsis thaliana; identical to SEQ ID NO: 21374
  peptide (1)..(128): Ceres Seq. ID no. 5677609
  misc_feature: Pfam Name: Ribosomal_S7 Pfam Description: Ribosomal protein S7p/S5e
  misc_feature (1)..(128): Homolog of NCBI NO: 15229897 NR Description: 40S ribosomal protein S5, putative; protein id: supported by cDNA: 29782., supported by cDNA: gi_15027978, by cDNA: gi_20259198 [Arabidopsis thaliana]
  misc_feature (1)..(128): Homolog of NCBI NO: 15228111 NR Description: 40S ribosomal protein S5; protein id: supported by cDNA: 8397., supported by cDNA: gi_16648958, by cDNA: gi_20148680 [Arabidopsis thaliana]
  misc_feature (1)..(128): Homolog of NCBI NO: 21617886 NR Description: 40S ribosomal protein S5 [Arabidopsis thaliana]
  misc_feature (1)..(128): Homolog of NCBI NO: 6831665 NR Description: 40S RIBOSOMAL PROTEIN S5
  misc_feature (1)..(128): Homolog of NCBI NO: 34893994 NR Description: putative 40S ribosomal protein S5 [Oryza sativa
  misc_feature (1)..(128): Homolog of NCBI NO: 40748265 NR Description: 40S ribosomal protein S5 [Capsicum annuum]
  misc_feature (1)..(128): Homolog of NCBI NO: 32400987 NR Description: 40S ribosome protein S5 [Griffithsia japonica]
  misc_feature (1)..(128): Homolog of NCBI NO: 13904870 NR Description: ribosomal protein S5; 40S ribosomal protein S5 sapiens] >gi|22002064|sp|P46782|RS5_HUMAN 40S ribosomal protein >gi|15929961|gb|AAH15405.1|AAH15405 ribosomal protein S5 [Homo
  misc_feature (1)..(128): Homolog of NCBI NO: 15294021 NR Description: 40S ribosomal protein S5 [Ictalurus punctatus]
  misc_feature (1)..(128): Homolog of NCBI NO: 3717978 NR Description: 5S ribosomal protein [Mus musculus] unnamed protein product [Mus musculus] unnamed protein product [Mus musculus]

SEQ ID NO: 74487 - DNA, 1236 bp, Arabidopsis thaliana
  misc_feature (1)..(1236): Ceres Seq. ID no. 5677698
  misc_feature: MA Experiment ID: 108434 Result: Up-regulated in Transcription
  misc_feature: MA Experiment 108434 PARAMETER Experiment Name: At_Root_Tips_cDNA_P Parameter: Tissue Value: Root Tips
  misc_feature: MA Experiment ID: 108573 Result: Up-regulated in Transcription
  misc_feature: MA Experiment 108573 PARAMETER Experiment Name: At_Drought_cDNA_P Parameter: Timepoint (hr) Value: 6
  misc_feature: MA Experiment 108573 PARAMETER Experiment Name: At_Drought_cDNA_P Parameter: Tissue Value: Aerial
  misc_feature: MA Experiment 108573 PARAMETER Experiment Name: At_Drought_cDNA_P Parameter: Treatment Value: Drought vs. No Drought
  misc_feature: MA Experiment ID: 108579 Result: Down-regulated in Transcription
  misc_feature: MA Experiment 108579 PARAMETER Experiment Name: At_4deg_Cold_cDNA_P Parameter: Temperature (deg C) Value: 4 vs. 22
  misc_feature: MA Experiment 108579 PARAMETER Experiment Name: At_4deg_Cold_cDNA_P Parameter: Timepoint (hr) Value: 6
  misc_feature: MA Experiment 108579 PARAMETER Experiment Name: At_4deg_Cold_cDNA_P Parameter: Tissue Value: Aerial
  misc_feature: MA Experiment ID: 20000224 Result: Down-regulated in Transcription
  misc_feature: Pfam Name: Peptidase_M24 Pfam Description: metallopeptidase family M24
acaacttttatattttactctgctgcttcgagatcaacgcattaaaagtaatggagtacattaagaatatttcgattttaaggggttgaagttgtaattttgaagaagtggaagatcaatcaaaaataatagaagaacagagacgacgaaacctgccggagaactgaggggagaaaaaaacccggcgaaaaagggaaattcgaattcgtcttctgttgatcattgcttcacttctgcttccagagcttttactcagaagaagctcgctgatctcaaatctctctttttttccctcgcttccaagtctcagagcaatgaccaatacgtctcgtaccctgttttccaggagtattttggtctgagtggttctttaggagaaaggatctttgatatggttactcaacacaggaaagatgataaaatgacttttgaagatcttgttattgctaaggcaacatacgagaaaggaactgatgatgagattgctgagtttatttaccagactttggatgttaatggcaatggggtcttgagaaggtctgatttagagtcgttcctggtggtgattttgaagagtgtgttctccactgagagttctgatgcggaatcaagtgattacaaggagatggtagatgcgctactcgatgccgctactttctcaaaatctgatgatggttctgaaaaaggaatgtcttttgaagacttcagaagctggtgcccactcgttccaactatcagaaagttcctcggcagcttgcttattcccccgggtccagtgagacctggatatcaagtcccggatctgctatatgaagatagtgtgagttcagataggctactattaaagaaggaatacgcttggcatattggaggagctcttcctcaccacgagcttgtagagtggaagctgttgtatcgcagttccttacacggtcaaagcttcaacacattcctcggacacacatcggggatggagggatcgaacatggcctgatggatggactgcagttaccgcagatggaaaacgcagcgctcagtttgagcataccctattggtaactgagactggtgttgaggttttaacagcgaggcttccttcatcgcctgacgtatacccttggcttaccaagtgattaagtgtttggttcctttttggttgtgattcattgggtttgattcttaaacttgggaataatagtgtcatctttttgccattatagaccatttgatgttgtt

SEQ ID NO: 74488 - protein, 200 aa, Arabidopsis thaliana; identical to SEQ ID NO: 23935
  peptide (1)..(200): Ceres Seq. ID no. 5677699
  misc_feature: Pfam Name: Peptidase_M24 Pfam Description: metallopeptidase family M24
  misc_feature (1)..(200): Homolog of NCBI NO: 22329148 NR Description: putative protein; protein id: At4g34070.1
  misc_feature (1)..(197): Homolog of NCBI NO: 15239986 NR Description: putative protein; protein id: At5g06260.1, by cDNA: gi_15292792, supported by cDNA: gi_20258858 [Arabidopsis
  misc_feature (1)..(128): Homolog of NCBI NO: 7486284 NR Description: hypothetical protein F28A23.170 - Arabidopsis >gi|2911055|emb|CAA17565.1| putative protein [Arabidopsis >gi|7270356|emb|CAB80124.1| putative protein [Arabidopsis
  misc_feature (79)..(200): Homolog of NCBI NO: 17065420 NR Description: Unknown protein [Arabidopsis thaliana]
  misc_feature (1)..(24): Homolog of NCBI NO: 30690004 NR Description: hypothetical protein [Arabidopsis thaliana]
  misc_feature (1)..(24): Homolog of NCBI NO: 25408950 NR Description: hypothetical protein At2g45380 [imported] - thaliana >gi|2583116|gb|AAB82625.1| unknown protein [Arabidopsis

SEQ ID NO: 74489 - protein, 190 aa, Arabidopsis thaliana; identical to SEQ ID NO: 23936
  peptide (1)..(190): Ceres Seq. ID no. 5677700
  misc_feature: Pfam Name: Peptidase_M24 Pfam Description: metallopeptidase family M24
  misc_feature (1)..(190): Homolog of NCBI NO: 22329148 NR Description: putative protein; protein id: At4g34070.1
  misc_feature (1)..(187): Homolog of NCBI NO: 15239986 NR Description: putative protein; protein id: At5g06260.1, by cDNA: gi_15292792, supported by cDNA: gi_20258858 [Arabidopsis
  misc_feature (1)..(118): Homolog of NCBI NO: 7486284 NR Description: hypothetical protein F28A23.170 - Arabidopsis >gi|2911055|emb|CAA17565.1| putative protein [Arabidopsis >gi|7270356|emb|CAB80124.1| putative protein [Arabidopsis
  misc_feature (69)..(190): Homolog of NCBI NO: 17065420 NR Description: Unknown protein [Arabidopsis thaliana]
  misc_feature (1)..(14): Homolog of NCBI NO: 30690004 NR Description: hypothetical protein [Arabidopsis thaliana]
  misc_feature (1)..(14): Homolog of NCBI NO: 25408950 NR Description: hypothetical protein At2g45380 [imported] - thaliana >gi|2583116|gb|AAB82625.1| unknown protein [Arabidopsis

SEQ ID NO: 74490 - protein, 122 aa, Arabidopsis thaliana; identical to SEQ ID NO: 23937
  peptide (1)..(122): Ceres Seq. ID no. 5677701
  misc_feature: Pfam Name: Peptidase_M24 Pfam Description: metallopeptidase family M24
  misc_feature (1)..(122): Homolog of NCBI NO: 22329148 NR Description: putative protein; protein id: At4g34070.1
  misc_feature (1)..(119): Homolog of NCBI NO: 15239986 NR Description: putative protein; protein id: At5g06260.1, by cDNA: gi_15292792, supported by cDNA: gi_20258858 [Arabidopsis
  misc_feature (1)..(50): Homolog of NCBI NO: 7486284 NR Description: hypothetical protein F28A23.170 - Arabidopsis >gi|2911055|emb|CAA17565.1| putative protein [Arabidopsis >gi|7270356|emb|CAB80124.1| putative protein [Arabidopsis
  misc_feature (1)..(122): Homolog of NCBI NO: 17065420 NR Description: Unknown protein [Arabidopsis thaliana]

SEQ ID NO: 74491 - DNA, 1100 bp, Arabidopsis thaliana
  misc_feature (1)..(1100): Ceres Seq. ID no. 5677706
  misc_feature: MA Experiment ID: 108576 Result: Down-regulated in Transcription
  misc_feature: MA Experiment 108576 PARAMETER Experiment Name: At_42deg_Heat_cDNA_P Parameter: Temperature (deg C) Value: 42 vs. 22
  misc_feature: MA Experiment 108576 PARAMETER Experiment Name: At_42deg_Heat_cDNA_P Parameter: Timepoint (hr) Value: 1
  misc_feature: MA Experiment 108576 PARAMETER Experiment Name: At_42deg_Heat_cDNA_P Parameter: Tissue Value: Aerial
  misc_feature: MA Experiment ID: 108577 Result: Down-regulated in Transcription
  misc_feature: MA Experiment 108577 PARAMETER Experiment Name: At_42deg_Heat_cDNA_P Parameter: Temperature (deg C) Value: 42 vs. 22
  misc_feature: MA Experiment 108577 PARAMETER Experiment Name: At_42deg_Heat_cDNA_P Parameter: Timepoint (hr) Value: 6
  misc_feature: MA Experiment 108577 PARAMETER Experiment Name: At_42deg_Heat_cDNA_P Parameter: Tissue Value: Aerial
  misc_feature: MA Experiment ID: 108579 Result: Down-regulated in Transcription
  misc_feature: MA Experiment 108579 PARAMETER Experiment Name: At_4deg_Cold_cDNA_P Parameter: Temperature (deg C) Value: 4 vs. 22
  misc_feature: MA Experiment 108579 PARAMETER Experiment Name: At_4deg_Cold_cDNA_P Parameter: Timepoint (hr) Value: 6
  misc_feature: MA Experiment 108579 PARAMETER Experiment Name: At_4deg_Cold_cDNA_P Parameter: Tissue Value: Aerial
  misc_feature: MA Experiment ID: 20000224 Result: Down-regulated in Transcription
  misc_feature: MA Experiment ID: 20000495 Result: Up-regulated in Transcription
  misc_feature: MA Experiment 20000495 PARAMETER Experiment Name: At_Guard_Cells_P Parameter: Harvest Date Value: 8/2/2002
  misc_feature: MA Experiment 20000495 PARAMETER Experiment Name: At_Guard_Cells_P Parameter: Organism Value: A. thaliana
  misc_feature: MA Experiment 20000495 PARAMETER Experiment Name: At_Guard_Cells_P Parameter: Tissue Value: Guard Cells vs. Leaves
gactcttgtaatagtataaaattttattgaataattcatctgtagacaagggggaaaagaaagactgattttacgctttattgctctcactaaaaccctaattctctccgtctcgatcgcgacctctgtttcttcggcaatggcggattctcctcaaagaagaagggattcacgatctccttcaccccgaaaagaacgagctagatccagatccaggtctaggtccaggtctagatccaggcccaggcttaggtccaggtcaagatctttgccaaggcctgtttctccatcacgaagccgtggaaggtcaaggtcaagaagccgtggaagaagtgaagttgaaaaccctggtaccactctctatgtgactggcctatctacaagagtcactgacaaggatcttgaagcacatttcgccaaggaaggaaaggttgcgtcttgttttcttgtgatggagccgcgcacccgtgtgtctcgtggttttgcctttgttacaatgagcagccttaaagatgctgagcggtgcattaaatatctcaaccagtctgtactagaaggccgataataactgtggaaaggtccaggagaaagcgcccgagaactcccaccccaggccactatcttggcttgaaaagctccagagacagcgatcgagaaggccgtagcagtcgagggaggcactatgatcgtgatgattacagagaccgtaggtcaccaagacgcgactattcacctcgtgatgaaagaaggtctagaagagatcggtcttactctcctcatggaagaagcccagagagaagatcagagagaaggtctgagaggtcagagagaaggtatgaaccccgtggctcgagatgacctgttttcatccttttgacaaaggattcaaaaacttctctgttgatttaggttgtgtaattgatcatccttaaaatagcacaaagattctgtcaggcaacgctttgggtttcatttattttctgttgttaacgtgttattctgtcggaactctctgaagtgaaaactaaaaactgtaatagcttctctgttatgtctctactctacttgtttttgaatgaatcagaatatcttatgtgatt

SEQ ID NO: 74492 - protein, 141 aa, Arabidopsis thaliana
  peptide (1)..(141): Ceres Seq. ID no. 5677707
  misc_feature (74)..(141): Pfam Name: RNA recognition motif. (a.k.a. RRM, RBD, or RNP domain) Pfam Description: RNA recognition motif. (a.k.a. RRM, RBD, or RNP
  misc_feature (1)..(104): Homolog of NCBI NO: 7486399 NR Description: hypothetical protein F4B14.60 - Arabidopsis >gi|3805845|emb|CAA21465.1| putative protein [Arabidopsis >gi|7270531|emb|CAB81488.1| putative protein [Arabidopsis
  misc_feature (9)..(97): Homolog of NCBI NO: 22329196 NR Description: similar to transformer serine/arginine-rich
  misc_feature (1)..(141): Homolog of NCBI NO: 7489207 NR Description: transformer-SR ribonucleoprotein - common tobacco
  misc_feature (1)..(141): Homolog of NCBI NO: 11275253 NR Description: transformer-2-like protein - liverwort
  misc_feature (1)..(141): Homolog of NCBI NO: 40253470 NR Description: putative transformer-SR ribonucleoprotein [Oryza
  misc_feature (51)..(141): Homolog of NCBI NO: 34902002 NR Description: putative transformer serine/arginine-rich
  misc_feature (17)..(141): Homolog of NCBI NO: 28973767 NR Description: putative transformer-SR ribonucleoprotein
  misc_feature (25)..(141): Homolog of NCBI NO: 18390758 NR Description: transformer serine/arginine-rich putative; protein id: At1g07350.1, supported by cDNA: gi_15292732
  misc_feature (65)..(141): Homolog of NCBI NO: 8778550 NR Description: F22G5.31 [Arabidopsis thaliana]
  misc_feature (25)..(141): Homolog of NCBI NO: 30680096 NR Description: transformer serine/arginine-rich putative [Arabidopsis thaliana] >gi|15450753|gb|AAK96648.1|
MADSPQRRRDSRSPSPRKERARSRSRSRSRSRSRPRLRSRSRSLPRPVSPSRSRGRSRSRSRGRSEVENPGTTLYVTGLSTRVTDKDLEAHFAKEGKVASCFLVMEPRTRVSRGFAFVTMSSLKDAERCIKYLNQSVLEGR

SEQ ID NO: 74493 - DNA, 1244 bp, Arabidopsis thaliana
  misc_feature (1)..(1244): Ceres Seq. ID no. 5677741
  misc_feature: MA Experiment ID: 108434 Result: Up-regulated in Transcription
  misc_feature: MA Experiment 108434 PARAMETER Experiment Name: At_Root_Tips_cDNA_P Parameter: Tissue Value: Root Tips
  misc_feature: MA Experiment ID: 108595 Result: Down-regulated in Transcription
  misc_feature: MA Experiment 108595 PARAMETER Experiment Name: At_Ler-pi_Ovule_cDNA_P Parameter: Plant Line Value: null
  misc_feature: MA Experiment ID: 20000113 Result: Up-regulated in Transcription
  misc_feature: MA Experiment 20000113 PARAMETER Experiment Name: At_42deg_Heat_cDNA_P Parameter: Temperature (deg C) Value: 42 vs. 22
  misc_feature: MA Experiment 20000113 PARAMETER Experiment Name: At_42deg_Heat_cDNA_P Parameter: Timepoint (hr) Value: 8
  misc_feature: MA Experiment 20000113 PARAMETER Experiment Name: At_42deg_Heat_cDNA_P Parameter: Tissue Value: Aerial
  misc_feature: MA Experiment ID: 20000184 Result: Up-regulated in Transcription
  misc_feature: MA Experiment 20000184 PARAMETER Experiment Name: At_Shoots__P Parameter: Age (day) Value: 7
  misc_feature: MA Experiment 20000184 PARAMETER Experiment Name: At_Shoots__P Parameter: Tissue Value: Shoots vs. Whole Plant
  misc_feature: MA Experiment ID: 20000227 Result: Down-regulated in Transcription
  misc_feature: MA Experiment 20000227 PARAMETER Experiment Name: At_Root-Tips-vs-Tops_P Parameter: Tissue Value: Root Tips vs. Root Tops
  misc_feature: MA Experiment ID: 20000234 Result: Up-regulated in Transcription
  misc_feature: MA Experiment 20000234 PARAMETER Experiment Name: At_Siliques_P Parameter: Age (day) Value: 21
  misc_feature: MA Experiment 20000234 PARAMETER Experiment Name: At_Siliques_P Parameter: Organism Value: A. thaliana
  misc_feature: MA Experiment 20000234 PARAMETER Experiment Name: At_Siliques_P Parameter: Plant Line Value: WS
  misc_feature: MA Experiment 20000234 PARAMETER Experiment Name: At_Siliques_P Parameter: Tissue Value: Less Than 5mm Siliques vs. Whole Plant
  misc_feature: MA Experiment ID: 20000437 Result: Down-regulated in Transcription
  misc_feature: MA Experiment 20000437 PARAMETER Experiment Name: At_Drought_P Parameter: Age (day) Value: 8
  misc_feature: MA Experiment 20000437 PARAMETER Experiment Name: At_Drought_P Parameter: Organism Value: A. thaliana
  misc_feature: MA Experiment 20000437 PARAMETER Experiment Name: At_Drought_P Parameter: Plant Line Value: WS
  misc_feature: MA Experiment 20000437 PARAMETER Experiment Name: At_Drought_P Parameter: Timepoint (hr) Value: 24
  misc_feature: MA Experiment 20000437 PARAMETER Experiment Name: At_Drought_P Parameter: Tissue Value: Whole Plant
  misc_feature: MA Experiment 20000437 PARAMETER Experiment Name: At_Drought_P Parameter: Treatment Value: Drought vs. No Drought
  misc_feature: MA Experiment ID: 20000438 Result: Up-regulated in Transcription
  misc_feature: MA Experiment 20000438 PARAMETER Experiment Name: At_Shoots__P Parameter: Age (day) Value: 14
  misc_feature: MA Experiment 20000438 PARAMETER Experiment Name: At_Shoots__P Parameter: Tissue Value: Shoots vs. Whole Plant
  misc_feature: MA Experiment ID: 20001757 Result: Up-regulated in Transcription
  misc_feature: MA Experiment 20001757 PARAMETER Experiment Name: At_50mM_NH4NO3_L-to-H_P Parameter: Timepoint (hr) Value: 6
  misc_feature: MA Experiment 20001757 PARAMETER Experiment Name: At_50mM_NH4NO3_L-to-H_P Parameter: Tissue Value: Leaf
  misc_feature: MA Experiment 20001757 PARAMETER Experiment Name: At_50mM_NH4NO3_L-to-H_P Parameter: Treatment Value: 50mM NH4NO3 vs 100mM Mannitol
  misc_feature: Pfam Name: Mito_carr Pfam Description: Mitochondrial carrier protein
gtgtatgatgttttgtatattgttgcttctcttgctttacttgtttggtttgggatttcttctctgttttttcttggtgaattttgcgtttcgcttaaaaatgagtgaaattgatttggtgaaattaggtcagaggcgtttctcatggctcctcttactctctccgttgatgtgaagagctcttcagcgacctctcatgatgtttcgaagagggtaatgcagagttcacagctcaaaataaacaaaggcttttttgcatctgttaatacacaagaagataaaccctttgatttcttccgcactctctttgaggggtttatagcaggaggtacagctggagttgtagttgaaacagctttatacccaattgatactattaagactagacttcagctcgtggaggtggaaaaattgttttgaagggtctttattcaggattagctggaaatatcgctggtgtcttaccggcttcggctttatttgttggagtttacgaacccacaaagcagaaactgctgaagacctttcctgatcatttaagcgcagttgctcacctgactgcaggggccatcggtggacttgctgcatctctgattcgagtgcctacagaggttgtgaagcaaagaatgcagaccggacagtttacatcagctcccagtgctgttcgaatgattgcatcaaaagagggatttaggggtctctatgcaggataccggtccttccttttgcgagatttgccatttgatgctatacagttctgcatatatgagcagctttgcttggggtataaaaaagccgcgcgtagagagcttagtgatcctgagaacgctctaatcggtgcatttgctggtgctctgaccggagcagtcaccactccgcttgatgttattaagacaagattaatggttcagggatcagccaaacaatatcaaggaatcgttgactgtgttcaaacaattgtaagagaggaaggagctcctgctctcttaaagggtattgggccaagagtgttgtggataggtattggaggatcaatcttctttggtgtcctcgagagcactaagagaacacttgcacagagacgtcccaatacggttaaagaaaccaaagaagaataagtttctggccgcacaagaaaatgagtgtaaggtgacaatgtaacccctttgtgagttctatgtggtgtgagtttgtttaagtaccaattcaactttcattaaaaaaaaataaaaaaattagtgttc

SEQ ID NO: 74494 - protein, 163 aa, Arabidopsis thaliana; identical to SEQ ID NO: 38572
  peptide (1)..(163): Ceres Seq. ID no. 5677742
  misc_feature: Pfam Name: Mito_carr Pfam Description: Mitochondrial carrier protein
  misc_feature (1)..(122): Homolog of NCBI NO: 7486053 NR Description: hypothetical protein F23K16.90 - Arabidopsis
  misc_feature (1)..(163): Homolog of NCBI NO: 18420458 NR Description: mitochondrial carrier protein family; protein id: supported by cDNA: 32654., supported by cDNA: gi_15028274, by cDNA: gi_19310698 [Arabidopsis thaliana]
  misc_feature (1)..(158): Homolog of NCBI NO: 34394981 NR Description: mitochondrial aspartate-glutamate carrier
  misc_feature (1)..(152): Homolog of NCBI NO: 18399114 NR Description: allinase, putative; protein id: At1g34065.1
  misc_feature (1)..(151): Homolog of NCBI NO: 27754081 NR Description: RIKEN cDNA 4930433D19; expressed sequence [Mus musculus] >gi|22477482|gb|AAH37142.1| Unknown (protein for
  misc_feature (1)..(149): Homolog of NCBI NO: 31208625 NR Description: ENSANGP00000011068 [Anopheles gambiae]
  misc_feature (1)..(149): Homolog of NCBI NO: 24650120 NR Description: CG4743-PA [Drosophila melanogaster]
  misc_feature (1)..(144): Homolog of NCBI NO: 3171731 NR Description: AgPET8 [Eremothecium gossypii]
  misc_feature (1)..(140): Homolog of NCBI NO: 19115553 NR Description: agpet8 protein. [Schizosaccharomyces pombe]
  misc_feature (1)..(154): Homolog of NCBI NO: 6324325 NR Description: Member of family of mitochondrial carrier Pet8p [Saccharomyces cerevisiae] >gi|730302|sp|P38921|PET8_YEAST

SEQ ID NO: 74495 - protein, 149 aa, Arabidopsis thaliana; identical to SEQ ID NO: 38573
  peptide (1)..(149): Ceres Seq. ID no. 5677743
  misc_feature: Pfam Name: Mito_carr Pfam Description: Mitochondrial carrier protein
  misc_feature (1)..(108): Homolog of NCBI NO: 7486053 NR Description: hypothetical protein F23K16.90 - Arabidopsis
  misc_feature (1)..(149): Homolog of NCBI NO: 18420458 NR Description: mitochondrial carrier protein family; protein id: supported by cDNA: 32654., supported by cDNA: gi_15028274, by cDNA: gi_19310698 [Arabidopsis thaliana]
  misc_feature (1)..(144): Homolog of NCBI NO: 34394981 NR Description: mitochondrial aspartate-glutamate carrier
  misc_feature (1)..(138): Homolog of NCBI NO: 18399114 NR Description: allinase, putative; protein id: At1g34065.1
  misc_feature (1)..(137): Homolog of NCBI NO: 27754081 NR Description: RIKEN cDNA 4930433D19; expressed sequence [Mus musculus] >gi|22477482|gb|AAH37142.1| Unknown (protein for
  misc_feature (1)..(135): Homolog of NCBI NO: 31208625 NR Description: ENSANGP00000011068 [Anopheles gambiae]
  misc_feature (1)..(135): Homolog of NCBI NO: 24650120 NR Description: CG4743-PA [Drosophila melanogaster]
  misc_feature (1)..(130): Homolog of NCBI NO: 3171731 NR Description: AgPET8 [Eremothecium gossypii]
  misc_feature (1)..(126): Homolog of NCBI NO: 19115553 NR Description: agpet8 protein. [Schizosaccharomyces pombe]
  misc_feature (1)..(140): Homolog of NCBI NO: 6324325 NR Description: Member of family of mitochondrial carrier Pet8p [Saccharomyces cerevisiae] >gi|730302|sp|P38921|PET8_YEAST

SEQ ID NO: 74496 - protein, 91 aa, Arabidopsis thaliana
  peptide (1)..(91): Ceres Seq. ID no. 5677744
  misc_feature: Pfam Name: Mito_carr Pfam Description: Mitochondrial carrier protein
  misc_feature (1)..(83): Homolog of NCBI NO: 7486053 NR Description: hypothetical protein F23K16.90 - Arabidopsis
  misc_feature (1)..(83): Homolog of NCBI NO: 18420458 NR Description: mitochondrial carrier protein family; protein id: supported by cDNA: 32654., supported by cDNA: gi_15028274, by cDNA: gi_19310698 [Arabidopsis thaliana]
  misc_feature (44)..(83): Homolog of NCBI NO: 34394981 NR Description: mitochondrial aspartate-glutamate carrier
  misc_feature (7)..(91): Homolog of NCBI NO: 18399114 NR Description: allinase, putative; protein id: At1g34065.1
  misc_feature (59)..(83): Homolog of NCBI NO: 27754081 NR Description: RIKEN cDNA 4930433D19; expressed sequence [Mus musculus] >gi|22477482|gb|AAH37142.1| Unknown (protein for
  misc_feature (55)..(83): Homolog of NCBI NO: 31208625 NR Description: ENSANGP00000011068 [Anopheles gambiae]
  misc_feature (39)..(83): Homolog of NCBI NO: 24650120 NR Description: CG4743-PA [Drosophila melanogaster]
  misc_feature (53)..(83): Homolog of NCBI NO: 3171731 NR Description: AgPET8 [Eremothecium gossypii]
  misc_feature (53)..(83): Homolog of NCBI NO: 19115553 NR Description: agpet8 protein. [Schizosaccharomyces pombe]
  misc_feature (53)..(83): Homolog of NCBI NO: 6324325 NR Description: Member of family of mitochondrial carrier Pet8p [Saccharomyces cerevisiae] >gi|730302|sp|P38921|PET8_YEAST
MAPLTLSVDVKSSSATSHDVSKRVMQSSQLKINKGFFASVNTQEDKPFDFFRTLFEGFIAGGTAGVVVETALYPIDTIKTRLQLVEVEKLF

SEQ ID NO: 74497 - DNA, 1111 bp, Arabidopsis thaliana
  misc_feature (1)..(1111): Ceres Seq. ID no. 5677751
  misc_feature: MA Experiment ID: 108434 Result: Down-regulated in Transcription
  misc_feature: MA Experiment 108434 PARAMETER Experiment Name: At_Root_Tips_cDNA_P Parameter: Tissue Value: Root Tips
  misc_feature: MA Experiment ID: 108488 Result: Down-regulated in Transcription
  misc_feature: MA Experiment ID: 108574 Result: Up-regulated in Transcription
  misc_feature: MA Experiment 108574 PARAMETER Experiment Name: At_Wounding__cDNA_P Parameter: Timepoint (hr) Value: 1
  misc_feature: MA Experiment 108574 PARAMETER Experiment Name: At_Wounding__cDNA_P Parameter: Tissue Value: Aerial
  misc_feature: MA Experiment 108574 PARAMETER Experiment Name: At_Wounding__cDNA_P Parameter: Treatment Value: Wounding vs. No Wounding
  misc_feature: MA Experiment ID: 108595 Result: Up-regulated in Transcription
  misc_feature: MA Experiment 108595 PARAMETER Experiment Name: At_Ler-pi_Ovule_cDNA_P Parameter: Plant Line Value: null
  misc_feature: MA Experiment ID: 20000069 Result: Up-regulated in Transcription
  misc_feature: MA Experiment 20000069 PARAMETER Experiment Name: At_100uM_ABA_Mutants_cDNA_P Parameter: Plant Line Value: CS23
  misc_feature: MA Experiment 20000069 PARAMETER Experiment Name: At_100uM_ABA_Mutants_cDNA_P Parameter: Timepoint (hr) Value: 6
  misc_feature: MA Experiment 20000069 PARAMETER Experiment Name: At_100uM_ABA_Mutants_cDNA_P Parameter: Tissue Value: Aerial
  misc_feature: MA Experiment 20000069 PARAMETER Experiment Name: At_100uM_ABA_Mutants_cDNA_P Parameter: Treatment Value: 100uM ABA vs. No Treatment
  misc_feature: MA Experiment ID: 20000185 Result: Up-regulated in Transcription
  misc_feature: MA Experiment 20000185 PARAMETER Experiment Name: At_Roots__P Parameter: Age (day) Value: 7 vs. 21
  misc_feature: MA Experiment 20000185 PARAMETER Experiment Name: At_Roots__P Parameter: Organism Value: A. thaliana
  misc_feature: MA Experiment 20000185 PARAMETER Experiment Name: At_Roots__P Parameter: Tissue Value: Roots vs. Whole Plant
  misc_feature: MA Experiment ID: 20000265 Result: Up-regulated in Transcription
  misc_feature: MA Experiment 20000265 PARAMETER Experiment Name: At_Open_Flower_P Parameter: Age (day) Value: 21
  misc_feature: MA Experiment 20000265 PARAMETER Experiment Name: At_Open_Flower_P Parameter: Plant Line Value: WS
  misc_feature: MA Experiment 20000265 PARAMETER Experiment Name: At_Open_Flower_P Parameter: Tissue Value: Closed Flower vs. Whole Plant
  misc_feature: MA Experiment ID: 20000286 Result: Up-regulated in Transcription
  misc_feature: MA Experiment 20000286 PARAMETER Experiment Name: At_Open_Flower_P Parameter: Age (day) Value: 21
  misc_feature: MA Experiment 20000286 PARAMETER Experiment Name: At_Open_Flower_P Parameter: Plant Line Value: WS
  misc_feature: MA Experiment 20000286 PARAMETER Experiment Name: At_Open_Flower_P Parameter: Tissue Value: Half Open vs. Whole Plant
  misc_feature: MA Experiment ID: 20000437 Result: Up-regulated in Transcription
  misc_feature: MA Experiment 20000437 PARAMETER Experiment Name: At_Drought_P Parameter: Age (day) Value: 8
  misc_feature: MA Experiment 20000437 PARAMETER Experiment Name: At_Drought_P Parameter: Organism Value: A. thaliana
  misc_feature: MA Experiment 20000437 PARAMETER Experiment Name: At_Drought_P Parameter: Plant Line Value: WS
  misc_feature: MA Experiment 20000437 PARAMETER Experiment Name: At_Drought_P Parameter: Timepoint (hr) Value: 24
  misc_feature: MA Experiment 20000437 PARAMETER Experiment Name: At_Drought_P Parameter: Tissue Value: Whole Plant
  misc_feature: MA Experiment 20000437 PARAMETER Experiment Name: At_Drought_P Parameter: Treatment Value: Drought vs. No Drought
  misc_feature: MA Experiment ID: 20000439 Result: Up-regulated in Transcription
  misc_feature: MA Experiment 20000439 PARAMETER Experiment Name: At_Roots__P Parameter: Age (day) Value: 14 vs. 21
  misc_feature: MA Experiment 20000439 PARAMETER Experiment Name: At_Roots__P Parameter: Organism Value: A. thaliana
  misc_feature: MA Experiment 20000439 PARAMETER Experiment Name: At_Roots__P Parameter: Tissue Value: Roots vs. Whole Plant
  misc_feature: MA Experiment ID: 20001556 Result: Up-regulated in Transcription
  misc_feature: MA Experiment 20001556 PARAMETER Experiment Name: At_Drought_Soil_Dry_P Parameter: Age (day) Value: 26
  misc_feature: MA Experiment 20001556 PARAMETER Experiment Name: At_Drought_Soil_Dry_P Parameter: Organism Value: A. thaliana
  misc_feature: MA Experiment 20001556 PARAMETER Experiment Name: At_Drought_Soil_Dry_P Parameter: Plant Line Value: WS
  misc_feature: MA Experiment 20001556 PARAMETER Experiment Name: At_Drought_Soil_Dry_P Parameter: Post Timepoint (hr) Value: None
  misc_feature: MA Experiment 20001556 PARAMETER Experiment Name: At_Drought_Soil_Dry_P Parameter: Post-Treatment Value: None
  misc_feature: MA Experiment 20001556 PARAMETER Experiment Name: At_Drought_Soil_Dry_P Parameter: Timepoint (day) Value: 12
  misc_feature: MA Experiment 20001556 PARAMETER Experiment Name: At_Drought_Soil_Dry_P Parameter: Treatment Value: Drought vs. No Drought
  misc_feature: MA Experiment ID: 20001757 Result: Down-regulated in Transcription
  misc_feature: MA Experiment 20001757 PARAMETER Experiment Name: At_50mM_NH4NO3_L-to-H_P Parameter: Timepoint (hr) Value: 6
  misc_feature: MA Experiment 20001757 PARAMETER Experiment Name: At_50mM_NH4NO3_L-to-H_P Parameter: Tissue Value: Leaf
  misc_feature: MA Experiment 20001757 PARAMETER Experiment Name: At_50mM_NH4NO3_L-to-H_P Parameter: Treatment Value: 50mM NH4NO3 vs 100mM Mannitol
  misc_feature: MA Experiment ID: 20001904 Result: Up-regulated in Transcription
  misc_feature: MA Experiment 20001904 PARAMETER Experiment Name: At_Drought_Reproduction_P Parameter: Age (day) Value: 37
  misc_feature: MA Experiment 20001904 PARAMETER Experiment Name: At_Drought_Reproduction_P Parameter: Organism Value: A. thaliana
  misc_feature: MA Experiment 20001904 PARAMETER Experiment Name: At_Drought_Reproduction_P Parameter: Plant Line Value: WS
  misc_feature: MA Experiment 20001904 PARAMETER Experiment Name: At_Drought_Reproduction_P Parameter: Timepoint (day) Value: 7
  misc_feature: MA Experiment 20001904 PARAMETER Experiment Name: At_Drought_Reproduction_P Parameter: Tissue Value: Rosettes
  misc_feature: MA Experiment 20001904 PARAMETER Experiment Name: At_Drought_Reproduction_P Parameter: Treatment Value: Drought vs. No Drought
  misc_feature: MA Experiment ID: 20001905 Result: Up-regulated in Transcription
  misc_feature: MA Experiment 20001905 PARAMETER Experiment Name: At_Drought_Reproduction_P Parameter: Age (day) Value: 40
  misc_feature: MA Experiment 20001905 PARAMETER Experiment Name: At_Drought_Reproduction_P Parameter: Organism Value: A. thaliana
  misc_feature: MA Experiment 20001905 PARAMETER Experiment Name: At_Drought_Reproduction_P Parameter: Plant Line Value: WS
  misc_feature: MA Experiment 20001905 PARAMETER Experiment Name: At_Drought_Reproduction_P Parameter: Timepoint (day) Value: 10
  misc_feature: MA Experiment 20001905 PARAMETER Experiment Name: At_Drought_Reproduction_P Parameter: Tissue Value: Rosettes
  misc_feature: MA Experiment 20001905 PARAMETER Experiment Name: At_Drought_Reproduction_P Parameter: Treatment Value: Drought vs. No Drought
ccaatcaaagcgtgacttcttcctcggtctttttcttgaggttccaatctttttgacttcatacaccatttcttttgcttacaacactttcagataaaagctatagattcagtattttgatccaacgtgtcatatattaacccttaagcaagattagtgaagtgacgagcctttaagatttgttattcttacaagcagcttgcagaagagagagagttaccagcaggaccagaggaaggaggatttgggatgtcatatgaccttctctatggaagagcgggtttcctttgggctgctctgttcctaaaccgatatctcggccaaggaactgttcctgaccatctcttatcacccattgttgcagccatcttagccggtgggcgagttggagctgcagatcatgaagcttgtcctctgttatacaggtttcacggaacgcgattttggggtgctgcgaatggattagctggaatcttgtatgtattgctgcattttccactatcggaagaggatgttaaagatgttcaagggacattgaggtatatgatgagtaataggtttccgaacagcggaaactacccgtgcagcgaagggaatccgagggataagctagtccaatgggctcatggagcaaccggcatggccattactttggctaaagcatctcaggtgtttcccaaggaaagggatttccgcgaagcagccattgaagcaggagaagtagtgtggaagagtggcttggtgaagaaggtaggtttagctgatggagttgctggtaatgcctacgctttcttatccctttatcgcttaaccggagatgttgtatatgaagagagagcaaaagcgtttgcgagttacttgtgccgtgatgcgatagagctcgtgaatatgacaagccaagaaacagaacatgattattcgctattccggggactagctggaccagtatgcctctggttcgatcttgtgtcgccggtagattctaagtttcctggttatgagatataatttaaaaccaggtaaccgtaggttcttttatgactatctctttgtgaaaggatcttaggttctccggtttattccactttctataatctattgaagtaacttg

SEQ ID NO: 74498 - protein, 252 aa, Arabidopsis thaliana; identical to SEQ ID NO: 45429
  peptide (1)..(252): Ceres Seq. ID no. 5677752
  misc_feature (1)..(252): Pfam Name: Lanthionine synthetase C-like protein Pfam Description: Lanthionine synthetase C-like protein
  misc_feature (1)..(252): Homolog of NCBI NO: 15238395 NR Description: G protein-coupled receptor-like protein; protein At5g65280.1, supported by cDNA: gi_15451139, supported by cDNA:
  misc_feature (1)..(252): Homolog of NCBI NO: 15451140 NR Description: G protein-coupled receptor-like protein
  misc_feature (1)..(252): Homolog of NCBI NO: 8489877 NR Description: putative 7-transmembrane G-protein-coupled
  misc_feature (4)..(252): Homolog of NCBI NO: 37535720 NR Description: putative lanthionine synthetase [Oryza sativa
  misc_feature (1)..(252): Homolog of NCBI NO: 15219126 NR Description: putative G protein-coupled receptor; protein id: [Arabidopsis thaliana] >gi|25405614|pir||E96570 hypothetical
  misc_feature (4)..(252): Homolog of NCBI NO: 21742091 NR Description: OSJNBa0074L08.13 [Oryza sativa (japonica
  misc_feature (4)..(252): Homolog of NCBI NO: 25411993 NR Description: hypothetical protein At2g20770 [imported] - thaliana >gi|4454471|gb|AAD20918.1| hypothetical protein
  misc_feature (4)..(252): Homolog of NCBI NO: 30681129 NR Description: expressed protein [Arabidopsis thaliana] unknown protein [Arabidopsis thaliana]
  misc_feature (4)..(252): Homolog of NCBI NO: 19526936 NR Description: RIKEN cDNA 1700003F10 [Mus musculus]
  misc_feature (4)..(252): Homolog of NCBI NO: 8923911 NR Description: LanC lantibiotic synthetase component C-like 2; specific adriamycin sensitivity protein; LanC (bacterial

SEQ ID NO: 74499 - protein, 154 aa, Arabidopsis thaliana
  peptide (1)..(154): Ceres Seq. ID no. 5677753
  misc_feature (1)..(154): Pfam Name: Lanthionine synthetase C-like protein Pfam Description: Lanthionine synthetase C-like protein
  misc_feature (1)..(154): Homolog of NCBI NO: 15238395 NR Description: G protein-coupled receptor-like protein; protein At5g65280.1, supported by cDNA: gi_15451139, supported by cDNA:
  misc_feature (1)..(154): Homolog of NCBI NO: 15451140 NR Description: G protein-coupled receptor-like protein
  misc_feature (1)..(154): Homolog of NCBI NO: 8489877 NR Description: putative 7-transmembrane G-protein-coupled
  misc_feature (1)..(154): Homolog of NCBI NO: 37535720 NR Description: putative lanthionine synthetase [Oryza sativa
  misc_feature (1)..(154): Homolog of NCBI NO: 15219126 NR Description: putative G protein-coupled receptor; protein id: [Arabidopsis thaliana] >gi|25405614|pir||E96570 hypothetical
  misc_feature (1)..(154): Homolog of NCBI NO: 21742091 NR Description: OSJNBa0074L08.13 [Oryza sativa (japonica
  misc_feature (1)..(154): Homolog of NCBI NO: 25411993 NR Description: hypothetical protein At2g20770 [imported] - thaliana >gi|4454471|gb|AAD20918.1| hypothetical protein
  misc_feature (1)..(154): Homolog of NCBI NO: 30681129 NR Description: expressed protein [Arabidopsis thaliana] unknown protein [Arabidopsis thaliana]
  misc_feature (1)..(154): Homolog of NCBI NO: 19526936 NR Description: RIKEN cDNA 1700003F10 [Mus musculus]
  misc_feature (1)..(154): Homolog of NCBI NO: 8923911 NR Description: LanC lantibiotic synthetase component C-like 2; specific adriamycin sensitivity protein; LanC (bacterial
MMSNRFPNSGNYPCSEGNPRDKLVQWAHGATGMAITLAKASQVFPKERDFREAAIEAGEVVWKSGLVKKVGLADGVAGNAYAFLSLYRLTGDVVYEERAKAFASYLCRDAIELVNMTSQETEHDYSLFRGLAGPVCLWFDLVSPVDSKFPGYEI

SEQ ID NO: 74500 - protein, 153 aa, Arabidopsis thaliana
  peptide (1)..(153): Ceres Seq. ID no. 5677754
  misc_feature (1)..(153): Pfam Name: Lanthionine synthetase C-like protein Pfam Description: Lanthionine synthetase C-like protein
  misc_feature (1)..(153): Homolog of NCBI NO: 15238395 NR Description: G protein-coupled receptor-like protein; protein At5g65280.1, supported by cDNA: gi_15451139, supported by cDNA:
  misc_feature (1)..(153): Homolog of NCBI NO: 15451140 NR Description: G protein-coupled receptor-like protein
  misc_feature (1)..(153): Homolog of NCBI NO: 8489877 NR Description: putative 7-transmembrane G-protein-coupled
  misc_feature (1)..(153): Homolog of NCBI NO: 37535720 NR Description: putative lanthionine synthetase [Oryza sativa
  misc_feature (1)..(153): Homolog of NCBI NO: 15219126 NR Description: putative G protein-coupled receptor; protein id: [Arabidopsis thaliana] >gi|25405614|pir||E96570 hypothetical
  misc_feature (1)..(153): Homolog of NCBI NO: 21742091 NR Description: OSJNBa0074L08.13 [Oryza sativa (japonica
  misc_feature (1)..(153): Homolog of NCBI NO: 25411993 NR Description: hypothetical protein At2g20770 [imported] - thaliana >gi|4454471|gb|AAD20918.1| hypothetical protein
  misc_feature (1)..(153): Homolog of NCBI NO: 30681129 NR Description: expressed protein [Arabidopsis thaliana] unknown protein [Arabidopsis thaliana]
  misc_feature (1)..(153): Homolog of NCBI NO: 19526936 NR Description: RIKEN cDNA 1700003F10 [Mus musculus]
  misc_feature (1)..(153): Homolog of NCBI NO: 8923911 NR Description: LanC lantibiotic synthetase component C-like 2; specific adriamycin sensitivity protein; LanC (bacterial
MSNRFPNSGNYPCSEGNPRDKLVQWAHGATGMAITLAKASQVFPKERDFREAAIEAGEVVWKSGLVKKVGLADGVAGNAYAFLSLYRLTGDVVYEERAKAFASYLCRDAIELVNMTSQETEHDYSLFRGLAGPVCLWFDLVSPVDSKFPGYEI

SEQ ID NO: 74501 - DNA, 1162 bp, Arabidopsis thaliana
  misc_feature (1)..(1162): Ceres Seq. ID no. 5677763
  misc_feature: MA Experiment ID: 108462 Result: Down-regulated in Transcription
  misc_feature: MA Experiment 108462 PARAMETER Experiment Name: At_Germinating_Seeds_cDNA_P Parameter: Age (day) Value: 2 vs. 0
  misc_feature: MA Experiment 108462 PARAMETER Experiment Name: At_Germinating_Seeds_cDNA_P Parameter: Tissue Value: Germinating Seeds
  misc_feature: MA Experiment ID: 108463 Result: Down-regulated in Transcription
  misc_feature: MA Experiment 108463 PARAMETER Experiment Name: At_Germinating_Seeds_cDNA_P Parameter: Age (day) Value: 3 vs. 0
  misc_feature: MA Experiment 108463 PARAMETER Experiment Name: At_Germinating_Seeds_cDNA_P Parameter: Tissue Value: Germinating Seeds
  misc_feature: MA Experiment ID: 108464 Result: Down-regulated in Transcription
  misc_feature: MA Experiment 108464 PARAMETER Experiment Name: At_Germinating_Seeds_cDNA_P Parameter: Age (day) Value: 4 vs. 0
  misc_feature: MA Experiment 108464 PARAMETER Experiment Name: At_Germinating_Seeds_cDNA_P Parameter: Tissue Value: Germinating Seeds
  misc_feature: MA Experiment ID: 108488 Result: Up-regulated in Transcription
  misc_feature: MA Experiment ID: 108572 Result: Down-regulated in Transcription
  misc_feature: MA Experiment 108572 PARAMETER Experiment Name: At_Drought_cDNA_P Parameter: Timepoint (hr) Value: 1
  misc_feature: MA Experiment 108572 PARAMETER Experiment Name: At_Drought_cDNA_P Parameter: Tissue Value: Aerial
  misc_feature: MA Experiment 108572 PARAMETER Experiment Name: At_Drought_cDNA_P Parameter: Treatment Value: Drought vs. No Drought
  misc_feature: MA Experiment ID: 108577 Result: Up-regulated in Transcription
  misc_feature: MA Experiment 108577 PARAMETER Experiment Name: At_42deg_Heat_cDNA_P Parameter: Temperature (deg C) Value: 42 vs. 22
  misc_feature: MA Experiment 108577 PARAMETER Experiment Name: At_42deg_Heat_cDNA_P Parameter: Timepoint (hr) Value: 6
  misc_feature: MA Experiment 108577 PARAMETER Experiment Name: At_42deg_Heat_cDNA_P Parameter: Tissue Value: Aerial
  misc_feature: MA Experiment ID: 108579 Result: Up-regulated in Transcription
  misc_feature: MA Experiment 108579 PARAMETER Experiment Name: At_4deg_Cold_cDNA_P Parameter: Temperature (deg C) Value: 4 vs. 22
  misc_feature: MA Experiment 108579 PARAMETER Experiment Name: At_4deg_Cold_cDNA_P Parameter: Timepoint (hr) Value: 6
  misc_feature: MA Experiment 108579 PARAMETER Experiment Name: At_4deg_Cold_cDNA_P Parameter: Tissue Value: Aerial
  misc_feature: MA Experiment ID: 108595 Result: Down-regulated in Transcription
  misc_feature: MA Experiment 108595 PARAMETER Experiment Name: At_Ler-pi_Ovule_cDNA_P Parameter: Plant Line Value: null
  misc_feature: MA Experiment ID: 108605 Result: Down-regulated in Transcription
  misc_feature: MA Experiment 108605 PARAMETER Experiment Name: At_100uM_ABA_cDNA_P Parameter: Timepoint (hr) Value: 6
  misc_feature: MA Experiment 108605 PARAMETER Experiment Name: At_100uM_ABA_cDNA_P Parameter: Tissue Value: Aerial
  misc_feature: MA Experiment 108605 PARAMETER Experiment Name: At_100uM_ABA_cDNA_P Parameter: Treatment Value: 100uM ABA vs. No Treatment
  misc_feature: MA Experiment ID: 108607 Result: Down-regulated in Transcription
  misc_feature: MA Experiment 108607 PARAMETER Experiment Name: At_100uM_ABA_cDNA_P Parameter: Timepoint (hr) Value: 4
  misc_feature: MA Experiment 108607 PARAMETER Experiment Name: At_100uM_ABA_cDNA_P Parameter: Tissue Value: Aerial
  misc_feature: MA Experiment 108607 PARAMETER Experiment Name: At_100uM_ABA_cDNA_P Parameter: Treatment Value: 100uM ABA vs. No Treatment
  misc_feature: MA Experiment ID: 20000069 Result: Down-regulated in Transcription
  misc_feature: MA Experiment 20000069 PARAMETER Experiment Name: At_100uM_ABA_Mutants_cDNA_P Parameter: Plant Line Value: CS23
  misc_feature: MA Experiment 20000069 PARAMETER Experiment Name: At_100uM_ABA_Mutants_cDNA_P Parameter: Timepoint (hr) Value: 6
  misc_feature: MA Experiment 20000069 PARAMETER Experiment Name: At_100uM_ABA_Mutants_cDNA_P Parameter: Tissue Value: Aerial
  misc_feature: MA Experiment 20000069 PARAMETER Experiment Name: At_100uM_ABA_Mutants_cDNA_P Parameter: Treatment Value: 100uM ABA vs. No Treatment
  misc_feature: MA Experiment ID: 20000070 Result: Down-regulated in Transcription
  misc_feature: MA Experiment 20000070 PARAMETER Experiment Name: At_100uM_ABA_Mutants_cDNA_P Parameter: Plant Line Value: CS24
  misc_feature: MA Experiment 20000070 PARAMETER Experiment Name: At_100uM_ABA_Mutants_cDNA_P Parameter: Timepoint (hr) Value: 6
  misc_feature: MA Experiment 20000070 PARAMETER Experiment Name: At_100uM_ABA_Mutants_cDNA_P Parameter: Tissue Value: Aerial
  misc_feature: MA Experiment 20000070 PARAMETER Experiment Name: At_100uM_ABA_Mutants_cDNA_P Parameter: Treatment Value: 100uM ABA vs. No Treatment
  misc_feature: MA Experiment ID: 20000071 Result: Down-regulated in Transcription
  misc_feature: MA Experiment 20000071 PARAMETER Experiment Name: At_100uM_ABA_Mutants_cDNA_P Parameter: Plant Line Value: CS8104
  misc_feature: MA Experiment 20000071 PARAMETER Experiment Name: At_100uM_ABA_Mutants_cDNA_P Parameter: Timepoint (hr) Value: 6
  misc_feature: MA Experiment 20000071 PARAMETER Experiment Name: At_100uM_ABA_Mutants_cDNA_P Parameter: Tissue Value: Aerial
  misc_feature: MA Experiment 20000071 PARAMETER Experiment Name: At_100uM_ABA_Mutants_cDNA_P Parameter: Treatment Value: 100uM ABA vs. No Treatment
  misc_feature: MA Experiment ID: 20000072 Result: Down-regulated in Transcription
  misc_feature: MA Experiment 20000072 PARAMETER Experiment Name: At_100uM_ABA_Mutants_cDNA_P Parameter: Plant Line Value: CS8105
  misc_feature: MA Experiment 20000072 PARAMETER Experiment Name: At_100uM_ABA_Mutants_cDNA_P Parameter: Timepoint (hr) Value: 6
  misc_feature: MA Experiment 20000072 PARAMETER Experiment Name: At_100uM_ABA_Mutants_cDNA_P Parameter: Tissue Value: Aerial
  misc_feature: MA Experiment 20000072 PARAMETER Experiment Name: At_100uM_ABA_Mutants_cDNA_P Parameter: Treatment Value: 100uM ABA vs. No Treatment
  misc_feature: MA Experiment ID: 20000086 Result: Down-regulated in Transcription
  misc_feature: MA Experiment 20000086 PARAMETER Experiment Name: At_100uM_ABA_Mutants_cDNA_P Parameter: Plant Line Value: CS22
  misc_feature: MA Experiment 20000086 PARAMETER Experiment Name: At_100uM_ABA_Mutants_cDNA_P Parameter: Timepoint (hr) Value: 6
  misc_feature: MA Experiment 20000086 PARAMETER Experiment Name: At_100uM_ABA_Mutants_cDNA_P Parameter: Tissue Value: Aerial
  misc_feature: MA Experiment 20000086 PARAMETER Experiment Name: At_100uM_ABA_Mutants_cDNA_P Parameter: Treatment Value: 100uM ABA vs. No Treatment
  misc_feature: MA Experiment ID: 20000087 Result: Down-regulated in Transcription
  misc_feature: MA Experiment 20000087 PARAMETER Experiment Name: At_100uM_ABA_Mutants_cDNA_P Parameter: Plant Line Value: WS
  misc_feature: MA Experiment 20000087 PARAMETER Experiment Name: At_100uM_ABA_Mutants_cDNA_P Parameter: Timepoint (hr) Value: 6
  misc_feature: MA Experiment 20000087 PARAMETER Experiment Name: At_100uM_ABA_Mutants_cDNA_P Parameter: Tissue Value: Aerial
  misc_feature: MA Experiment 20000087 PARAMETER Experiment Name: At_100uM_ABA_Mutants_cDNA_P Parameter: Treatment Value: 100uM ABA vs. No Treatment
  misc_feature: MA Experiment ID: 20000088 Result: Down-regulated in Transcription
  misc_feature: MA Experiment 20000088 PARAMETER Experiment Name: At_100uM_ABA_Mutants_cDNA_P Parameter: Plant Line Value: Landsberg
  misc_feature: MA Experiment 20000088 PARAMETER Experiment Name: At_100uM_ABA_Mutants_cDNA_P Parameter: Timepoint (hr) Value: 6
  misc_feature: MA Experiment 20000088 PARAMETER Experiment Name: At_100uM_ABA_Mutants_cDNA_P Parameter: Tissue Value: Aerial
  misc_feature: MA Experiment 20000088 PARAMETER Experiment Name: At_100uM_ABA_Mutants_cDNA_P Parameter: Treatment Value: 100uM ABA vs. No Treatment
  misc_feature: MA Experiment ID: 20000089 Result: Down-regulated in Transcription
  misc_feature: MA Experiment ID: 20000090 Result: Down-regulated in Transcription
  misc_feature: MA Experiment ID: 20000111 Result: Up-regulated in Transcription
  misc_feature: MA Experiment 20000111 PARAMETER Experiment Name: At_42deg_Heat_cDNA_P Parameter: Temperature (deg C) Value: 42 vs. 22
  misc_feature: MA Experiment 20000111 PARAMETER Experiment Name: At_42deg_Heat_cDNA_P Parameter: Timepoint (hr) Value: 6
  misc_feature: MA Experiment 20000111 PARAMETER Experiment Name: At_42deg_Heat_cDNA_P Parameter: Tissue Value: Aerial
  misc_feature: MA Experiment ID: 20000112 Result: Up-regulated in Transcription
  misc_feature: MA Experiment 20000112 PARAMETER Experiment Name: At_42deg_Heat_cDNA_P Parameter: Temperature (deg C) Value: 42 vs. 22
  misc_feature: MA Experiment 20000112 PARAMETER Experiment Name: At_42deg_Heat_cDNA_P Parameter: Timepoint (hr) Value: 2
  misc_feature: MA Experiment 20000112 PARAMETER Experiment Name: At_42deg_Heat_cDNA_P Parameter: Tissue Value: Aerial
  misc_feature: MA Experiment ID: 20000113 Result: Up-regulated in Transcription
  misc_feature: MA Experiment 20000113 PARAMETER Experiment Name: At_42deg_Heat_cDNA_P Parameter: Temperature (deg C) Value: 42 vs. 22
  misc_feature: MA Experiment 20000113 PARAMETER Experiment Name: At_42deg_Heat_cDNA_P Parameter: Timepoint (hr) Value: 8
  misc_feature: MA Experiment 20000113 PARAMETER Experiment Name: At_42deg_Heat_cDNA_P Parameter: Tissue Value: Aerial
  misc_feature: MA Experiment ID: 20000117 Result: Down-regulated in Transcription
  misc_feature: MA Experiment 20000117 PARAMETER Experiment Name: At_100uM_ABA_Mutants_cDNA_P Parameter: Plant Line Value: Columbia
  misc_feature: MA Experiment 20000117 PARAMETER Experiment Name: At_100uM_ABA_Mutants_cDNA_P Parameter: Timepoint (hr) Value: 6
  misc_feature: MA Experiment 20000117 PARAMETER Experiment Name: At_100uM_ABA_Mutants_cDNA_P Parameter: Tissue Value: Aerial
  misc_feature: MA Experiment 20000117 PARAMETER Experiment Name: At_100uM_ABA_Mutants_cDNA_P Parameter: Treatment Value: 100uM ABA vs. No Treatment
  misc_feature: MA Experiment ID: 20000144 Result: Up-regulated in Transcription
  misc_feature: MA Experiment 20000144 PARAMETER Experiment Name: At_42deg_Heat_cDNA_P Parameter: Temperature (deg C) Value: 42 vs. 22
  misc_feature: MA Experiment 20000144 PARAMETER Experiment Name: At_42deg_Heat_cDNA_P Parameter: Timepoint (hr) Value: 1
  misc_feature: MA Experiment 20000144 PARAMETER Experiment Name: At_42deg_Heat_cDNA_P Parameter: Tissue Value: Aerial
  misc_feature: MA Experiment ID: 20000169 Result: Down-regulated in Transcription
  misc_feature: MA Experiment 20000169 PARAMETER Experiment Name: At_100uM_ABA_P Parameter: Age (day) Value: 14
  misc_feature: MA Experiment 20000169 PARAMETER Experiment Name: At_100uM_ABA_P Parameter: Organism Value: A. thaliana
  misc_feature: MA Experiment 20000169 PARAMETER Experiment Name: At_100uM_ABA_P Parameter: Plant Line Value: WS
  misc_feature: MA Experiment 20000169 PARAMETER Experiment Name: At_100uM_ABA_P Parameter: Timepoint (hr) Value: 6
  misc_feature: MA Experiment 20000169 PARAMETER Experiment Name: At_100uM_ABA_P Parameter: Tissue Value: Aerial
  misc_feature: MA Experiment 20000169 PARAMETER Experiment Name: At_100uM_ABA_P Parameter: Treatment Value: 100uM ABA vs. No Treatment
  misc_feature: MA Experiment ID: 20000173 Result: Up-regulated in Transcription
  misc_feature: MA Experiment 20000173 PARAMETER Experiment Name: At_42deg_Heat_P Parameter: Age (day) Value: 14
  misc_feature: MA Experiment 20000173 PARAMETER Experiment Name: At_42deg_Heat_P Parameter: Organism Value: A. thaliana
  misc_feature: MA Experiment 20000173 PARAMETER Experiment Name: At_42deg_Heat_P Parameter: Plant Line Value: WS
  misc_feature: MA Experiment 20000173 PARAMETER Experiment Name: At_42deg_Heat_P Parameter: Temperature (deg C) Value: 42 vs. 22
  misc_feature: MA Experiment 20000173 PARAMETER Experiment Name: At_42deg_Heat_P Parameter: Timepoint (hr) Value: 6
  misc_feature: MA Experiment 20000173 PARAMETER Experiment Name: At_42deg_Heat_P Parameter: Tissue Value: Aerial
  misc_feature: MA Experiment ID: 20000184 Result: Up-regulated in Transcription
  misc_feature: MA Experiment 20000184 PARAMETER Experiment Name: At_Shoots__P Parameter: Age (day) Value: 7
  misc_feature: MA Experiment 20000184 PARAMETER Experiment Name: At_Shoots__P Parameter: Tissue Value: Shoots vs. Whole Plant
  misc_feature: MA Experiment ID: 20000437 Result: Down-regulated in Transcription
  misc_feature: MA Experiment 20000437 PARAMETER Experiment Name: At_Drought_P Parameter: Age (day) Value: 8
  misc_feature: MA Experiment 20000437 PARAMETER Experiment Name: At_Drought_P Parameter: Organism Value: A. thaliana
  misc_feature: MA Experiment 20000437 PARAMETER Experiment Name: At_Drought_P Parameter: Plant Line Value: WS
  misc_feature: MA Experiment 20000437 PARAMETER Experiment Name: At_Drought_P Parameter: Timepoint (hr) Value: 24
  misc_feature: MA Experiment 20000437 PARAMETER Experiment Name: At_Drought_P Parameter: Tissue Value: Whole Plant
  misc_feature: MA Experiment 20000437 PARAMETER Experiment Name: At_Drought_P Parameter: Treatment Value: Drought vs. No Drought
  misc_feature: MA Experiment ID: 20001248 Result: Down-regulated in Transcription
  misc_feature: MA Experiment 20001248 PARAMETER Experiment Name: At_Far-red-induction_P Parameter: Age (day) Value: 7
  misc_feature: MA Experiment 20001248 PARAMETER Experiment Name: At_Far-red-induction_P Parameter: Light Value: Far-red vs. White
  misc_feature: MA Experiment 20001248 PARAMETER Experiment Name: At_Far-red-induction_P Parameter: Organism Value: A. thaliana
  misc_feature: MA Experiment 20001248 PARAMETER Experiment Name: At_Far-red-induction_P Parameter: Plant Line Value: Columbia
  misc_feature: MA Experiment 20001248 PARAMETER Experiment Name: At_Far-red-induction_P Parameter: Timepoint (hr) Value: 4
  misc_feature: MA Experiment 20001248 PARAMETER Experiment Name: At_Far-red-induction_P Parameter: Tissue Value: Whole Plant
  misc_feature: MA Experiment ID: 20001450 Result: Down-regulated in Transcription
  misc_feature: MA Experiment 20001450 PARAMETER Experiment Name: At_Far-red-induction_P Parameter: Age (day) Value: 7
  misc_feature: MA Experiment 20001450 PARAMETER Experiment Name: At_Far-red-induction_P Parameter: Light Value: Far-red vs. White
  misc_feature: MA Experiment 20001450 PARAMETER Experiment Name: At_Far-red-induction_P Parameter: Organism Value: A. thaliana
  misc_feature: MA Experiment 20001450 PARAMETER Experiment Name: At_Far-red-induction_P Parameter: Plant Line Value: Columbia
  misc_feature: MA Experiment 20001450 PARAMETER Experiment Name: At_Far-red-induction_P Parameter: Timepoint (hr) Value: 8
  misc_feature: MA Experiment 20001450 PARAMETER Experiment Name: At_Far-red-induction_P Parameter: Tissue Value: Whole Plant
ctataaagccgatccatagataaacgaggaccggccagaaatcgcttcaccattcccaaatctctcttccattttctccacacaaatttctcttcaatctccgataatggaaggaaccggcgttgtggcggtgtacggtaacggtgcgataacggaggcgaagaaatctcccttctccgtgaaggtcggtttggctcagatgctccgtggtggtgttatcatggatgtcgtcaacgccgagcaagctcgtatcgccgaggaggctggtgcttgcgccgtcatggctttggagcgtgttcctgctgatatccttgaagcaattggaatcgattacatcgatgagagcgaggttttgactcttgctgatgaagatcatcacatcaacaagcataatttccggatcccgttcgtttgcggttgccggaatctcggcgaggctctgaggaggatccgtgaaggtgcggcgatgattaggaccaaaggtgaagctggaaccggtaacattattgaagctgtgaggcatgtgaggtctgttaatggtgacattagggttttgcgaaacatggatgatgatgaggttttcactttcgctaagaaattagccgctccgtacgatctcgtgatgcagactaagcagcttggtcgtcttcctgtagtccaattcgccgccggtggagtggctactccggctgatgcagctctcatgatgcagcttggatgtgatggtgtctttgttggttctggtatcttcaagagcggtgacccagctcgtcgtgcacgtgccattgttcaggctgtgactcattacagtgaccctgagatgcttgtggaggtgagctgtgggcttggagaagccatggttgggatcaatctcaacgatgagaaggttgagaggttcgctaatcgctccgagtgatcaaagaaataaaaggtaaaatatctcagacgaaatggtttcagaattttctcagaccattttgcagtaatctctttgaaaagaagaagatgatgatattgttggtagtttgtatcctttgtgttttccttataatctttgatagtcttttgttattgtaactcgtaatccctttgcaagaacaagtttgtcagttataataatgtactactctcttgatcgatcagttggttttgaatctgatat

SEQ ID NO: 74502 - protein, 269 aa, Arabidopsis thaliana; identical to SEQ ID NO: 34893
  peptide (1)..(269): Ceres Seq. ID no. 5677764
  misc_feature (34)..(188): Pfam Name: SOR/SNZ family Pfam Description: SOR/SNZ family
  misc_feature (34)..(269): Homolog of NCBI NO: 15240972 NR Description: pyridoxine biosynthesis protein - like; protein At5g01410.1, supported by cDNA: 8877., supported by cDNA: supported by cDNA: gi_17933286, supported by cDNA: gi_20453410
  misc_feature (34)..(269): Homolog of NCBI NO: 21617922 NR Description: pyridoxine biosynthesis protein-like [Arabidopsis
  misc_feature (34)..(269): Homolog of NCBI NO: 2501578 NR Description: ETHYLENE-INDUCIBLE PROTEIN HEVER
  misc_feature (34)..(269): Homolog of NCBI NO: 10719739 NR Description: putative pyridoxine biosynthetic enzyme
  misc_feature (11)..(269): Homolog of NCBI NO: 34394152 NR Description: putative ethylene-inducible protein [Oryza sativa
  misc_feature (34)..(269): Homolog of NCBI NO: 15224470 NR Description: similar to SOR1 from the fungus Cercospora protein id: At2g38230.1, supported by cDNA: 19998., supported by gi_13878066, supported by cDNA: gi_14326482, supported by cDNA:
  misc_feature (11)..(269): Homolog of NCBI NO: 13310484 NR Description: Sor-like protein [Ginkgo biloba]
  misc_feature (11)..(269): Homolog of NCBI NO: 37530308 NR Description: putative pyridoxine/pyridoxal 5-phosphate
  misc_feature (80)..(269): Homolog of NCBI NO: 7488891 NR Description: ethylene-responsive protein 2 - Para rubber tree
  misc_feature (34)..(267): Homolog of NCBI NO: 22970419 NR Description: hypothetical protein [Chloroflexus aurantiacus]

SEQ ID NO: 74503 - protein, 238 aa, Arabidopsis thaliana; identical to SEQ ID NO: 34894
  peptide (1)..(238): Ceres Seq. ID no. 5677765
  misc_feature (3)..(157): Pfam Name: SOR/SNZ family Pfam Description: SOR/SNZ family
  misc_feature (3)..(238): Homolog of NCBI NO: 15240972 NR Description: pyridoxine biosynthesis protein - like; protein At5g01410.1, supported by cDNA: 8877., supported by cDNA: supported by cDNA: gi_17933286, supported by cDNA: gi_20453410
  misc_feature (3)..(238): Homolog of NCBI NO: 21617922 NR Description: pyridoxine biosynthesis protein-like [Arabidopsis
  misc_feature (3)..(238): Homolog of NCBI NO: 2501578 NR Description: ETHYLENE-INDUCIBLE PROTEIN HEVER
  misc_feature (3)..(238): Homolog of NCBI NO: 10719739 NR Description: putative pyridoxine biosynthetic enzyme
  misc_feature (1)..(238): Homolog of NCBI NO: 34394152 NR Description: putative ethylene-inducible protein [Oryza sativa
  misc_feature (3)..(238): Homolog of NCBI NO: 15224470 NR Description: similar to SOR1 from the fungus Cercospora protein id: At2g38230.1, supported by cDNA: 19998., supported by gi_13878066, supported by cDNA: gi_14326482, supported by cDNA:
  misc_feature (1)..(238): Homolog of NCBI NO: 13310484 NR Description: Sor-like protein [Ginkgo biloba]
  misc_feature (1)..(238): Homolog of NCBI NO: 37530308 NR Description: putative pyridoxine/pyridoxal 5-phosphate
  misc_feature (49)..(238): Homolog of NCBI NO: 7488891 NR Description: ethylene-responsive protein 2 - Para rubber tree
  misc_feature (3)..(236): Homolog of NCBI NO: 22970419 NR Description: hypothetical protein [Chloroflexus aurantiacus]

SEQ ID NO: 74504 - protein, 231 aa, Arabidopsis thaliana; identical to SEQ ID NO: 34895
  peptide (1)..(231): Ceres Seq. ID no. 5677766
  misc_feature (1)..(150): Pfam Name: SOR/SNZ family Pfam Description: SOR/SNZ family
  misc_feature (1)..(231): Homolog of NCBI NO: 15240972 NR Description: pyridoxine biosynthesis protein - like; protein At5g01410.1, supported by cDNA: 8877., supported by cDNA: supported by cDNA: gi_17933286, supported by cDNA: gi_20453410
  misc_feature (1)..(231): Homolog of NCBI NO: 21617922 NR Description: pyridoxine biosynthesis protein-like [Arabidopsis
  misc_feature (1)..(231): Homolog of NCBI NO: 2501578 NR Description: ETHYLENE-INDUCIBLE PROTEIN HEVER
  misc_feature (1)..(231): Homolog of NCBI NO: 10719739 NR Description: putative pyridoxine biosynthetic enzyme
  misc_feature (1)..(231): Homolog of NCBI NO: 34394152 NR Description: putative ethylene-inducible protein [Oryza sativa
  misc_feature (1)..(231): Homolog of NCBI NO: 15224470 NR Description: similar to SOR1 from the fungus Cercospora protein id: At2g38230.1, supported by cDNA: 19998., supported by gi_13878066, supported by cDNA: gi_14326482, supported by cDNA:
  misc_feature (1)..(231): Homolog of NCBI NO: 13310484 NR Description: Sor-like protein [Ginkgo biloba]
  misc_feature (1)..(231): Homolog of NCBI NO: 37530308 NR Description: putative pyridoxine/pyridoxal 5-phosphate
  misc_feature (42)..(231): Homolog of NCBI NO: 7488891 NR Description: ethylene-responsive protein 2 - Para rubber tree
  misc_feature (1)..(229): Homolog of NCBI NO: 22970419 NR Description: hypothetical protein [Chloroflexus aurantiacus]

SEQ ID NO: 74505 - DNA, 1145 bp, Arabidopsis thaliana
  misc_feature (1)..(1145): Ceres Seq. ID no. 5677814
  misc_feature: MA Experiment ID: 108579 Result: Down-regulated in Transcription
  misc_feature: MA Experiment 108579 PARAMETER Experiment Name: At_4deg_Cold_cDNA_P Parameter: Temperature (deg C) Value: 4 vs. 22
  misc_feature: MA Experiment 108579 PARAMETER Experiment Name: At_4deg_Cold_cDNA_P Parameter: Timepoint (hr) Value: 6
  misc_feature: MA Experiment 108579 PARAMETER Experiment Name: At_4deg_Cold_cDNA_P Parameter: Tissue Value: Aerial
ctttttctctttcacatctttctttctctcgcaaacccaaattctctcagcgccggtcaaatacttgtctctctctctctctctctttcactcttgtcttgtctccttcgaagctgtttgttctgtaagaaagatggaagcaggtggcgcgtacaatccacgcactgttgaagaggtgtttagggattttaagggtcgtagagctggcatgattaaggctttaaccactgatgttcaggagtttttccgactttgtgatcccgaaaaggagaacctttgcctttacggacatccaaatgagcactgggaagtgaatttgccagctgaagaggttcctcctgagctcccagagcctgtcttgggtatcaattttgccagagacgggatggcggaaaaggattggttgtcccttgttgctgtccacagtgatgcttggcttcttgctgttgctttcttttttggagccaggtttggatttgacaaagctgataggaagaggcttttcaatatggtgaatgacctcccaacaatctttgaggttgtagctggcactgctaagaaacaaggaaaagataagtcctctgtttccaacaacagcagcaacagatccaaatcaagctccaagcgaggatctgaatcccgtgccaagttctcaaagccggagccgaaagatgatgaggaggaggaagaggaaggtgtggaagaggaggatgaggatgagcaaggtgaaacacagtgtggagcatgtggtgagagctatgcagctgatgagttctggatttgctgtgacctctgtgagatgtggtttcatggaaagtgtgttaagataacaccagcaagagctgagcacatcaagcaatacaagtgcccttcttgcagcaacaaaagggctcgttcctaaatttgttgaccgctcgcttctgtgtatctacctttgcatatgatgatgaacagcttaactgtttggtttagatcagatttgtcatatggatttggtaatttaggaagacattttagttttttcattgttacattttggcgattgaagggataactctttgtttaggggtaatgatcttttgctctgttttatgtttgtttattaacattcttcaaactcaatcaaaagtattttggttagtctt

SEQ ID NO: 74506 - protein, 299 aa, Arabidopsis thaliana; identical to SEQ ID NO: 22035
  peptide (1)..(299): Ceres Seq. ID no. 5677815
  misc_feature (245)..(295): Pfam Name: PHD-finger Pfam Description: PHD-finger
  misc_feature (45)..(299): Homolog of NCBI NO: 15239624 NR Description: nucleic acid binding protein - like; protein id:
  misc_feature (45)..(299): Homolog of NCBI NO: 7486722 NR Description: hypothetical protein F9D12.13 - Arabidopsis >gi|3319341|gb|AAC26230.1| similar to Medicago sativa nucleic
  misc_feature (45)..(298): Homolog of NCBI NO: 30687843 NR Description: zinc finger protein - like [Arabidopsis thaliana]
  misc_feature (45)..(299): Homolog of NCBI NO: 15229157 NR Description: nucleic acid binding protein-like; protein id: supported by cDNA: gi_17065549 [Arabidopsis thaliana]
  misc_feature (51)..(293): Homolog of NCBI NO: 14192880 NR Description: Putative nucleic acid binding protein [Oryza
  misc_feature (51)..(293): Homolog of NCBI NO: 34394182 NR Description: putative nucleic acid binding protein [Oryza
  misc_feature (53)..(298): Homolog of NCBI NO: 15226967 NR Description: putative PHD-type zinc finger protein; protein
  misc_feature (53)..(298): Homolog of NCBI NO: 21593407 NR Description: putative PHD-type zinc finger protein
  misc_feature (48)..(299): Homolog of NCBI NO: 34907474 NR Description: nucleic acid binding protein [Oryza sativa
  misc_feature (48)..(299): Homolog of NCBI NO: 4091080 NR Description: nucleic acid binding protein [Oryza sativa]

SEQ ID NO: 74507 - protein, 255 aa, Arabidopsis thaliana; identical to SEQ ID NO: 22036
  peptide (1)..(255): Ceres Seq. ID no. 5677816
  misc_feature (201)..(251): Pfam Name: PHD-finger Pfam Description: PHD-finger
  misc_feature (1)..(255): Homolog of NCBI NO: 15239624 NR Description: nucleic acid binding protein - like; protein id:
  misc_feature (1)..(255): Homolog of NCBI NO: 7486722 NR Description: hypothetical protein F9D12.13 - Arabidopsis >gi|3319341|gb|AAC26230.1| similar to Medicago sativa nucleic
  misc_feature (1)..(254): Homolog of NCBI NO: 30687843 NR Description: zinc finger protein - like [Arabidopsis thaliana]
  misc_feature (1)..(255): Homolog of NCBI NO: 15229157 NR Description: nucleic acid binding protein-like; protein id: supported by cDNA: gi_17065549 [Arabidopsis thaliana]
  misc_feature (7)..(249): Homolog of NCBI NO: 14192880 NR Description: Putative nucleic acid binding protein [Oryza
  misc_feature (7)..(249): Homolog of NCBI NO: 34394182 NR Description: putative nucleic acid binding protein [Oryza
  misc_feature (9)..(254): Homolog of NCBI NO: 15226967 NR Description: putative PHD-type zinc finger protein; protein
  misc_feature (9)..(254): Homolog of NCBI NO: 21593407 NR Description: putative PHD-type zinc finger protein
  misc_feature (4)..(255): Homolog of NCBI NO: 34907474 NR Description: nucleic acid binding protein [Oryza sativa
  misc_feature (4)..(255): Homolog of NCBI NO: 4091080 NR Description: nucleic acid binding protein [Oryza sativa]

SEQ ID NO: 74508 - protein, 230 aa, Arabidopsis thaliana; identical to SEQ ID NO: 22037
  peptide (1)..(230): Ceres Seq. ID no. 5677817
  misc_feature (176)..(226): Pfam Name: PHD-finger Pfam Description: PHD-finger
  misc_feature (1)..(230): Homolog of NCBI NO: 15239624 NR Description: nucleic acid binding protein - like; protein id:
  misc_feature (1)..(230): Homolog of NCBI NO: 7486722 NR Description: hypothetical protein F9D12.13 - Arabidopsis >gi|3319341|gb|AAC26230.1| similar to Medicago sativa nucleic
  misc_feature (1)..(229): Homolog of NCBI NO: 30687843 NR Description: zinc finger protein - like [Arabidopsis thaliana]
  misc_feature (1)..(230): Homolog of NCBI NO: 15229157 NR Description: nucleic acid binding protein-like; protein id: supported by cDNA: gi_17065549 [Arabidopsis thaliana]
  misc_feature (1)..(224): Homolog of NCBI NO: 14192880 NR Description: Putative nucleic acid binding protein [Oryza
  misc_feature (1)..(224): Homolog of NCBI NO: 34394182 NR Description: putative nucleic acid binding protein [Oryza
  misc_feature (1)..(229): Homolog of NCBI NO: 15226967 NR Description: putative PHD-type zinc finger protein; protein
  misc_feature (1)..(229): Homolog of NCBI NO: 21593407 NR Description: putative PHD-type zinc finger protein
  misc_feature (1)..(230): Homolog of NCBI NO: 34907474 NR Description: nucleic acid binding protein [Oryza sativa
  misc_feature (1)..(230): Homolog of NCBI NO: 4091080 NR Description: nucleic acid binding protein [Oryza sativa]

SEQ ID NO: 74509 - DNA, 1442 bp, Arabidopsis thaliana
  misc_feature (1)..(1442): Ceres Seq. ID no. 5677827
  misc_feature: MA Experiment ID: 108435 Result: Down-regulated in Transcription
  misc_feature: MA Experiment 108435 PARAMETER Experiment Name: At_stm_Mutants_cDNA_P Parameter: Plant Line Value: wt Landsburg vs stm
  misc_feature: MA Experiment 108435 PARAMETER Experiment Name: At_stm_Mutants_cDNA_P Parameter: Tissue Value: Shoot Apical Meristem Region
  misc_feature: MA Experiment ID: 108464 Result: Up-regulated in Transcription
  misc_feature: MA Experiment 108464 PARAMETER Experiment Name: At_Germinating_Seeds_cDNA_P Parameter: Age (day) Value: 4 vs. 0
  misc_feature: MA Experiment 108464 PARAMETER Experiment Name: At_Germinating_Seeds_cDNA_P Parameter: Tissue Value: Germinating Seeds
  misc_feature: MA Experiment ID: 108488 Result: Down-regulated in Transcription
  misc_feature: MA Experiment ID: 108572 Result: Down-regulated in Transcription
  misc_feature: MA Experiment 108572 PARAMETER Experiment Name: At_Drought_cDNA_P Parameter: Timepoint (hr) Value: 1
  misc_feature: MA Experiment 108572 PARAMETER Experiment Name: At_Drought_cDNA_P Parameter: Tissue Value: Aerial
  misc_feature: MA Experiment 108572 PARAMETER Experiment Name: At_Drought_cDNA_P Parameter: Treatment Value: Drought vs. No Drought
  misc_feature: MA Experiment ID: 108585 Result: Up-regulated in Transcription
  misc_feature: MA Experiment 108585 PARAMETER Experiment Name: At_5mM_NaNP_cDNA_P Parameter: Timepoint (hr) Value: 6
  misc_feature: MA Experiment 108585 PARAMETER Experiment Name: At_5mM_NaNP_cDNA_P Parameter: Tissue Value: Aerial
  misc_feature: MA Experiment 108585 PARAMETER Experiment Name: At_5mM_NaNP_cDNA_P Parameter: Treatment Value: null
  misc_feature: MA Experiment ID: 108594 Result: Down-regulated in Transcription
  misc_feature: MA Experiment 108594 PARAMETER Experiment Name: At_Ler-rhl_Root_cDNA_P Parameter: Plant Line Value: null
  misc_feature: MA Experiment ID: 20000072 Result: Up-regulated in Transcription
  misc_feature: MA Experiment 20000072 PARAMETER Experiment Name: At_100uM_ABA_Mutants_cDNA_P Parameter: Plant Line Value: CS8105
  misc_feature: MA Experiment 20000072 PARAMETER Experiment Name: At_100uM_ABA_Mutants_cDNA_P Parameter: Timepoint (hr) Value: 6
  misc_feature: MA Experiment 20000072 PARAMETER Experiment Name: At_100uM_ABA_Mutants_cDNA_P Parameter: Tissue Value: Aerial
  misc_feature: MA Experiment 20000072 PARAMETER Experiment Name: At_100uM_ABA_Mutants_cDNA_P Parameter: Treatment Value: 100uM ABA vs. No Treatment
  misc_feature: MA Experiment ID: 20000090 Result: Up-regulated in Transcription
  misc_feature: MA Experiment ID: 20000111 Result: Down-regulated in Transcription
  misc_feature: MA Experiment 20000111 PARAMETER Experiment Name: At_42deg_Heat_cDNA_P Parameter: Temperature (deg C) Value: 42 vs. 22
  misc_feature: MA Experiment 20000111 PARAMETER Experiment Name: At_42deg_Heat_cDNA_P Parameter: Timepoint (hr) Value: 6
  misc_feature: MA Experiment 20000111 PARAMETER Experiment Name: At_42deg_Heat_cDNA_P Parameter: Tissue Value: Aerial
  misc_feature: MA Experiment ID: 20000173 Result: Down-regulated in Transcription
  misc_feature: MA Experiment 20000173 PARAMETER Experiment Name: At_42deg_Heat_P Parameter: Age (day) Value: 14
  misc_feature: MA Experiment 20000173 PARAMETER Experiment Name: At_42deg_Heat_P Parameter: Organism Value: A. thaliana
  misc_feature: MA Experiment 20000173 PARAMETER Experiment Name: At_42deg_Heat_P Parameter: Plant Line Value: WS
  misc_feature: MA Experiment 20000173 PARAMETER Experiment Name: At_42deg_Heat_P Parameter: Temperature (deg C) Value: 42 vs. 22
  misc_feature: MA Experiment 20000173 PARAMETER Experiment Name: At_42deg_Heat_P Parameter: Timepoint (hr) Value: 6
  misc_feature: MA Experiment 20000173 PARAMETER Experiment Name: At_42deg_Heat_P Parameter: Tissue Value: Aerial
  misc_feature: MA Experiment ID: 20000182 Result: Up-regulated in Transcription
  misc_feature: MA Experiment 20000182 PARAMETER Experiment Name: At_2mM_SA_P Parameter: Age (day) Value: 14
  misc_feature: MA Experiment 20000182 PARAMETER Experiment Name: At_2mM_SA_P Parameter: Organism Value: A. thaliana
  misc_feature: MA Experiment 20000182 PARAMETER Experiment Name: At_2mM_SA_P Parameter: Plant Line Value: WS
  misc_feature: MA Experiment 20000182 PARAMETER Experiment Name: At_2mM_SA_P Parameter: Timepoint (hr) Value: 6
  misc_feature: MA Experiment 20000182 PARAMETER Experiment Name: At_2mM_SA_P Parameter: Tissue Value: Aerial
  misc_feature: MA Experiment 20000182 PARAMETER Experiment Name: At_2mM_SA_P Parameter: Treatment Value: 2mM SA vs. No Treatment
  misc_feature: MA Experiment ID: 20000184 Result: Down-regulated in Transcription
  misc_feature: MA Experiment 20000184 PARAMETER Experiment Name: At_Shoots__P Parameter: Age (day) Value: 7
  misc_feature: MA Experiment 20000184 PARAMETER Experiment Name: At_Shoots__P Parameter: Tissue Value: Shoots vs. Whole Plant
  misc_feature: MA Experiment ID: 20000227 Result: Up-regulated in Transcription
  misc_feature: MA Experiment 20000227 PARAMETER Experiment Name: At_Root-Tips-vs-Tops_P Parameter: Tissue Value: Root Tips vs. Root Tops
  misc_feature: MA Experiment ID: 20000264 Result: Up-regulated in Transcription
  misc_feature: MA Experiment 20000264 PARAMETER Experiment Name: At_Open_Flower_P Parameter: Age (day) Value: 21
  misc_feature: MA Experiment 20000264 PARAMETER Experiment Name: At_Open_Flower_P Parameter: Plant Line Value: WS
  misc_feature: MA Experiment 20000264 PARAMETER Experiment Name: At_Open_Flower_P Parameter: Tissue Value: Open Flower vs. Whole Plant
  misc_feature: MA Experiment ID: 20000438 Result: Down-regulated in Transcription
  misc_feature: MA Experiment 20000438 PARAMETER Experiment Name: At_Shoots__P Parameter: Age (day) Value: 14
  misc_feature: MA Experiment 20000438 PARAMETER Experiment Name: At_Shoots__P Parameter: Tissue Value: Shoots vs. Whole Plant
  misc_feature: MA Experiment ID: 20000456 Result: Up-regulated in Transcription
  misc_feature: MA Experiment 20000456 PARAMETER Experiment Name: At_100uM_BA_P Parameter: Age (day) Value: 14
  misc_feature: MA Experiment 20000456 PARAMETER Experiment Name: At_100uM_BA_P Parameter: Organism Value: A. thaliana
  misc_feature: MA Experiment 20000456 PARAMETER Experiment Name: At_100uM_BA_P Parameter: Plant Line Value: WS
  misc_feature: MA Experiment 20000456 PARAMETER Experiment Name: At_100uM_BA_P Parameter: Timepoint (hr) Value: 6
  misc_feature: MA Experiment 20000456 PARAMETER Experiment Name: At_100uM_BA_P Parameter: Tissue Value: Aerial
  misc_feature: MA Experiment 20000456 PARAMETER Experiment Name: At_100uM_BA_P Parameter: Treatment Value: 100uM BA vs. No Treatment
  misc_feature: MA Experiment ID: 20000527 Result: Down-regulated in Transcription
  misc_feature: MA Experiment 20000527 PARAMETER Experiment Name: At_10percent_PEG_P Parameter: Age (day) Value: 20
  misc_feature: MA Experiment 20000527 PARAMETER Experiment Name: At_10percent_PEG_P Parameter: Organism Value: A. thaliana
  misc_feature: MA Experiment 20000527 PARAMETER Experiment Name: At_10percent_PEG_P Parameter: Plant Line Value: WS
  misc_feature: MA Experiment 20000527 PARAMETER Experiment Name: At_10percent_PEG_P Parameter: Timepoint (day) Value: 20
  misc_feature: MA Experiment 20000527 PARAMETER Experiment Name: At_10percent_PEG_P Parameter: Tissue Value: Whole Plant
  misc_feature: MA Experiment 20000527 PARAMETER Experiment Name: At_10percent_PEG_P Parameter: Treatment Value: 10percent PEG vs. No Treatment
  misc_feature: MA Experiment ID: 20000709 Result: Down-regulated in Transcription
  misc_feature: MA Experiment 20000709 PARAMETER Experiment Name: At_15mM_NH4NO3_L-to-H_P Parameter: Age (hr) Value: 14
  misc_feature: MA Experiment 20000709 PARAMETER Experiment Name: At_15mM_NH4NO3_L-to-H_P Parameter: Organism Value: A. thaliana
  misc_feature: MA Experiment 20000709 PARAMETER Experiment Name: At_15mM_NH4NO3_L-to-H_P Parameter: Plant Line Value: WS
  misc_feature: MA Experiment 20000709 PARAMETER Experiment Name: At_15mM_NH4NO3_L-to-H_P Parameter: Timepoint (hr) Value: 4
  misc_feature: MA Experiment 20000709 PARAMETER Experiment Name: At_15mM_NH4NO3_L-to-H_P Parameter: Tissue Value: Aerial
  misc_feature: MA Experiment 20000709 PARAMETER Experiment Name: At_15mM_NH4NO3_L-to-H_P Parameter: Treatment Value: 15mM NH4NO3 vs. 30mM Mannitol
  misc_feature: MA Experiment ID: 20000794 Result: Up-regulated in Transcription
  misc_feature: MA Experiment 20000794 PARAMETER Experiment Name: At_Petals_P Parameter: Age (day) Value: 23-25 days
  misc_feature: MA Experiment 20000794 PARAMETER Experiment Name: At_Petals_P Parameter: Plant Line Value: WS
  misc_feature: MA Experiment 20000794 PARAMETER Experiment Name: At_Petals_P Parameter: Tissue Value: Petals vs. Whole plant
  misc_feature: MA Experiment ID: 20001555 Result: Down-regulated in Transcription
  misc_feature: MA Experiment 20001555 PARAMETER Experiment Name: At_Drought_Soil_Dry_P Parameter: Age (day) Value: 24
  misc_feature: MA Experiment 20001555 PARAMETER Experiment Name: At_Drought_Soil_Dry_P Parameter: Organism Value: A. thaliana
  misc_feature: MA Experiment 20001555 PARAMETER Experiment Name: At_Drought_Soil_Dry_P Parameter: Plant Line Value: WS
  misc_feature: MA Experiment 20001555 PARAMETER Experiment Name: At_Drought_Soil_Dry_P Parameter: Post Timepoint (hr) Value: None
  misc_feature: MA Experiment 20001555 PARAMETER Experiment Name: At_Drought_Soil_Dry_P Parameter: Post-Treatment Value: None
  misc_feature: MA Experiment 20001555 PARAMETER Experiment Name: At_Drought_Soil_Dry_P Parameter: Timepoint (day) Value: 10
  misc_feature: MA Experiment 20001555 PARAMETER Experiment Name: At_Drought_Soil_Dry_P Parameter: Treatment Value: Drought vs. No Drought
  misc_feature: MA Experiment ID: 20001556 Result: Down-regulated in Transcription
  misc_feature: MA Experiment 20001556 PARAMETER Experiment Name: At_Drought_Soil_Dry_P Parameter: Age (day) Value: 26
  misc_feature: MA Experiment 20001556 PARAMETER Experiment Name: At_Drought_Soil_Dry_P Parameter: Organism Value: A. thaliana
  misc_feature: MA Experiment 20001556 PARAMETER Experiment Name: At_Drought_Soil_Dry_P Parameter: Plant Line Value: WS
  misc_feature: MA Experiment 20001556 PARAMETER Experiment Name: At_Drought_Soil_Dry_P Parameter: Post Timepoint (hr) Value: None
  misc_feature: MA Experiment 20001556 PARAMETER Experiment Name: At_Drought_Soil_Dry_P Parameter: Post-Treatment Value: None
  misc_feature: MA Experiment 20001556 PARAMETER Experiment Name: At_Drought_Soil_Dry_P Parameter: Timepoint (day) Value: 12
  misc_feature: MA Experiment 20001556 PARAMETER Experiment Name: At_Drought_Soil_Dry_P Parameter: Treatment Value: Drought vs. No Drought
  misc_feature: MA Experiment ID: 20001560 Result: Down-regulated in Transcription
  misc_feature: MA Experiment 20001560 PARAMETER Experiment Name: At_Drought_Soil_Dry_P Parameter: Age (day) Value: 28
  misc_feature: MA Experiment 20001560 PARAMETER Experiment Name: At_Drought_Soil_Dry_P Parameter: Organism Value: A. thaliana
  misc_feature: MA Experiment 20001560 PARAMETER Experiment Name: At_Drought_Soil_Dry_P Parameter: Plant Line Value: WS
  misc_feature: MA Experiment 20001560 PARAMETER Experiment Name: At_Drought_Soil_Dry_P Parameter: Post Timepoint (hr) Value: None
  misc_feature: MA Experiment 20001560 PARAMETER Experiment Name: At_Drought_Soil_Dry_P Parameter: Post-Treatment Value: None
  misc_feature: MA Experiment 20001560 PARAMETER Experiment Name: At_Drought_Soil_Dry_P Parameter: Timepoint (day) Value: 14
  misc_feature: MA Experiment 20001560 PARAMETER Experiment Name: At_Drought_Soil_Dry_P Parameter: Treatment Value: Drought vs. No Drought
aaaatatcaaaacacgagacagatttgattccatttttattactgttactatcatccaaacccttggtatttgtagccatgagtcttgtttcagatctcatcaaccttaacctctcagactccactgacaaaatcattgctgaatacatatgggttggtggttctggaatggacatgagaagcaaagccaggactctacctggaccagtgactgacccttcgcagctaccaaagtggaactatgatggttcaagcacaggccaagctcctggtgaagacagtgaagtcatcttatagttaataatctttctttcttgatcttaaatcagattcttctcattggtttttttttcgattcttgtttactaatcttttgtgttttgtacatctttgtttagccctcaagccatattcaaggatcctttccgtagaggaaacaacattcttgtcatgtgcgatgcgtacactcccgcgggtgaaccaatcccgactaacaaaagacacgctgcggctaaggtctttagcaaccctgatgttgcagctgaagtgccatggtatggtattgagcaagaatacactttactccagaaagatgtgaagtggcctgttggttggcctattggtggttatcccggccctcagggaccgtactattgcggtattggagcagacaaatcttttggcagagatgttgttgattctcactacaaggcctgcttatacgctgggatcaacattagtggcatcaatggagaagtcatgccgggtcagtgggagttccaggtcggtccagctgttggtatctcggctgctgatgaaatttgggtcgctcgttacattttggagaggatcacagagattgctggtgtagtggtatcttttgacccgaaaccgattcccggtgactggaacggtgctggtgctcactgcaactacagtaccaagtcaatgagggaagaaggcggttacgagatcatcaagaaagcaatcgataaattgggactgagacacaaagaacacattgctgcttacggtgaaggcaatgagcgtcgtctcacaggacaccacgagactgctgacatcaacactttcctttggggtgttgcgaaccgtggagcatcgatccgagtaggacgtgatacggagaaagaagggaaaggatactttgaggacaggaggccagcttcgaacatggatccttacattgtcacttccatgattgcagagactacaatcctctggaatccttgatgatcatcagatcaagaaaaaatcttgaatgtcactcaaatttgtgtttcttgcaagattcaaagtttgtgttctctatcaagcaatgtcttaggataagtcaaagatttgctctgcttattctgctttttatttacttcacatcctattgaaaacatttctgtgtattatttatgaataaacattatctt

SEQ ID NO: 74510 - protein, 266 aa, Arabidopsis thaliana
  peptide (1)..(266): Ceres Seq. ID no. 5677828
  misc_feature (13)..(265): Pfam Name: Glutamine synthetase, catalytic domain Pfam Description: Glutamine synthetase, catalytic domain
  misc_feature (1)..(266): Homolog of NCBI NO: 15240288 NR Description: glutamate--ammonia ligase; protein id: supported by cDNA: gi_16226386, supported by cDNA: gi_16930508, by cDNA: gi_19310526 [Arabidopsis thaliana]
  misc_feature (1)..(266): Homolog of NCBI NO: 99699 NR Description: glutamate-ammonia ligase (EC 6.3.1.2), cytosolic
  misc_feature (1)..(266): Homolog of NCBI NO: 228454 NR Description: Gln synthetase
  misc_feature (1)..(266): Homolog of NCBI NO: 1076475 NR Description: Gln 1.3 protein - radish
  misc_feature (1)..(266): Homolog of NCBI NO: 1084350 NR Description: glutamate-ammonia ligase (EC 6.3.1.2) - rape
  misc_feature (1)..(266): Homolog of NCBI NO: 1934756 NR Description: cytosolic glutamine synthetase [Brassica napus]
  misc_feature (1)..(266): Homolog of NCBI NO: 1076474 NR Description: Gln 1.2 protein - radish
  misc_feature (1)..(266): Homolog of NCBI NO: 481914 NR Description: glutamate-ammonia ligase (EC 6.3.1.2) - rape
  misc_feature (1)..(266): Homolog of NCBI NO: 15219598 NR Description: glutamine synthetase, putative; protein id: supported by cDNA: 2662., supported by cDNA: gi_20268695
  misc_feature (1)..(266): Homolog of NCBI NO: 21554857 NR Description: glutamine synthetase, putative [Arabidopsis
MCDAYTPAGEPIPTNKRHAAAKVFSNPDVAAEVPWYGIEQEYTLLQKDVKWPVGWPIGGYPGPQGPYYCGIGADKSFGRDVVDSHYKACLYAGINISGINGEVMPGQWEFQVGPAVGISAADEIWVARYILERITEIAGVVVSFDPKPIPGDWNGAGAHCNYSTKSMREEGGYEIIKKAIDKLGLRHKEHIAAYGEGNERRLTGHHETADINTFLWGVANRGASIRVGRDTEKEGKGYFEDRRPASNMDPYIVTSMIAETTILWNP

SEQ ID NO: 74511 - protein, 163 aa, Arabidopsis thaliana; identical to SEQ ID NO: 41888
  peptide (1)..(163): Ceres Seq. ID no. 5677829
  misc_feature (1)..(162): Pfam Name: Glutamine synthetase, catalytic domain Pfam Description: Glutamine synthetase, catalytic domain
  misc_feature (1)..(163): Homolog of NCBI NO: 15240288 NR Description: glutamate--ammonia ligase; protein id: supported by cDNA: gi_16226386, supported by cDNA: gi_16930508, by cDNA: gi_19310526 [Arabidopsis thaliana]
  misc_feature (1)..(163): Homolog of NCBI NO: 99699 NR Description: glutamate-ammonia ligase (EC 6.3.1.2), cytosolic
  misc_feature (1)..(163): Homolog of NCBI NO: 228454 NR Description: Gln synthetase
  misc_feature (1)..(163): Homolog of NCBI NO: 1076475 NR Description: Gln 1.3 protein - radish
  misc_feature (1)..(163): Homolog of NCBI NO: 1084350 NR Description: glutamate-ammonia ligase (EC 6.3.1.2) - rape
  misc_feature (1)..(163): Homolog of NCBI NO: 1934756 NR Description: cytosolic glutamine synthetase [Brassica napus]
  misc_feature (1)..(163): Homolog of NCBI NO: 1076474 NR Description: Gln 1.2 protein - radish
  misc_feature (1)..(163): Homolog of NCBI NO: 481914 NR Description: glutamate-ammonia ligase (EC 6.3.1.2) - rape
  misc_feature (1)..(163): Homolog of NCBI NO: 15219598 NR Description: glutamine synthetase, putative; protein id: supported by cDNA: 2662., supported by cDNA: gi_20268695
  misc_feature (1)..(163): Homolog of NCBI NO: 21554857 NR Description: glutamine synthetase, putative [Arabidopsis

SEQ ID NO: 74512 - DNA, 613 bp, Arabidopsis thaliana
  misc_feature (1)..(613): Ceres Seq. ID no. 5677846
  misc_feature: MA Experiment ID: 108585 Result: Up-regulated in Transcription
  misc_feature: MA Experiment 108585 PARAMETER Experiment Name: At_5mM_NaNP_cDNA_P Parameter: Timepoint (hr) Value: 6
  misc_feature: MA Experiment 108585 PARAMETER Experiment Name: At_5mM_NaNP_cDNA_P Parameter: Tissue Value: Aerial
  misc_feature: MA Experiment 108585 PARAMETER Experiment Name: At_5mM_NaNP_cDNA_P Parameter: Treatment Value: null
  misc_feature: MA Experiment ID: 108668 Result: Up-regulated in Transcription
  misc_feature: MA Experiment 108668 PARAMETER Experiment Name: At_2mM_SA_cDNA_P Parameter: Plant Line Value: WS
  misc_feature: MA Experiment 108668 PARAMETER Experiment Name: At_2mM_SA_cDNA_P Parameter: Timepoint (hr) Value: 6
  misc_feature: MA Experiment 108668 PARAMETER Experiment Name: At_2mM_SA_cDNA_P Parameter: Treatment Value: 2mM SA vs. No Treatment
  misc_feature: Pfam Name: UQ_con Pfam Description: Ubiquitin-conjugating enzyme
aataataatattcgagtagaagaagaaagatccagacaaaagcttaagcaagacctctctgtcttcgtctctctctctctctctctttgtctccgccatgacaagctcttcatctccttcacgcaaggcgttaagcaagatcgcgtgtaataggttacaaaaggagttatcagagtggcaagtaaatccaccgactgggtttaagcacagagttactgataatcttcaaaaatgggtaattgaggtaacaggagcacctggtacgctttacgctaatgaaacttataatcttcaggttgagtttcctcaacattatcctatggaagctcctcaggtgatttttgttccaccagcaccgttacatcctcatatttacagcaatggacatatttgtttagatattctgtatgactcatggtctccagcaatgacagtgagttcagtctgcatcagcatcctctcaatgctatcaagttcccccgaaaagcaacgccccacttttttttctgtaacggatcattatgtataaatgacatctgaaatgtttcagtgtctgaattaacaccttgtgcttttgtcctttctgaagtgaaaaaccatggagagtttaggc

SEQ ID NO: 74513 - protein, 143 aa, Arabidopsis thaliana
  peptide (1)..(143): Ceres Seq. ID no. 5677847
  misc_feature: Pfam Name: UQ_con Pfam Description: Ubiquitin-conjugating enzyme
  misc_feature (1)..(143): Homolog of NCBI NO: 18422281 NR Description: E2, ubiquitin-conjugating enzyme 18 (UBC18); id: At5g42990.1, supported by cDNA: gi_16648721, supported by gi_20856299 [Arabidopsis thaliana] >gi|9758588|dbj|BAB09201.1|
  misc_feature (1)..(143): Homolog of NCBI NO: 18401461 NR Description: E2, ubiquitin-conjugating enzyme 15 (UBC15);
  misc_feature (1)..(143): Homolog of NCBI NO: 481811 NR Description: ubiquitin-conjugating enzyme UBC2-1 - Arabidopsis
  misc_feature (1)..(143): Homolog of NCBI NO: 18410856 NR Description: E2, ubiquitin-conjugating enzyme 16 (UBC16); id: At1g75440.1, supported by cDNA: gi_17529345, supported by
  misc_feature (1)..(130): Homolog of NCBI NO: 34897008 NR Description: putative ubiquitin-conjugating enzyme E2 [Oryza
  misc_feature (1)..(143): Homolog of NCBI NO: 2801444 NR Description: ubiquitin-conjugating enzyme 16 [Arabidopsis
  misc_feature (1)..(143): Homolog of NCBI NO: 18419831 NR Description: E2, ubiquitin-conjugating enzyme 17 (UBC17); id: At4g36410.1, supported by cDNA: 40968., supported by cDNA:
  misc_feature (1)..(133): Homolog of NCBI NO: 4090259 NR Description: ubiquitin-conjugating enzyme E2 [Pseudotsuga
  misc_feature (1)..(100): Homolog of NCBI NO: 31712068 NR Description: putative ubiquitin-conjugating enzyme, 3'-partial
  misc_feature (1)..(102): Homolog of NCBI NO: 25293672 NR Description: protein F27F5.13 [imported] - Arabidopsis >gi|7767660|gb|AAF69157.1|AC007915_9 F27F5.13 [Arabidopsis
MTSSSSPSRKALSKIACNRLQKELSEWQVNPPTGFKHRVTDNLQKWVIEVTGAPGTLYANETYNLQVEFPQHYPMEAPQVIFVPPAPLHPHIYSNGHICLDILYDSWSPAMTVSSVCISILSMLSSSPEKQRPTFFSVTDHYV

SEQ ID NO: 74514 - DNA, 703 bp, Arabidopsis thaliana
  misc_feature (1)..(703): Ceres Seq. ID no. 5677940
  misc_feature: MA Experiment ID: 108561 Result: Down-regulated in Transcription
  misc_feature: MA Experiment 108561 PARAMETER Experiment Name: At_100uM_ABA_cDNA_P Parameter: Timepoint (hr) Value: 6
  misc_feature: MA Experiment 108561 PARAMETER Experiment Name: At_100uM_ABA_cDNA_P Parameter: Tissue Value: Aerial
  misc_feature: MA Experiment 108561 PARAMETER Experiment Name: At_100uM_ABA_cDNA_P Parameter: Treatment Value: 100uM ABA vs. No Treatment
  misc_feature: MA Experiment ID: 108573 Result: Down-regulated in Transcription
  misc_feature: MA Experiment 108573 PARAMETER Experiment Name: At_Drought_cDNA_P Parameter: Timepoint (hr) Value: 6
  misc_feature: MA Experiment 108573 PARAMETER Experiment Name: At_Drought_cDNA_P Parameter: Tissue Value: Aerial
  misc_feature: MA Experiment 108573 PARAMETER Experiment Name: At_Drought_cDNA_P Parameter: Treatment Value: Drought vs. No Drought
  misc_feature: MA Experiment ID: 108577 Result: Down-regulated in Transcription
  misc_feature: MA Experiment 108577 PARAMETER Experiment Name: At_42deg_Heat_cDNA_P Parameter: Temperature (deg C) Value: 42 vs. 22
  misc_feature: MA Experiment 108577 PARAMETER Experiment Name: At_42deg_Heat_cDNA_P Parameter: Timepoint (hr) Value: 6
  misc_feature: MA Experiment 108577 PARAMETER Experiment Name: At_42deg_Heat_cDNA_P Parameter: Tissue Value: Aerial
  misc_feature: MA Experiment ID: 20000111 Result: Down-regulated in Transcription
  misc_feature: MA Experiment 20000111 PARAMETER Experiment Name: At_42deg_Heat_cDNA_P Parameter: Temperature (deg C) Value: 42 vs. 22
  misc_feature: MA Experiment 20000111 PARAMETER Experiment Name: At_42deg_Heat_cDNA_P Parameter: Timepoint (hr) Value: 6
  misc_feature: MA Experiment 20000111 PARAMETER Experiment Name: At_42deg_Heat_cDNA_P Parameter: Tissue Value: Aerial
  misc_feature: MA Experiment ID: 20000173 Result: Down-regulated in Transcription
  misc_feature: MA Experiment 20000173 PARAMETER Experiment Name: At_42deg_Heat_P Parameter: Age (day) Value: 14
  misc_feature: MA Experiment 20000173 PARAMETER Experiment Name: At_42deg_Heat_P Parameter: Organism Value: A. thaliana
  misc_feature: MA Experiment 20000173 PARAMETER Experiment Name: At_42deg_Heat_P Parameter: Plant Line Value: WS
  misc_feature: MA Experiment 20000173 PARAMETER Experiment Name: At_42deg_Heat_P Parameter: Temperature (deg C) Value: 42 vs. 22
  misc_feature: MA Experiment 20000173 PARAMETER Experiment Name: At_42deg_Heat_P Parameter: Timepoint (hr) Value: 6
  misc_feature: MA Experiment 20000173 PARAMETER Experiment Name: At_42deg_Heat_P Parameter: Tissue Value: Aerial
  misc_feature: Pfam Name: Rab5ip Pfam Description: Rab5-interacting protein (Rab5ip)
aattaacagtgctttaaatctaagaaccctaattcaatactccacaaagggggtttcttcttcccaaggtttcagattctctccgtatccaaagttttgttttgttttttgtttgaaagcgaggatgaaagaatcgaaatcagccaagctgaatcagctacaacaacaagagaatcaccagaatgctcacttgtctccatcgaaattagcgaaattgttcgatcccgatgcttcttgggacaaggatcaattaggagatgtgttacattggattcgacaagtggtgggattgatctctggattgttatggggctctattccacttgttggaggcatttggatcattctgtttttggcgatatcctctgggatagtttatggttactacgcaatgattctcaaggttgatgaagaagatttcggaggccacgcagctttactccaagagggtctctttgcgtcacttactctctttttgctcgcatggattcttgtctatagcttggcacacttctgaaaaaaaagctgagcaacattcttttcactcagcagcaaaggcattggaactttggaacgaatctttttgttcttttgtttgtttttgtaaactgtctgaagataaggctacaagagacaaaacgttatagtaacaatttttatgaatcttttgaatgttacaaaagctttctatagtatcattttt

SEQ ID NO: 74515 - protein, 171 aa, Arabidopsis thaliana; identical to SEQ ID NO: 36540
  peptide (1)..(171): Ceres Seq. ID no. 5677941
  misc_feature: Pfam Name: Rab5ip Pfam Description: Rab5-interacting protein (Rab5ip)
  misc_feature (42)..(171): Homolog of NCBI NO: 15238396 NR Description: putative Rab5-interacting protein - like; protein
  misc_feature (42)..(159): Homolog of NCBI NO: 8885547 NR Description: gb|AAF17201.1~gene_id:F2O15.9~similar to unknown
  misc_feature (42)..(171): Homolog of NCBI NO: 18401926 NR Description: expressed protein; protein id: At2g29020.1, by cDNA: 10164., supported by cDNA: gi_18086566 [Arabidopsis >gi|18086567|gb|AAL57707.1| At2g29020/T9I4.10 [Arabidopsis
  misc_feature (42)..(160): Homolog of NCBI NO: 14719336 NR Description: hypothetical protein [Oryza sativa]
  misc_feature (61)..(171): Homolog of NCBI NO: 13385630 NR Description: RIKEN cDNA 1110008F13 [Mus musculus] Protein C20orf24 homolog >gi|12832447|dbj|BAB22111.1| unnamed product [Mus musculus] >gi|12834314|dbj|BAB22864.1| unnamed
  misc_feature (61)..(171): Homolog of NCBI NO: 10047116 NR Description: putative Rab5-interacting protein [Homo sapiens]
  misc_feature (61)..(171): Homolog of NCBI NO: 27704314 NR Description: similar to RIKEN cDNA 1110008F13 [Mus musculus]
  misc_feature (54)..(171): Homolog of NCBI NO: 27503935 NR Description: Similar to RIKEN cDNA 1110008F13 gene [Danio
  misc_feature (61)..(170): Homolog of NCBI NO: 34872254 NR Description: similar to RIKEN cDNA 1110008F13 [Rattus
  misc_feature (61)..(170): Homolog of NCBI NO: 24211596 NR Description: Protein C20orf24 (Rab5-interacting protein)

SEQ ID NO: 74516 - protein, 130 aa, Arabidopsis thaliana; identical to SEQ ID NO: 36541
  peptide (1)..(130): Ceres Seq. ID no. 5677942
  misc_feature: Pfam Name: Rab5ip Pfam Description: Rab5-interacting protein (Rab5ip)
  misc_feature (1)..(130): Homolog of NCBI NO: 15238396 NR Description: putative Rab5-interacting protein - like; protein
  misc_feature (1)..(118): Homolog of NCBI NO: 8885547 NR Description: gb|AAF17201.1~gene_id:F2O15.9~similar to unknown
  misc_feature (1)..(130): Homolog of NCBI NO: 18401926 NR Description: expressed protein; protein id: At2g29020.1, by cDNA: 10164., supported by cDNA: gi_18086566 [Arabidopsis >gi|18086567|gb|AAL57707.1| At2g29020/T9I4.10 [Arabidopsis
  misc_feature (1)..(119): Homolog of NCBI NO: 14719336 NR Description: hypothetical protein [Oryza sativa]
  misc_feature (20)..(130): Homolog of NCBI NO: 13385630 NR Description: RIKEN cDNA 1110008F13 [Mus musculus] Protein C20orf24 homolog >gi|12832447|dbj|BAB22111.1| unnamed product [Mus musculus] >gi|12834314|dbj|BAB22864.1| unnamed
  misc_feature (20)..(130): Homolog of NCBI NO: 10047116 NR Description: putative Rab5-interacting protein [Homo sapiens]
  misc_feature (20)..(130): Homolog of NCBI NO: 27704314 NR Description: similar to RIKEN cDNA 1110008F13 [Mus musculus]
  misc_feature (13)..(130): Homolog of NCBI NO: 27503935 NR Description: Similar to RIKEN cDNA 1110008F13 gene [Danio
  misc_feature (20)..(129): Homolog of NCBI NO: 34872254 NR Description: similar to RIKEN cDNA 1110008F13 [Rattus
  misc_feature (20)..(129): Homolog of NCBI NO: 24211596 NR Description: Protein C20orf24 (Rab5-interacting protein)

SEQ ID NO: 74517 - DNA, 1276 bp, Arabidopsis thaliana
  misc_feature (1)..(1276): Ceres Seq. ID no. 5677982
  misc_feature: MA Experiment ID: 20000113 Result: Up-regulated in Transcription
  misc_feature: MA Experiment 20000113 PARAMETER Experiment Name: At_42deg_Heat_cDNA_P Parameter: Temperature (deg C) Value: 42 vs. 22
  misc_feature: MA Experiment 20000113 PARAMETER Experiment Name: At_42deg_Heat_cDNA_P Parameter: Timepoint (hr) Value: 8
  misc_feature: MA Experiment 20000113 PARAMETER Experiment Name: At_42deg_Heat_cDNA_P Parameter: Tissue Value: Aerial
  misc_feature: MA Experiment ID: 20000437 Result: Up-regulated in Transcription
  misc_feature: MA Experiment 20000437 PARAMETER Experiment Name: At_Drought_P Parameter: Age (day) Value: 8
  misc_feature: MA Experiment 20000437 PARAMETER Experiment Name: At_Drought_P Parameter: Organism Value: A. thaliana
  misc_feature: MA Experiment 20000437 PARAMETER Experiment Name: At_Drought_P Parameter: Plant Line Value: WS
  misc_feature: MA Experiment 20000437 PARAMETER Experiment Name: At_Drought_P Parameter: Timepoint (hr) Value: 24
  misc_feature: MA Experiment 20000437 PARAMETER Experiment Name: At_Drought_P Parameter: Tissue Value: Whole Plant
  misc_feature: MA Experiment 20000437 PARAMETER Experiment Name: At_Drought_P Parameter: Treatment Value: Drought vs. No Drought
  misc_feature: MA Experiment ID: 20001905 Result: Up-regulated in Transcription
  misc_feature: MA Experiment 20001905 PARAMETER Experiment Name: At_Drought_Reproduction_P Parameter: Age (day) Value: 40
  misc_feature: MA Experiment 20001905 PARAMETER Experiment Name: At_Drought_Reproduction_P Parameter: Organism Value: A. thaliana
  misc_feature: MA Experiment 20001905 PARAMETER Experiment Name: At_Drought_Reproduction_P Parameter: Plant Line Value: WS
  misc_feature: MA Experiment 20001905 PARAMETER Experiment Name: At_Drought_Reproduction_P Parameter: Timepoint (day) Value: 10
  misc_feature: MA Experiment 20001905 PARAMETER Experiment Name: At_Drought_Reproduction_P Parameter: Tissue Value: Rosettes
  misc_feature: MA Experiment 20001905 PARAMETER Experiment Name: At_Drought_Reproduction_P Parameter: Treatment Value: Drought vs. No Drought
acgacgacggaggaggagaagcaaacccagaaaccttaaaaattcagaaaaagggacgaccttttttccgatcttatcgatttttgaatgagattagaagaacctatcttctaagtttttctttgatatctttttctctttgatcgatggatgagtcgttcgctaatctacaatcaagccatttgcttggttcagttccggctgtgatcagcgacgacaagagaagcacaaatgtaccaatagcaagcgtcaatgaaggcccttctgcaagcatgcaaatatttccaccgaatctaggaaacaatacaaagggttatcaaactcttgagagcccaacagaaggaccagcacaacagccatcaaacaactggaagggcttttttaatgtctactcatatacccaatacttcgacgtggacacggacgttgttttgaacagattaatgagctctttatatcctactagtggagattttttcaacaagattgatgcaaaccctgatttggtatggacttgtctggatctgcactacgcttgtgtttgtgcttgcttctctcggaaattgtgctacatatctcgtgaagaaacgaaccgacagtaatgctccttggatctttgatgtgaactatatgaatttggcagcatctataatatatggatatgcaataattgtgcctctgggattttattttgcactccgttatatggggtccaaagctgatcttctaagattctggtgcctttggggatactctctcttcattttcgttccaacctctcttccattgcttattccagtagagtttctgagatgggtgattatactcttagctggtagtgcatcatcgtgttttgttgccctgaatctacggtcttacctcgagacgaacaatgatatcacggttgtaatggctgcagcatttggtctgcaaatggttctttcaatcttcatcaaggtctggttctttccttaatctccatgagacggtcaacaccagacaaaacatatatatgtaaaaacctttagattttgatgtgctgcggtagaactaagaatgtcgttaccagaaaatgaaacccacaaagtagaagaaggaacatatccgctaaatcattcggtttcgtttttactggcggattttcatcgttgcttgtaacgattgtgttttttcattttttggttttgtttgctaccacttattttgcttatggagtaaaaatatataaaagaaaaaaaggaagttttcaagatttattgcaatttactctcttttg

SEQ ID NO: 74518 - protein, 161 aa, Arabidopsis thaliana
  peptide (1)..(161): Ceres Seq. ID no. 5677983
  misc_feature (7)..(139): Pfam Name: Yip1 domain Pfam Description: Yip1 domain
  misc_feature (7)..(161): Homolog of NCBI NO: 30688039 NR Description: expressed protein [Arabidopsis thaliana] unknown protein [Arabidopsis thaliana]
  misc_feature (7)..(160): Homolog of NCBI NO: 34912560 NR Description: P0410E03.18 [Oryza sativa (japonica
  misc_feature (7)..(160): Homolog of NCBI NO: 6729038 NR Description: unknown protein [Arabidopsis thaliana]
  misc_feature (7)..(160): Homolog of NCBI NO: 30679454 NR Description: expressed protein [Arabidopsis thaliana] unknown protein [Arabidopsis thaliana]
  misc_feature (7)..(160): Homolog of NCBI NO: 30690667 NR Description: expressed protein [Arabidopsis thaliana]
  misc_feature (7)..(160): Homolog of NCBI NO: 38564308 NR Description: At5g27490 [Arabidopsis thaliana]
  misc_feature (7)..(160): Homolog of NCBI NO: 32408303 NR Description: hypothetical protein [Neurospora crassa]
  misc_feature (7)..(160): Homolog of NCBI NO: 13128976 NR Description: hypothetical protein MGC3262 [Homo sapiens] Unknown (protein for MGC:3262) [Homo sapiens]
  misc_feature (7)..(160): Homolog of NCBI NO: 10092643 NR Description: hypothetical protein DJ167A19.1 [Homo sapiens]
  misc_feature (5)..(160): Homolog of NCBI NO: 17536971 NR Description: Putative membrane protein, with at least 4 domains, of eukaryotic origin [Caenorhabditis elegans]
MQTLIWYGLVWICTTLVFVLASLGNCATYLVKKRTDSNAPWIFDVNYMNLAASIIYGYAIIVPLGFYFALRYMGSKADLLRFWCLWGYSLFIFVPTSLPLLIPVEFLRWVIILLAGSASSCFVALNLRSYLETNNDITVVMAAAFGLQMVLSIFIKVWFFP

SEQ ID NO: 74519 - protein, 151 aa, Arabidopsis thaliana
  peptide (1)..(151): Ceres Seq. ID no. 5677984
  misc_feature (88)..(149): Pfam Name: Yip1 domain Pfam Description: Yip1 domain
  misc_feature (1)..(149): Homolog of NCBI NO: 30688039 NR Description: expressed protein [Arabidopsis thaliana] unknown protein [Arabidopsis thaliana]
  misc_feature (69)..(129): Homolog of NCBI NO: 13128976 NR Description: hypothetical protein MGC3262 [Homo sapiens] Unknown (protein for MGC:3262) [Homo sapiens]
  misc_feature (18)..(130): Homolog of NCBI NO: 17536971 NR Description: Putative membrane protein, with at least 4 domains, of eukaryotic origin [Caenorhabditis elegans]
  misc_feature (32)..(130): Homolog of NCBI NO: 39584707 NR Description: Hypothetical protein CBG19633 [Caenorhabditis
  misc_feature (4)..(151): Homolog of NCBI NO: 30690667 NR Description: expressed protein [Arabidopsis thaliana]
  misc_feature (4)..(151): Homolog of NCBI NO: 38564308 NR Description: At5g27490 [Arabidopsis thaliana]
MDESFANLQSSHLLGSVPAVISDDKRSTNVPIASVNEGPSASMQIFPPNLGNNTKGYQTLESPTEGPAQQPSNNWKGFFNVYSYTQYFDVDTDVVLNRLMSSLYPTSGDFFNKIDANPDLVWTCLDLHYACVCACFSRKLCYISREETNRQ

SEQ ID NO: 74520 - protein, 114 aa, Arabidopsis thaliana
  peptide (1)..(114): Ceres Seq. ID no. 5677985
  misc_feature (1)..(92): Pfam Name: Yip1 domain Pfam Description: Yip1 domain
  misc_feature (1)..(114): Homolog of NCBI NO: 30688039 NR Description: expressed protein [Arabidopsis thaliana] unknown protein [Arabidopsis thaliana]
  misc_feature (1)..(113): Homolog of NCBI NO: 34912560 NR Description: P0410E03.18 [Oryza sativa (japonica
  misc_feature (1)..(113): Homolog of NCBI NO: 6729038 NR Description: unknown protein [Arabidopsis thaliana]
  misc_feature (1)..(113): Homolog of NCBI NO: 30679454 NR Description: expressed protein [Arabidopsis thaliana] unknown protein [Arabidopsis thaliana]
  misc_feature (1)..(113): Homolog of NCBI NO: 30690667 NR Description: expressed protein [Arabidopsis thaliana]
  misc_feature (1)..(113): Homolog of NCBI NO: 38564308 NR Description: At5g27490 [Arabidopsis thaliana]
  misc_feature (1)..(113): Homolog of NCBI NO: 32408303 NR Description: hypothetical protein [Neurospora crassa]
  misc_feature (1)..(113): Homolog of NCBI NO: 13128976 NR Description: hypothetical protein MGC3262 [Homo sapiens] Unknown (protein for MGC:3262) [Homo sapiens]
  misc_feature (1)..(113): Homolog of NCBI NO: 10092643 NR Description: hypothetical protein DJ167A19.1 [Homo sapiens]
  misc_feature (1)..(113): Homolog of NCBI NO: 17536971 NR Description: Putative membrane protein, with at least 4 domains, of eukaryotic origin [Caenorhabditis elegans]
MNLAASIIYGYAIIVPLGFYFALRYMGSKADLLRFWCLWGYSLFIFVPTSLPLLIPVEFLRWVIILLAGSASSCFVALNLRSYLETNNDITVVMAAAFGLQMVLSIFIKVWFFP

SEQ ID NO: 74521 - DNA, 787 bp, Arabidopsis thaliana
  misc_feature (1)..(787): Ceres Seq. ID no. 5678016
  misc_feature: MA Experiment ID: 20000307 Result: Up-regulated in Transcription
  misc_feature: MA Experiment 20000307 PARAMETER Experiment Name: At_Germinating_Seeds_Sub_P Parameter: Age (hr) Value: 24 vs. 0
  misc_feature: MA Experiment 20000307 PARAMETER Experiment Name: At_Germinating_Seeds_Sub_P Parameter: Organism Value: A. thaliana
  misc_feature: MA Experiment 20000307 PARAMETER Experiment Name: At_Germinating_Seeds_Sub_P Parameter: Plant Line Value: WS
  misc_feature: MA Experiment 20000307 PARAMETER Experiment Name: At_Germinating_Seeds_Sub_P Parameter: Tissue Value: Germinating Seeds
  misc_feature: MA Experiment ID: 20000314 Result: Down-regulated in Transcription
  misc_feature: MA Experiment 20000314 PARAMETER Experiment Name: At_14day_Shoots-Roots_Sub_P Parameter: Age (day) Value: 14
  misc_feature: MA Experiment 20000314 PARAMETER Experiment Name: At_14day_Shoots-Roots_Sub_P Parameter: Organism Value: A. thaliana
  misc_feature: MA Experiment 20000314 PARAMETER Experiment Name: At_14day_Shoots-Roots_Sub_P Parameter: Plant Line Value: WS
  misc_feature: MA Experiment 20000314 PARAMETER Experiment Name: At_14day_Shoots-Roots_Sub_P Parameter: Tissue Value: Roots vs. Whole Plant
acacatccgacggggaaaaagagttccgacaagaatcgagaactgaaagatttgtcatttgtctctcaaatatctgtggagagaagagaaattggaataaagaagacagtgttgtgagagagagagagagagagagagatgagttcgtctctacctctgaggctacttcttcctcttacaacttctctgatttctcctcctcctcctcctccagattctttccatgctccttcgtcgttcagatcgaaaaaccctaatttcaaacgccgattgtcttcttcttcctgtttaaccaaaaatcatatatacacatcaggtgcatctggaactaatgctgcagtcatcagaggtgcattgagagcagagagaccagagctgcttacagtaattctaccccaaagtttgaaaaaacaacctcctgagagccaagaactattgtctaaagtacaaaacgtggtagaaaagccacataatgaccatttgccattgttagaagccagcaggttgtgtaatatggacatcatatcacaagttcaacaagtgatctgcttcgcgtttcatgacagtaagcttcttatggagacatgtcaagaagccaaaaatctgcgcaagattgtcactctcttctacctcgattgattcacattcactctttattttcttctcgttacaaaacagagaagataatcctccttgtaaattatgaatcttgattaaacaaacacacacaaccacaattatattcttttgtctaaattttgatacacatcagtgctatttttatagg

SEQ ID NO: 74522 - protein, 166 aa, Arabidopsis thaliana
  peptide (1)..(166): Ceres Seq. ID no. 5678017
  misc_feature (45)..(166): Homolog of NCBI NO: 21537298 NR Description: unknown [Arabidopsis thaliana]
  misc_feature (1)..(49): Homolog of NCBI NO: 21537298 NR Description: unknown [Arabidopsis thaliana]
  misc_feature (45)..(166): Homolog of NCBI NO: 15232185 NR Description: putative protein; protein id: At3g59870.1, by cDNA: 12735. [Arabidopsis thaliana] >gi|11357602|pir||T47811
  misc_feature (1)..(49): Homolog of NCBI NO: 15232185 NR Description: putative protein; protein id: At3g59870.1, by cDNA: 12735. [Arabidopsis thaliana] >gi|11357602|pir||T47811
  misc_feature (45)..(166): Homolog of NCBI NO: 30689549 NR Description: predicted protein [Arabidopsis thaliana]
  misc_feature (45)..(142): Homolog of NCBI NO: 7486491 NR Description: hypothetical protein At2g43940 [imported] - thaliana >gi|3212851|gb|AAC23402.1| unknown protein [Arabidopsis
  misc_feature (45)..(166): Homolog of NCBI NO: 22298406 NR Description: ORF_ID:tlr0863~hypothetical protein
  misc_feature (1)..(166): Homolog of NCBI NO: 13812204 NR Description: hypothetical protein [Guillardia theta]
  misc_feature (45)..(166): Homolog of NCBI NO: 23043068 NR Description: hypothetical protein [Trichodesmium erythraeum
  misc_feature (40)..(166): Homolog of NCBI NO: 17232156 NR Description: hypothetical protein [Nostoc sp. PCC 7120]
MSSSLPLRLLLPLTTSLISPPPPPPDSFHAPSSFRSKNPNFKRRLSSSSCLTKNHIYTSGASGTNAAVIRGALRAERPELLTVILPQSLKKQPPESQELLSKVQNVVEKPHNDHLPLLEASRLCNMDIISQVQQVICFAFHDSKLLMETCQEAKNLRKIVTLFYLD

SEQ ID NO: 74523 - protein, 84 aa, Arabidopsis thaliana
  peptide (1)..(84): Ceres Seq. ID no. 5678018
TSDGEKEFRQESRTERFVICLSNICGEKRNWNKEDSVVRERERERDEFVSTSEATSSSYNFSDFSSSSSSRFFPCSFVVQIEKP

SEQ ID NO: 74524 - DNA, 1315 bp, Arabidopsis thaliana
  misc_feature (1)..(1315): Ceres Seq. ID no. 5678092
  misc_feature: MA Experiment ID: 108461 Result: Down-regulated in Transcription
  misc_feature: MA Experiment 108461 PARAMETER Experiment Name: At_Germinating_Seeds_cDNA_P Parameter: Age (day) Value: 1 vs. 0
  misc_feature: MA Experiment 108461 PARAMETER Experiment Name: At_Germinating_Seeds_cDNA_P Parameter: Tissue Value: Germinating Seeds
  misc_feature: MA Experiment ID: 108462 Result: Down-regulated in Transcription
  misc_feature: MA Experiment 108462 PARAMETER Experiment Name: At_Germinating_Seeds_cDNA_P Parameter: Age (day) Value: 2 vs. 0
  misc_feature: MA Experiment 108462 PARAMETER Experiment Name: At_Germinating_Seeds_cDNA_P Parameter: Tissue Value: Germinating Seeds
  misc_feature: MA Experiment ID: 108463 Result: Down-regulated in Transcription
  misc_feature: MA Experiment 108463 PARAMETER Experiment Name: At_Germinating_Seeds_cDNA_P Parameter: Age (day) Value: 3 vs. 0
  misc_feature: MA Experiment 108463 PARAMETER Experiment Name: At_Germinating_Seeds_cDNA_P Parameter: Tissue Value: Germinating Seeds
  misc_feature: MA Experiment ID: 20000573 Result: Up-regulated in Transcription
  misc_feature: MA Experiment 20000573 PARAMETER Experiment Name: At_100uM_ABA_Mutants__P Parameter: Organism Value: A. thaliana
  misc_feature: MA Experiment 20000573 PARAMETER Experiment Name: At_100uM_ABA_Mutants__P Parameter: Plant Line Value: CS22 vs. Ler wt
  misc_feature: MA Experiment 20000573 PARAMETER Experiment Name: At_100uM_ABA_Mutants__P Parameter: Timepoint (hr) Value: N/A
  misc_feature: MA Experiment 20000573 PARAMETER Experiment Name: At_100uM_ABA_Mutants__P Parameter: Tissue Value: Whole Plant
  misc_feature: MA Experiment 20000573 PARAMETER Experiment Name: At_100uM_ABA_Mutants__P Parameter: Treatment Value: None
  misc_feature: MA Experiment ID: 20001554 Result: Up-regulated in Transcription
  misc_feature: MA Experiment 20001554 PARAMETER Experiment Name: At_Drought_Soil_Dry_P Parameter: Age (day) Value: 21
  misc_feature: MA Experiment 20001554 PARAMETER Experiment Name: At_Drought_Soil_Dry_P Parameter: Organism Value: A. thaliana
  misc_feature: MA Experiment 20001554 PARAMETER Experiment Name: At_Drought_Soil_Dry_P Parameter: Plant Line Value: WS
  misc_feature: MA Experiment 20001554 PARAMETER Experiment Name: At_Drought_Soil_Dry_P Parameter: Post Timepoint (hr) Value: None
  misc_feature: MA Experiment 20001554 PARAMETER Experiment Name: At_Drought_Soil_Dry_P Parameter: Post-Treatment Value: None
  misc_feature: MA Experiment 20001554 PARAMETER Experiment Name: At_Drought_Soil_Dry_P Parameter: Timepoint (day) Value: 7
  misc_feature: MA Experiment 20001554 PARAMETER Experiment Name: At_Drought_Soil_Dry_P Parameter: Treatment Value: Drought vs. No Drought
  misc_feature: MA Experiment ID: 20001555 Result: Up-regulated in Transcription
  misc_feature: MA Experiment 20001555 PARAMETER Experiment Name: At_Drought_Soil_Dry_P Parameter: Age (day) Value: 24
  misc_feature: MA Experiment 20001555 PARAMETER Experiment Name: At_Drought_Soil_Dry_P Parameter: Organism Value: A. thaliana
  misc_feature: MA Experiment 20001555 PARAMETER Experiment Name: At_Drought_Soil_Dry_P Parameter: Plant Line Value: WS
  misc_feature: MA Experiment 20001555 PARAMETER Experiment Name: At_Drought_Soil_Dry_P Parameter: Post Timepoint (hr) Value: None
  misc_feature: MA Experiment 20001555 PARAMETER Experiment Name: At_Drought_Soil_Dry_P Parameter: Post-Treatment Value: None
  misc_feature: MA Experiment 20001555 PARAMETER Experiment Name: At_Drought_Soil_Dry_P Parameter: Timepoint (day) Value: 10
  misc_feature: MA Experiment 20001555 PARAMETER Experiment Name: At_Drought_Soil_Dry_P Parameter: Treatment Value: Drought vs. No Drought
  misc_feature: MA Experiment ID: 20001556 Result: Up-regulated in Transcription
  misc_feature: MA Experiment 20001556 PARAMETER Experiment Name: At_Drought_Soil_Dry_P Parameter: Age (day) Value: 26
  misc_feature: MA Experiment 20001556 PARAMETER Experiment Name: At_Drought_Soil_Dry_P Parameter: Organism Value: A. thaliana
  misc_feature: MA Experiment 20001556 PARAMETER Experiment Name: At_Drought_Soil_Dry_P Parameter: Plant Line Value: WS
  misc_feature: MA Experiment 20001556 PARAMETER Experiment Name: At_Drought_Soil_Dry_P Parameter: Post Timepoint (hr) Value: None
  misc_feature: MA Experiment 20001556 PARAMETER Experiment Name: At_Drought_Soil_Dry_P Parameter: Post-Treatment Value: None
  misc_feature: MA Experiment 20001556 PARAMETER Experiment Name: At_Drought_Soil_Dry_P Parameter: Timepoint (day) Value: 12
  misc_feature: MA Experiment 20001556 PARAMETER Experiment Name: At_Drought_Soil_Dry_P Parameter: Treatment Value: Drought vs. No Drought
agatatgggagaacggtttttccgaaatgagatgccggagtttgtaccggaagatttatccggagaagaagaaactgttaccgaatgtaaagattcgttgacgaaactgctatcacttccgtacaaatcattctcagagaagcttcacagatatgctctaagcatcaaagataaagtagtctgggagacatgggaacgatctggaaaacgtgttcgagattataacttgtatactggagttcttgggacagcttatctcttgttcaaatcttatcaggttactagaaatgaagatgatcttaagctatgcttagagaatgttgaagcttgtgatgtagcttcaagagattctgagcgagtgacatttatatgtggctatgctggtgtatgtgctcttggtgctgttgcagcgaagtgtttaggtgatgaccagttatatgatcgttacttagcccgtttccgaggggcttcctagtgacttgccatatgagttgctatatggtagagcaggatacttgtgggcgtgtttgttcttgaataagcatattggtcaggagagtatatcatctgaacgaatgagatcagtggttgaggaaatcttcagggcaggaagacaactcgggaataaaggaacttgtccattgatgtatgagtggcacgggaagaggtactggggggctgcacacggtttagctgggatcatgaatgttttgatgcatacggaacttgaaccagatgaaatcaaagatgtcaaaggtacactaagctatatgatacaaaaccgttttcctagcgggaattacctatctagtgaaggaagcaaatcagatcgccttgttcactggtgtcacggtgctcctggtgttgctctcacacttgtaaaggcagctcaggtttataacactaaggaatttgtagaggcagcaatggaggcaggagaagttgtgtggagccgtggattgcttaaacgagtaggaatctgtcacggtatcagcggaaacacatacgtgtttctttctctataccggttaacaagaaacccaaagtatttgtaccgcgctaaagctttcgcgtctttcctactcgataaatcagagaagttaatctcagaaggtcaaatgcatggaggagatagacccttctctctctttgaaggtatcggaggaatggcctacatgttactcgacatgaatgatccaacacaagctctgtttccaggttatgaactctaaaatgtataaaacttacactgtaacaataagcttagatactgaaatgtagaatagctgtctatattaataagattttatacatc

SEQ ID NO: 74525 - protein, 218 aa, Arabidopsis thaliana; identical to SEQ ID NO: 41440
  peptide (1)..(218): Ceres Seq. ID no. 5678093
  misc_feature (1)..(218): Pfam Name: Lanthionine synthetase C-like protein Pfam Description: Lanthionine synthetase C-like protein
  misc_feature (1)..(218): Homolog of NCBI NO: 15219126 NR Description: putative G protein-coupled receptor; protein id: [Arabidopsis thaliana] >gi|25405614|pir||E96570 hypothetical
  misc_feature (1)..(218): Homolog of NCBI NO: 30681129 NR Description: expressed protein [Arabidopsis thaliana] unknown protein [Arabidopsis thaliana]
  misc_feature (1)..(218): Homolog of NCBI NO: 37535720 NR Description: putative lanthionine synthetase [Oryza sativa
  misc_feature (1)..(218): Homolog of NCBI NO: 25411993 NR Description: hypothetical protein At2g20770 [imported] - thaliana >gi|4454471|gb|AAD20918.1| hypothetical protein
  misc_feature (1)..(218): Homolog of NCBI NO: 21742091 NR Description: OSJNBa0074L08.13 [Oryza sativa (japonica
  misc_feature (1)..(218): Homolog of NCBI NO: 8489877 NR Description: putative 7-transmembrane G-protein-coupled
  misc_feature (1)..(218): Homolog of NCBI NO: 15238395 NR Description: G protein-coupled receptor-like protein; protein At5g65280.1, supported by cDNA: gi_15451139, supported by cDNA:
  misc_feature (1)..(218): Homolog of NCBI NO: 15451140 NR Description: G protein-coupled receptor-like protein
  misc_feature (1)..(218): Homolog of NCBI NO: 19526936 NR Description: RIKEN cDNA 1700003F10 [Mus musculus]
  misc_feature (1)..(218): Homolog of NCBI NO: 8923911 NR Description: LanC lantibiotic synthetase component C-like 2; specific adriamycin sensitivity protein; LanC (bacterial

SEQ ID NO: 74526 - protein, 195 aa, Arabidopsis thaliana; identical to SEQ ID NO: 41441
  peptide (1)..(195): Ceres Seq. ID no. 5678094
  misc_feature (1)..(195): Pfam Name: Lanthionine synthetase C-like protein Pfam Description: Lanthionine synthetase C-like protein
  misc_feature (1)..(195): Homolog of NCBI NO: 15219126 NR Description: putative G protein-coupled receptor; protein id: [Arabidopsis thaliana] >gi|25405614|pir||E96570 hypothetical
  misc_feature (1)..(195): Homolog of NCBI NO: 30681129 NR Description: expressed protein [Arabidopsis thaliana] unknown protein [Arabidopsis thaliana]
  misc_feature (1)..(195): Homolog of NCBI NO: 37535720 NR Description: putative lanthionine synthetase [Oryza sativa
  misc_feature (1)..(195): Homolog of NCBI NO: 25411993 NR Description: hypothetical protein At2g20770 [imported] - thaliana >gi|4454471|gb|AAD20918.1| hypothetical protein
  misc_feature (1)..(195): Homolog of NCBI NO: 21742091 NR Description: OSJNBa0074L08.13 [Oryza sativa (japonica
  misc_feature (1)..(195): Homolog of NCBI NO: 8489877 NR Description: putative 7-transmembrane G-protein-coupled
  misc_feature (1)..(195): Homolog of NCBI NO: 15238395 NR Description: G protein-coupled receptor-like protein; protein At5g65280.1, supported by cDNA: gi_15451139, supported by cDNA:
  misc_feature (1)..(195): Homolog of NCBI NO: 15451140 NR Description: G protein-coupled receptor-like protein
  misc_feature (1)..(195): Homolog of NCBI NO: 19526936 NR Description: RIKEN cDNA 1700003F10 [Mus musculus]
  misc_feature (1)..(195): Homolog of NCBI NO: 8923911 NR Description: LanC lantibiotic synthetase component C-like 2; specific adriamycin sensitivity protein; LanC (bacterial

SEQ ID NO: 74527 - protein, 176 aa, Arabidopsis thaliana; identical to SEQ ID NO: 41442
  peptide (1)..(176): Ceres Seq. ID no. 5678095
  misc_feature (1)..(176): Pfam Name: Lanthionine synthetase C-like protein Pfam Description: Lanthionine synthetase C-like protein
  misc_feature (1)..(176): Homolog of NCBI NO: 15219126 NR Description: putative G protein-coupled receptor; protein id: [Arabidopsis thaliana] >gi|25405614|pir||E96570 hypothetical
  misc_feature (1)..(176): Homolog of NCBI NO: 30681129 NR Description: expressed protein [Arabidopsis thaliana] unknown protein [Arabidopsis thaliana]
  misc_feature (1)..(176): Homolog of NCBI NO: 37535720 NR Description: putative lanthionine synthetase [Oryza sativa
  misc_feature (1)..(176): Homolog of NCBI NO: 25411993 NR Description: hypothetical protein At2g20770 [imported] - thaliana >gi|4454471|gb|AAD20918.1| hypothetical protein
  misc_feature (1)..(176): Homolog of NCBI NO: 21742091 NR Description: OSJNBa0074L08.13 [Oryza sativa (japonica
  misc_feature (1)..(176): Homolog of NCBI NO: 8489877 NR Description: putative 7-transmembrane G-protein-coupled
  misc_feature (1)..(176): Homolog of NCBI NO: 15238395 NR Description: G protein-coupled receptor-like protein; protein At5g65280.1, supported by cDNA: gi_15451139, supported by cDNA:
  misc_feature (1)..(176): Homolog of NCBI NO: 15451140 NR Description: G protein-coupled receptor-like protein
  misc_feature (1)..(176): Homolog of NCBI NO: 19526936 NR Description: RIKEN cDNA 1700003F10 [Mus musculus]
  misc_feature (1)..(176): Homolog of NCBI NO: 8923911 NR Description: LanC lantibiotic synthetase component C-like 2; specific adriamycin sensitivity protein; LanC (bacterial

SEQ ID NO: 74528 - DNA, 1654 bp, Arabidopsis thaliana
  misc_feature (1)..(1654): Ceres Seq. ID no. 5678100
  misc_feature: MA Experiment ID: 108488 Result: Down-regulated in Transcription
  misc_feature: MA Experiment ID: 108573 Result: Down-regulated in Transcription
  misc_feature: MA Experiment 108573 PARAMETER Experiment Name: At_Drought_cDNA_P Parameter: Timepoint (hr) Value: 6
  misc_feature: MA Experiment 108573 PARAMETER Experiment Name: At_Drought_cDNA_P Parameter: Tissue Value: Aerial
  misc_feature: MA Experiment 108573 PARAMETER Experiment Name: At_Drought_cDNA_P Parameter: Treatment Value: Drought vs. No Drought
  misc_feature: MA Experiment ID: 20000071 Result: Up-regulated in Transcription
  misc_feature: MA Experiment 20000071 PARAMETER Experiment Name: At_100uM_ABA_Mutants_cDNA_P Parameter: Plant Line Value: CS8104
  misc_feature: MA Experiment 20000071 PARAMETER Experiment Name: At_100uM_ABA_Mutants_cDNA_P Parameter: Timepoint (hr) Value: 6
  misc_feature: MA Experiment 20000071 PARAMETER Experiment Name: At_100uM_ABA_Mutants_cDNA_P Parameter: Tissue Value: Aerial
  misc_feature: MA Experiment 20000071 PARAMETER Experiment Name: At_100uM_ABA_Mutants_cDNA_P Parameter: Treatment Value: 100uM ABA vs. No Treatment
  misc_feature: MA Experiment ID: 20000171 Result: Down-regulated in Transcription
  misc_feature: MA Experiment 20000171 PARAMETER Experiment Name: At_42deg_Heat_P Parameter: Age (day) Value: 14
  misc_feature: MA Experiment 20000171 PARAMETER Experiment Name: At_42deg_Heat_P Parameter: Organism Value: A. thaliana
  misc_feature: MA Experiment 20000171 PARAMETER Experiment Name: At_42deg_Heat_P Parameter: Plant Line Value: WS
  misc_feature: MA Experiment 20000171 PARAMETER Experiment Name: At_42deg_Heat_P Parameter: Temperature (deg C) Value: 42 vs. 22
  misc_feature: MA Experiment 20000171 PARAMETER Experiment Name: At_42deg_Heat_P Parameter: Timepoint (hr) Value: 1
  misc_feature: MA Experiment 20000171 PARAMETER Experiment Name: At_42deg_Heat_P Parameter: Tissue Value: Aerial
  misc_feature: MA Experiment ID: 20000173 Result: Down-regulated in Transcription
  misc_feature: MA Experiment 20000173 PARAMETER Experiment Name: At_42deg_Heat_P Parameter: Age (day) Value: 14
  misc_feature: MA Experiment 20000173 PARAMETER Experiment Name: At_42deg_Heat_P Parameter: Organism Value: A. thaliana
  misc_feature: MA Experiment 20000173 PARAMETER Experiment Name: At_42deg_Heat_P Parameter: Plant Line Value: WS
  misc_feature: MA Experiment 20000173 PARAMETER Experiment Name: At_42deg_Heat_P Parameter: Temperature (deg C) Value: 42 vs. 22
  misc_feature: MA Experiment 20000173 PARAMETER Experiment Name: At_42deg_Heat_P Parameter: Timepoint (hr) Value: 6
  misc_feature: MA Experiment 20000173 PARAMETER Experiment Name: At_42deg_Heat_P Parameter: Tissue Value: Aerial
  misc_feature: MA Experiment ID: 20000180 Result: Up-regulated in Transcription
  misc_feature: MA Experiment 20000180 PARAMETER Experiment Name: At_Germinating_Seeds_P Parameter: Age (hr) Value: 24 vs. 0
  misc_feature: MA Experiment 20000180 PARAMETER Experiment Name: At_Germinating_Seeds_P Parameter: Tissue Value: Germinating Seeds
  misc_feature: MA Experiment ID: 20000182 Result: Down-regulated in Transcription
  misc_feature: MA Experiment 20000182 PARAMETER Experiment Name: At_2mM_SA_P Parameter: Age (day) Value: 14
  misc_feature: MA Experiment 20000182 PARAMETER Experiment Name: At_2mM_SA_P Parameter: Organism Value: A. thaliana
  misc_feature: MA Experiment 20000182 PARAMETER Experiment Name: At_2mM_SA_P Parameter: Plant Line Value: WS
  misc_feature: MA Experiment 20000182 PARAMETER Experiment Name: At_2mM_SA_P Parameter: Timepoint (hr) Value: 6
  misc_feature: MA Experiment 20000182 PARAMETER Experiment Name: At_2mM_SA_P Parameter: Tissue Value: Aerial
  misc_feature: MA Experiment 20000182 PARAMETER Experiment Name: At_2mM_SA_P Parameter: Treatment Value: 2mM SA vs. No Treatment
  misc_feature: MA Experiment ID: 20000184 Result: Up-regulated in Transcription
  misc_feature: MA Experiment 20000184 PARAMETER Experiment Name: At_Shoots__P Parameter: Age (day) Value: 7
  misc_feature: MA Experiment 20000184 PARAMETER Experiment Name: At_Shoots__P Parameter: Tissue Value: Shoots vs. Whole Plant
  misc_feature: MA Experiment ID: 20000214 Result: Down-regulated in Transcription
  misc_feature: MA Experiment 20000214 PARAMETER Experiment Name: At_4deg_Cold_P Parameter: Timepoint (hr) Value: 6
  misc_feature: MA Experiment ID: 20000227 Result: Up-regulated in Transcription
  misc_feature: MA Experiment 20000227 PARAMETER Experiment Name: At_Root-Tips-vs-Tops_P Parameter: Tissue Value: Root Tips vs. Root Tops
  misc_feature: MA Experiment ID: 20000436 Result: Down-regulated in Transcription
  misc_feature: MA Experiment 20000436 PARAMETER Experiment Name: At_Drought_P Parameter: Age (day) Value: 7
  misc_feature: MA Experiment 20000436 PARAMETER Experiment Name: At_Drought_P Parameter: Organism Value: A. thaliana
  misc_feature: MA Experiment 20000436 PARAMETER Experiment Name: At_Drought_P Parameter: Plant Line Value: WS
  misc_feature: MA Experiment 20000436 PARAMETER Experiment Name: At_Drought_P Parameter: Timepoint (hr) Value: 12
  misc_feature: MA Experiment 20000436 PARAMETER Experiment Name: At_Drought_P Parameter: Tissue Value: Whole Plant
  misc_feature: MA Experiment 20000436 PARAMETER Experiment Name: At_Drought_P Parameter: Treatment Value: Drought vs. No Drought
  misc_feature: MA Experiment ID: 20000437 Result: Down-regulated in Transcription
  misc_feature: MA Experiment 20000437 PARAMETER Experiment Name: At_Drought_P Parameter: Age (day) Value: 8
  misc_feature: MA Experiment 20000437 PARAMETER Experiment Name: At_Drought_P Parameter: Organism Value: A. thaliana
  misc_feature: MA Experiment 20000437 PARAMETER Experiment Name: At_Drought_P Parameter: Plant Line Value: WS
  misc_feature: MA Experiment 20000437 PARAMETER Experiment Name: At_Drought_P Parameter: Timepoint (hr) Value: 24
  misc_feature: MA Experiment 20000437 PARAMETER Experiment Name: At_Drought_P Parameter: Tissue Value: Whole Plant
  misc_feature: MA Experiment 20000437 PARAMETER Experiment Name: At_Drought_P Parameter: Treatment Value: Drought vs. No Drought
  misc_feature: MA Experiment ID: 20000438 Result: Up-regulated in Transcription
  misc_feature: MA Experiment 20000438 PARAMETER Experiment Name: At_Shoots__P Parameter: Age (day) Value: 14
  misc_feature: MA Experiment 20000438 PARAMETER Experiment Name: At_Shoots__P Parameter: Tissue Value: Shoots vs. Whole Plant
  misc_feature: MA Experiment ID: 20000794 Result: Down-regulated in Transcription
  misc_feature: MA Experiment 20000794 PARAMETER Experiment Name: At_Petals_P Parameter: Age (day) Value: 23-25 days
  misc_feature: MA Experiment 20000794 PARAMETER Experiment Name: At_Petals_P Parameter: Plant Line Value: WS
  misc_feature: MA Experiment 20000794 PARAMETER Experiment Name: At_Petals_P Parameter: Tissue Value: Petals vs. Whole plant
  misc_feature: MA Experiment ID: 20001554 Result: Down-regulated in Transcription
  misc_feature: MA Experiment 20001554 PARAMETER Experiment Name: At_Drought_Soil_Dry_P Parameter: Age (day) Value: 21
  misc_feature: MA Experiment 20001554 PARAMETER Experiment Name: At_Drought_Soil_Dry_P Parameter: Organism Value: A. thaliana
  misc_feature: MA Experiment 20001554 PARAMETER Experiment Name: At_Drought_Soil_Dry_P Parameter: Plant Line Value: WS
  misc_feature: MA Experiment 20001554 PARAMETER Experiment Name: At_Drought_Soil_Dry_P Parameter: Post Timepoint (hr) Value: None
  misc_feature: MA Experiment 20001554 PARAMETER Experiment Name: At_Drought_Soil_Dry_P Parameter: Post-Treatment Value: None
  misc_feature: MA Experiment 20001554 PARAMETER Experiment Name: At_Drought_Soil_Dry_P Parameter: Timepoint (day) Value: 7
  misc_feature: MA Experiment 20001554 PARAMETER Experiment Name: At_Drought_Soil_Dry_P Parameter: Treatment Value: Drought vs. No Drought
  misc_feature: MA Experiment ID: 20001555 Result: Down-regulated in Transcription
  misc_feature: MA Experiment 20001555 PARAMETER Experiment Name: At_Drought_Soil_Dry_P Parameter: Age (day) Value: 24
  misc_feature: MA Experiment 20001555 PARAMETER Experiment Name: At_Drought_Soil_Dry_P Parameter: Organism Value: A. thaliana
  misc_feature: MA Experiment 20001555 PARAMETER Experiment Name: At_Drought_Soil_Dry_P Parameter: Plant Line Value: WS
  misc_feature: MA Experiment 20001555 PARAMETER Experiment Name: At_Drought_Soil_Dry_P Parameter: Post Timepoint (hr) Value: None
  misc_feature: MA Experiment 20001555 PARAMETER Experiment Name: At_Drought_Soil_Dry_P Parameter: Post-Treatment Value: None
  misc_feature: MA Experiment 20001555 PARAMETER Experiment Name: At_Drought_Soil_Dry_P Parameter: Timepoint (day) Value: 10
  misc_feature: MA Experiment 20001555 PARAMETER Experiment Name: At_Drought_Soil_Dry_P Parameter: Treatment Value: Drought vs. No Drought
  misc_feature: MA Experiment ID: 20001556 Result: Down-regulated in Transcription
  misc_feature: MA Experiment 20001556 PARAMETER Experiment Name: At_Drought_Soil_Dry_P Parameter: Age (day) Value: 26
  misc_feature: MA Experiment 20001556 PARAMETER Experiment Name: At_Drought_Soil_Dry_P Parameter: Organism Value: A. thaliana
  misc_feature: MA Experiment 20001556 PARAMETER Experiment Name: At_Drought_Soil_Dry_P Parameter: Plant Line Value: WS
  misc_feature: MA Experiment 20001556 PARAMETER Experiment Name: At_Drought_Soil_Dry_P Parameter: Post Timepoint (hr) Value: None
  misc_feature: MA Experiment 20001556 PARAMETER Experiment Name: At_Drought_Soil_Dry_P Parameter: Post-Treatment Value: None
  misc_feature: MA Experiment 20001556 PARAMETER Experiment Name: At_Drought_Soil_Dry_P Parameter: Timepoint (day) Value: 12
  misc_feature: MA Experiment 20001556 PARAMETER Experiment Name: At_Drought_Soil_Dry_P Parameter: Treatment Value: Drought vs. No Drought
  misc_feature: MA Experiment ID: 20001558 Result: Up-regulated in Transcription
  misc_feature: MA Experiment 20001558 PARAMETER Experiment Name: At_Drought_Soil_Dry_P Parameter: Age (day) Value: 27
  misc_feature: MA Experiment 20001558 PARAMETER Experiment Name: At_Drought_Soil_Dry_P Parameter: Organism Value: A. thaliana
  misc_feature: MA Experiment 20001558 PARAMETER Experiment Name: At_Drought_Soil_Dry_P Parameter: Plant Line Value: WS
  misc_feature: MA Experiment 20001558 PARAMETER Experiment Name: At_Drought_Soil_Dry_P Parameter: Post Timepoint (hr) Value: 6
  misc_feature: MA Experiment 20001558 PARAMETER Experiment Name: At_Drought_Soil_Dry_P Parameter: Post-Treatment Value: Re-Water vs. No Drought
  misc_feature: MA Experiment 20001558 PARAMETER Experiment Name: At_Drought_Soil_Dry_P Parameter: Timepoint (day) Value: 13
  misc_feature: MA Experiment 20001558 PARAMETER Experiment Name: At_Drought_Soil_Dry_P Parameter: Treatment Value: Drought vs. No Drought
  misc_feature: MA Experiment ID: 20001559 Result: Down-regulated in Transcription
  misc_feature: MA Experiment 20001559 PARAMETER Experiment Name: At_Drought_Soil_Dry_P Parameter: Age (day) Value: 28
  misc_feature: MA Experiment 20001559 PARAMETER Experiment Name: At_Drought_Soil_Dry_P Parameter: Organism Value: A. thaliana
  misc_feature: MA Experiment 20001559 PARAMETER Experiment Name: At_Drought_Soil_Dry_P Parameter: Plant Line Value: WS
  misc_feature: MA Experiment 20001559 PARAMETER Experiment Name: At_Drought_Soil_Dry_P Parameter: Post Timepoint (hr) Value: 29
  misc_feature: MA Experiment 20001559 PARAMETER Experiment Name: At_Drought_Soil_Dry_P Parameter: Post-Treatment Value: Re-Water vs. No Drought
  misc_feature: MA Experiment 20001559 PARAMETER Experiment Name: At_Drought_Soil_Dry_P Parameter: Timepoint (day) Value: 14
  misc_feature: MA Experiment 20001559 PARAMETER Experiment Name: At_Drought_Soil_Dry_P Parameter: Treatment Value: Drought vs. No Drought
  misc_feature: MA Experiment ID: 20001560 Result: Up-regulated in Transcription
  misc_feature: MA Experiment 20001560 PARAMETER Experiment Name: At_Drought_Soil_Dry_P Parameter: Age (day) Value: 28
  misc_feature: MA Experiment 20001560 PARAMETER Experiment Name: At_Drought_Soil_Dry_P Parameter: Organism Value: A. thaliana
  misc_feature: MA Experiment 20001560 PARAMETER Experiment Name: At_Drought_Soil_Dry_P Parameter: Plant Line Value: WS
  misc_feature: MA Experiment 20001560 PARAMETER Experiment Name: At_Drought_Soil_Dry_P Parameter: Post Timepoint (hr) Value: None
  misc_feature: MA Experiment 20001560 PARAMETER Experiment Name: At_Drought_Soil_Dry_P Parameter: Post-Treatment Value: None
  misc_feature: MA Experiment 20001560 PARAMETER Experiment Name: At_Drought_Soil_Dry_P Parameter: Timepoint (day) Value: 14
  misc_feature: MA Experiment 20001560 PARAMETER Experiment Name: At_Drought_Soil_Dry_P Parameter: Treatment Value: Drought vs. No Drought
  misc_feature: MA Experiment ID: 20001904 Result: Down-regulated in Transcription
  misc_feature: MA Experiment 20001904 PARAMETER Experiment Name: At_Drought_Reproduction_P Parameter: Age (day) Value: 37
  misc_feature: MA Experiment 20001904 PARAMETER Experiment Name: At_Drought_Reproduction_P Parameter: Organism Value: A. thaliana
  misc_feature: MA Experiment 20001904 PARAMETER Experiment Name: At_Drought_Reproduction_P Parameter: Plant Line Value: WS
  misc_feature: MA Experiment 20001904 PARAMETER Experiment Name: At_Drought_Reproduction_P Parameter: Timepoint (day) Value: 7
  misc_feature: MA Experiment 20001904 PARAMETER Experiment Name: At_Drought_Reproduction_P Parameter: Tissue Value: Rosettes
  misc_feature: MA Experiment 20001904 PARAMETER Experiment Name: At_Drought_Reproduction_P Parameter: Treatment Value: Drought vs. No Drought
  misc_feature: MA Experiment ID: 20001906 Result: Down-regulated in Transcription
  misc_feature: MA Experiment 20001906 PARAMETER Experiment Name: At_Drought_Reproduction_P Parameter: Age (day) Value: 35
  misc_feature: MA Experiment 20001906 PARAMETER Experiment Name: At_Drought_Reproduction_P Parameter: Organism Value: A. thaliana
  misc_feature: MA Experiment 20001906 PARAMETER Experiment Name: At_Drought_Reproduction_P Parameter: Plant Line Value: WS
  misc_feature: MA Experiment 20001906 PARAMETER Experiment Name: At_Drought_Reproduction_P Parameter: Timepoint (day) Value: 5
  misc_feature: MA Experiment 20001906 PARAMETER Experiment Name: At_Drought_Reproduction_P Parameter: Tissue Value: Siliques
  misc_feature: MA Experiment 20001906 PARAMETER Experiment Name: At_Drought_Reproduction_P Parameter: Treatment Value: Drought vs. No Drought
  misc_feature: MA Experiment ID: 20001911 Result: Down-regulated in Transcription
  misc_feature: MA Experiment 20001911 PARAMETER Experiment Name: At_Drought_Reproduction_P Parameter: Age (day) Value: 40
  misc_feature: MA Experiment 20001911 PARAMETER Experiment Name: At_Drought_Reproduction_P Parameter: Organism Value: A. thaliana
  misc_feature: MA Experiment 20001911 PARAMETER Experiment Name: At_Drought_Reproduction_P Parameter: Plant Line Value: WS
  misc_feature: MA Experiment 20001911 PARAMETER Experiment Name: At_Drought_Reproduction_P Parameter: Timepoint (day) Value: 10
  misc_feature: MA Experiment 20001911 PARAMETER Experiment Name: At_Drought_Reproduction_P Parameter: Tissue Value: Flowers
  misc_feature: MA Experiment 20001911 PARAMETER Experiment Name: At_Drought_Reproduction_P Parameter: Treatment Value: Drought vs. No Drought
ctttttgcttctctcttaactaccattacattacatacctcttctttctaggtggtaacaatcttgatactggcattaaccagtgttattcccatttacgcaaacgttcacggcgccgggaaaatatgcgacgaacttggccggcgatcattgagtacaagaccacacagtgtctccattacagattttggagctgttggagatggcaaaacgctcaacactcttgcgtttcaaaacgccgttttctatcttatgtctttcgccgacaaaggtggggcccagctctatgttccgccgggacattggctcaccgggagttttagcctcaccagccacctcactctctttctcgaaaacggcgccgttatagtcgcttctcaggatccatcgcattgggaagtggttgatcctttaccttcatacggaaggggaattgatttgcctgggaagcgatacaagagtttgatcaacggtaacaagctacatgatgttgttgtaacaggtgataatggaactatagatggtcaaggcttggtttggtgggatcggtttacttctcattccttaaagtataaccgtcctcacctcatcgagtttctttcttctgaaaatgtaattgtctccaatcttacgttcttgaatgctcctgcttattcaatctattcaatctactctagccatgtatatattcataagatattggcccattcttctcctaaatctccttatacaatcggtattgtaccagattcttctgattacgtctgcatccaaaactctaccattaacgtggggtatgacgcgatttccctcaaaagcggttgggatgaatatggaattgcctattctcgtcccactgaaaatgttcatataagaaatgtgtaccttcgaggagcttctggttcctctatctcctttggcagtgaaatgtctggtggaatatctgatgtcgtggttgataacgctcatatacactactcgttaaccggcattgcctttagaaccacaaaaggcagaggtggttatatcaaagagatcgatatttcaaacatcgatatgttgagaataggtactgccattgttgctaatggtagctttggatctcaccctgatgataaatatgatgtgaatgctctcccacttgtgagtcacatcagattaagcaacatttctggagagaacattggcattgcggggaaattgtttgggatcaaagaatctccatttagctcagtgactttgtcgaatgtttctttgtcgatgagctcaggttcttctgtttcttggcaatgctcctacgtttacgggtcctcggagtcagtcattcctgaaccgtgtcccgagctgaagagagatgctgatgcttacggtagagctgcagtctagtgaaacagactgcaaaagaaaaaagaaaaaaaaagcaagaaacatttcttgggattctttgataggattcaattcatcaatcatttcatattttgtggagttagagaaggtcagattctttcctcaagtaaaccacattgtctttagatcatacatgttcctttcggttattctggtttcctatttttatgttgtttgcatattctgagataagaaatctgtacaggttcatttcttcattcatgtgtaaacaaagaaattttgtttc

SEQ ID NO: 74529 - protein, 377 aa, Arabidopsis thaliana; identical to SEQ ID NO: 48553
  peptide (1)..(377): Ceres Seq. ID no. 5678101
  misc_feature (6)..(362): Pfam Name: Glycosyl hydrolases family 28 Pfam Description: Glycosyl hydrolases family 28
  misc_feature (1)..(377): Homolog of NCBI NO: 30679999 NR Description: polygalacturonase, putative [Arabidopsis >gi|20260262|gb|AAM13029.1| unknown protein [Arabidopsis >gi|22136514|gb|AAM91335.1| unknown protein [Arabidopsis
  misc_feature (1)..(377): Homolog of NCBI NO: 18397713 NR Description: polygalacturonase, putative; protein id: supported by cDNA: 38575. [Arabidopsis thaliana]
  misc_feature (1)..(377): Homolog of NCBI NO: 21593399 NR Description: polygalacturonase-like protein [Arabidopsis
  misc_feature (1)..(375): Homolog of NCBI NO: 22327662 NR Description: Expressed protein; protein id: At5g49215.1, by cDNA: gi_20258820 [Arabidopsis thaliana] unknown protein [Arabidopsis thaliana]
  misc_feature (1)..(365): Homolog of NCBI NO: 7939578 NR Description: polygalacturonase-like protein [Arabidopsis
  misc_feature (1)..(365): Homolog of NCBI NO: 15228881 NR Description: polygalacturonase, putative; protein id: supported by cDNA: 17203., supported by cDNA: gi_14334801, by cDNA: gi_21280834 [Arabidopsis thaliana]
  misc_feature (1)..(365): Homolog of NCBI NO: 21553827 NR Description: polygalacturonase, putative [Arabidopsis thaliana]
  misc_feature (1)..(368): Homolog of NCBI NO: 40714685 NR Description: putative polygalacturonase [Oryza sativa
  misc_feature (1)..(366): Homolog of NCBI NO: 18412253 NR Description: polygalacturonase, putative; protein id: supported by cDNA: gi_13358184 [Arabidopsis thaliana] AT3g62110 [Arabidopsis thaliana] >gi|23397166|gb|AAN31866.1|
  misc_feature (1)..(366): Homolog of NCBI NO: 11263971 NR Description: hypothetical protein T17J13.70 - Arabidopsis >gi|6899921|emb|CAB71871.1| putative protein [Arabidopsis

SEQ ID NO: 74530 - DNA, 1131 bp, Arabidopsis thaliana
  misc_feature (1)..(1131): Ceres Seq. ID no. 5678106
  misc_feature: MA Experiment ID: 108434 Result: Down-regulated in Transcription
  misc_feature: MA Experiment 108434 PARAMETER Experiment Name: At_Root_Tips_cDNA_P Parameter: Tissue Value: Root Tips
  misc_feature: MA Experiment ID: 108461 Result: Up-regulated in Transcription
  misc_feature: MA Experiment 108461 PARAMETER Experiment Name: At_Germinating_Seeds_cDNA_P Parameter: Age (day) Value: 1 vs. 0
  misc_feature: MA Experiment 108461 PARAMETER Experiment Name: At_Germinating_Seeds_cDNA_P Parameter: Tissue Value: Germinating Seeds
  misc_feature: MA Experiment ID: 108462 Result: Up-regulated in Transcription
  misc_feature: MA Experiment 108462 PARAMETER Experiment Name: At_Germinating_Seeds_cDNA_P Parameter: Age (day) Value: 2 vs. 0
  misc_feature: MA Experiment 108462 PARAMETER Experiment Name: At_Germinating_Seeds_cDNA_P Parameter: Tissue Value: Germinating Seeds
  misc_feature: MA Experiment ID: 108463 Result: Up-regulated in Transcription
  misc_feature: MA Experiment 108463 PARAMETER Experiment Name: At_Germinating_Seeds_cDNA_P Parameter: Age (day) Value: 3 vs. 0
  misc_feature: MA Experiment 108463 PARAMETER Experiment Name: At_Germinating_Seeds_cDNA_P Parameter: Tissue Value: Germinating Seeds
  misc_feature: MA Experiment ID: 108464 Result: Up-regulated in Transcription
  misc_feature: MA Experiment 108464 PARAMETER Experiment Name: At_Germinating_Seeds_cDNA_P Parameter: Age (day) Value: 4 vs. 0
  misc_feature: MA Experiment 108464 PARAMETER Experiment Name: At_Germinating_Seeds_cDNA_P Parameter: Tissue Value: Germinating Seeds
  misc_feature: MA Experiment ID: 108473 Result: Down-regulated in Transcription
  misc_feature: MA Experiment 108473 PARAMETER Experiment Name: At_Drought_Flowers_cDNA_P Parameter: Timepoint (hr) Value: 7 d
  misc_feature: MA Experiment 108473 PARAMETER Experiment Name: At_Drought_Flowers_cDNA_P Parameter: Tissue Value: Flower
  misc_feature: MA Experiment 108473 PARAMETER Experiment Name: At_Drought_Flowers_cDNA_P Parameter: Treatment Value: Drought vs. No Drought
  misc_feature: MA Experiment ID: 108488 Result: Down-regulated in Transcription
  misc_feature: MA Experiment ID: 108501 Result: Down-regulated in Transcription
  misc_feature: MA Experiment 108501 PARAMETER Experiment Name: At_ap2_floral_buds_cDNA_P Parameter: Plant Line Value: ap2 (Ler.)
  misc_feature: MA Experiment 108501 PARAMETER Experiment Name: At_ap2_floral_buds_cDNA_P Parameter: Tissue Value: Closed Flower
  misc_feature: MA Experiment ID: 108572 Result: Down-regulated in Transcription
  misc_feature: MA Experiment 108572 PARAMETER Experiment Name: At_Drought_cDNA_P Parameter: Timepoint (hr) Value: 1
  misc_feature: MA Experiment 108572 PARAMETER Experiment Name: At_Drought_cDNA_P Parameter: Tissue Value: Aerial
  misc_feature: MA Experiment 108572 PARAMETER Experiment Name: At_Drought_cDNA_P Parameter: Treatment Value: Drought vs. No Drought
  misc_feature: MA Experiment ID: 108573 Result: Down-regulated in Transcription
  misc_feature: MA Experiment 108573 PARAMETER Experiment Name: At_Drought_cDNA_P Parameter: Timepoint (hr) Value: 6
  misc_feature: MA Experiment 108573 PARAMETER Experiment Name: At_Drought_cDNA_P Parameter: Tissue Value: Aerial
  misc_feature: MA Experiment 108573 PARAMETER Experiment Name: At_Drought_cDNA_P Parameter: Treatment Value: Drought vs. No Drought
  misc_feature: MA Experiment ID: 108579 Result: Up-regulated in Transcription
  misc_feature: MA Experiment 108579 PARAMETER Experiment Name: At_4deg_Cold_cDNA_P Parameter: Temperature (deg C) Value: 4 vs. 22
  misc_feature: MA Experiment 108579 PARAMETER Experiment Name: At_4deg_Cold_cDNA_P Parameter: Timepoint (hr) Value: 6
  misc_feature: MA Experiment 108579 PARAMETER Experiment Name: At_4deg_Cold_cDNA_P Parameter: Tissue Value: Aerial
  misc_feature: MA Experiment ID: 108585 Result: Up-regulated in Transcription
  misc_feature: MA Experiment 108585 PARAMETER Experiment Name: At_5mM_NaNP_cDNA_P Parameter: Timepoint (hr) Value: 6
  misc_feature: MA Experiment 108585 PARAMETER Experiment Name: At_5mM_NaNP_cDNA_P Parameter: Tissue Value: Aerial
  misc_feature: MA Experiment 108585 PARAMETER Experiment Name: At_5mM_NaNP_cDNA_P Parameter: Treatment Value: null
  misc_feature: MA Experiment ID: 108594 Result: Down-regulated in Transcription
  misc_feature: MA Experiment 108594 PARAMETER Experiment Name: At_Ler-rhl_Root_cDNA_P Parameter: Plant Line Value: null
  misc_feature: MA Experiment ID: 108605 Result: Up-regulated in Transcription
  misc_feature: MA Experiment 108605 PARAMETER Experiment Name: At_100uM_ABA_cDNA_P Parameter: Timepoint (hr) Value: 6
  misc_feature: MA Experiment 108605 PARAMETER Experiment Name: At_100uM_ABA_cDNA_P Parameter: Tissue Value: Aerial
  misc_feature: MA Experiment 108605 PARAMETER Experiment Name: At_100uM_ABA_cDNA_P Parameter: Treatment Value: 100uM ABA vs. No Treatment
  misc_feature: MA Experiment ID: 108607 Result: Up-regulated in Transcription
  misc_feature: MA Experiment 108607 PARAMETER Experiment Name: At_100uM_ABA_cDNA_P Parameter: Timepoint (hr) Value: 4
  misc_feature: MA Experiment 108607 PARAMETER Experiment Name: At_100uM_ABA_cDNA_P Parameter: Tissue Value: Aerial
  misc_feature: MA Experiment 108607 PARAMETER Experiment Name: At_100uM_ABA_cDNA_P Parameter: Treatment Value: 100uM ABA vs. No Treatment
  misc_feature: MA Experiment ID: 108609 Result: Up-regulated in Transcription
  misc_feature: MA Experiment 108609 PARAMETER Experiment Name: At_100uM_ABA_cDNA_P Parameter: Timepoint (hr) Value: 24
  misc_feature: MA Experiment 108609 PARAMETER Experiment Name: At_100uM_ABA_cDNA_P Parameter: Tissue Value: Aerial
  misc_feature: MA Experiment 108609 PARAMETER Experiment Name: At_100uM_ABA_cDNA_P Parameter: Treatment Value: 100uM ABA vs. No Treatment
  misc_feature: MA Experiment ID: 20000069 Result: Up-regulated in Transcription
  misc_feature: MA Experiment 20000069 PARAMETER Experiment Name: At_100uM_ABA_Mutants_cDNA_P Parameter: Plant Line Value: CS23
  misc_feature: MA Experiment 20000069 PARAMETER Experiment Name: At_100uM_ABA_Mutants_cDNA_P Parameter: Timepoint (hr) Value: 6
  misc_feature: MA Experiment 20000069 PARAMETER Experiment Name: At_100uM_ABA_Mutants_cDNA_P Parameter: Tissue Value: Aerial
  misc_feature: MA Experiment 20000069 PARAMETER Experiment Name: At_100uM_ABA_Mutants_cDNA_P Parameter: Treatment Value: 100uM ABA vs. No Treatment
  misc_feature: MA Experiment ID: 20000070 Result: Up-regulated in Transcription
  misc_feature: MA Experiment 20000070 PARAMETER Experiment Name: At_100uM_ABA_Mutants_cDNA_P Parameter: Plant Line Value: CS24
  misc_feature: MA Experiment 20000070 PARAMETER Experiment Name: At_100uM_ABA_Mutants_cDNA_P Parameter: Timepoint (hr) Value: 6
  misc_feature: MA Experiment 20000070 PARAMETER Experiment Name: At_100uM_ABA_Mutants_cDNA_P Parameter: Tissue Value: Aerial
  misc_feature: MA Experiment 20000070 PARAMETER Experiment Name: At_100uM_ABA_Mutants_cDNA_P Parameter: Treatment Value: 100uM ABA vs. No Treatment
  misc_feature: MA Experiment ID: 20000071 Result: Up-regulated in Transcription
  misc_feature: MA Experiment 20000071 PARAMETER Experiment Name: At_100uM_ABA_Mutants_cDNA_P Parameter: Plant Line Value: CS8104
  misc_feature: MA Experiment 20000071 PARAMETER Experiment Name: At_100uM_ABA_Mutants_cDNA_P Parameter: Timepoint (hr) Value: 6
  misc_feature: MA Experiment 20000071 PARAMETER Experiment Name: At_100uM_ABA_Mutants_cDNA_P Parameter: Tissue Value: Aerial
  misc_feature: MA Experiment 20000071 PARAMETER Experiment Name: At_100uM_ABA_Mutants_cDNA_P Parameter: Treatment Value: 100uM ABA vs. No Treatment
  misc_feature: MA Experiment ID: 20000086 Result: Up-regulated in Transcription
  misc_feature: MA Experiment 20000086 PARAMETER Experiment Name: At_100uM_ABA_Mutants_cDNA_P Parameter: Plant Line Value: CS22
  misc_feature: MA Experiment 20000086 PARAMETER Experiment Name: At_100uM_ABA_Mutants_cDNA_P Parameter: Timepoint (hr) Value: 6
  misc_feature: MA Experiment 20000086 PARAMETER Experiment Name: At_100uM_ABA_Mutants_cDNA_P Parameter: Tissue Value: Aerial
  misc_feature: MA Experiment 20000086 PARAMETER Experiment Name: At_100uM_ABA_Mutants_cDNA_P Parameter: Treatment Value: 100uM ABA vs. No Treatment
  misc_feature: MA Experiment ID: 20000088 Result: Up-regulated in Transcription
  misc_feature: MA Experiment 20000088 PARAMETER Experiment Name: At_100uM_ABA_Mutants_cDNA_P Parameter: Plant Line Value: Landsberg
  misc_feature: MA Experiment 20000088 PARAMETER Experiment Name: At_100uM_ABA_Mutants_cDNA_P Parameter: Timepoint (hr) Value: 6
  misc_feature: MA Experiment 20000088 PARAMETER Experiment Name: At_100uM_ABA_Mutants_cDNA_P Parameter: Tissue Value: Aerial
  misc_feature: MA Experiment 20000088 PARAMETER Experiment Name: At_100uM_ABA_Mutants_cDNA_P Parameter: Treatment Value: 100uM ABA vs. No Treatment
  misc_feature: MA Experiment ID: 20000117 Result: Up-regulated in Transcription
  misc_feature: MA Experiment 20000117 PARAMETER Experiment Name: At_100uM_ABA_Mutants_cDNA_P Parameter: Plant Line Value: Columbia
  misc_feature: MA Experiment 20000117 PARAMETER Experiment Name: At_100uM_ABA_Mutants_cDNA_P Parameter: Timepoint (hr) Value: 6
  misc_feature: MA Experiment 20000117 PARAMETER Experiment Name: At_100uM_ABA_Mutants_cDNA_P Parameter: Tissue Value: Aerial
  misc_feature: MA Experiment 20000117 PARAMETER Experiment Name: At_100uM_ABA_Mutants_cDNA_P Parameter: Treatment Value: 100uM ABA vs. No Treatment
  misc_feature: MA Experiment ID: 20000169 Result: Up-regulated in Transcription
  misc_feature: MA Experiment 20000169 PARAMETER Experiment Name: At_100uM_ABA_P Parameter: Age (day) Value: 14
  misc_feature: MA Experiment 20000169 PARAMETER Experiment Name: At_100uM_ABA_P Parameter: Organism Value: A. thaliana
  misc_feature: MA Experiment 20000169 PARAMETER Experiment Name: At_100uM_ABA_P Parameter: Plant Line Value: WS
  misc_feature: MA Experiment 20000169 PARAMETER Experiment Name: At_100uM_ABA_P Parameter: Timepoint (hr) Value: 6
  misc_feature: MA Experiment 20000169 PARAMETER Experiment Name: At_100uM_ABA_P Parameter: Tissue Value: Aerial
  misc_feature: MA Experiment 20000169 PARAMETER Experiment Name: At_100uM_ABA_P Parameter: Treatment Value: 100uM ABA vs. No Treatment
  misc_feature: MA Experiment ID: 20000179 Result: Up-regulated in Transcription
  misc_feature: MA Experiment 20000179 PARAMETER Experiment Name: At_Germinating_Seeds_P Parameter: Age (hr) Value: 6 vs. 0
  misc_feature: MA Experiment 20000179 PARAMETER Experiment Name: At_Germinating_Seeds_P Parameter: Tissue Value: Germinating Seeds
  misc_feature: MA Experiment ID: 20000180 Result: Up-regulated in Transcription
  misc_feature: MA Experiment 20000180 PARAMETER Experiment Name: At_Germinating_Seeds_P Parameter: Age (hr) Value: 24 vs. 0
  misc_feature: MA Experiment 20000180 PARAMETER Experiment Name: At_Germinating_Seeds_P Parameter: Tissue Value: Germinating Seeds
  misc_feature: MA Experiment ID: 20000184 Result: Down-regulated in Transcription
  misc_feature: MA Experiment 20000184 PARAMETER Experiment Name: At_Shoots__P Parameter: Age (day) Value: 7
  misc_feature: MA Experiment 20000184 PARAMETER Experiment Name: At_Shoots__P Parameter: Tissue Value: Shoots vs. Whole Plant
  misc_feature: MA Experiment ID: 20000185 Result: Down-regulated in Transcription
  misc_feature: MA Experiment 20000185 PARAMETER Experiment Name: At_Roots__P Parameter: Age (day) Value: 7 vs. 21
  misc_feature: MA Experiment 20000185 PARAMETER Experiment Name: At_Roots__P Parameter: Organism Value: A. thaliana
  misc_feature: MA Experiment 20000185 PARAMETER Experiment Name: At_Roots__P Parameter: Tissue Value: Roots vs. Whole Plant
  misc_feature: MA Experiment ID: 20000224 Result: Down-regulated in Transcription
  misc_feature: MA Experiment ID: 20000234 Result: Down-regulated in Transcription
  misc_feature: MA Experiment 20000234 PARAMETER Experiment Name: At_Siliques_P Parameter: Age (day) Value: 21
  misc_feature: MA Experiment 20000234 PARAMETER Experiment Name: At_Siliques_P Parameter: Organism Value: A. thaliana
  misc_feature: MA Experiment 20000234 PARAMETER Experiment Name: At_Siliques_P Parameter: Plant Line Value: WS
  misc_feature: MA Experiment 20000234 PARAMETER Experiment Name: At_Siliques_P Parameter: Tissue Value: Less Than 5mm Siliques vs. Whole Plant
  misc_feature: MA Experiment ID: 20000235 Result: Down-regulated in Transcription
  misc_feature: MA Experiment 20000235 PARAMETER Experiment Name: At_Siliques_P Parameter: Age (day) Value: 21
  misc_feature: MA Experiment 20000235 PARAMETER Experiment Name: At_Siliques_P Parameter: Organism Value: A. thaliana
  misc_feature: MA Experiment 20000235 PARAMETER Experiment Name: At_Siliques_P Parameter: Plant Line Value: WS
  misc_feature: MA Experiment 20000235 PARAMETER Experiment Name: At_Siliques_P Parameter: Tissue Value: 5-10mm Siliques vs. Whole Plant
  misc_feature: MA Experiment ID: 20000264 Result: Up-regulated in Transcription
  misc_feature: MA Experiment 20000264 PARAMETER Experiment Name: At_Open_Flower_P Parameter: Age (day) Value: 21
  misc_feature: MA Experiment 20000264 PARAMETER Experiment Name: At_Open_Flower_P Parameter: Plant Line Value: WS
  misc_feature: MA Experiment 20000264 PARAMETER Experiment Name: At_Open_Flower_P Parameter: Tissue Value: Open Flower vs. Whole Plant
  misc_feature: MA Experiment ID: 20000265 Result: Down-regulated in Transcription
  misc_feature: MA Experiment 20000265 PARAMETER Experiment Name: At_Open_Flower_P Parameter: Age (day) Value: 21
  misc_feature: MA Experiment 20000265 PARAMETER Experiment Name: At_Open_Flower_P Parameter: Plant Line Value: WS
  misc_feature: MA Experiment 20000265 PARAMETER Experiment Name: At_Open_Flower_P Parameter: Tissue Value: Closed Flower vs. Whole Plant
  misc_feature: MA Experiment ID: 20000268 Result: Down-regulated in Transcription
  misc_feature: MA Experiment 20000268 PARAMETER Experiment Name: At_100mM_NaCl__P Parameter: Age (day) Value: 14
  misc_feature: MA Experiment 20000268 PARAMETER Experiment Name: At_100mM_NaCl__P Parameter: Organism Value: A. thaliana
  misc_feature: MA Experiment 20000268 PARAMETER Experiment Name: At_100mM_NaCl__P Parameter: Plant Line Value: WS
  misc_feature: MA Experiment 20000268 PARAMETER Experiment Name: At_100mM_NaCl__P Parameter: Timepoint (hr) Value: 6
  misc_feature: MA Experiment 20000268 PARAMETER Experiment Name: At_100mM_NaCl__P Parameter: Tissue Value: Whole Plant
  misc_feature: MA Experiment 20000268 PARAMETER Experiment Name: At_100mM_NaCl__P Parameter: Treatment Value: 100mM NaCl vs. No Treatment
  misc_feature: MA Experiment ID: 20000286 Result: Down-regulated in Transcription
  misc_feature: MA Experiment 20000286 PARAMETER Experiment Name: At_Open_Flower_P Parameter: Age (day) Value: 21
  misc_feature: MA Experiment 20000286 PARAMETER Experiment Name: At_Open_Flower_P Parameter: Plant Line Value: WS
  misc_feature: MA Experiment 20000286 PARAMETER Experiment Name: At_Open_Flower_P Parameter: Tissue Value: Half Open vs. Whole Plant
  misc_feature: MA Experiment ID: 20000436 Result: Down-regulated in Transcription
  misc_feature: MA Experiment 20000436 PARAMETER Experiment Name: At_Drought_P Parameter: Age (day) Value: 7
  misc_feature: MA Experiment 20000436 PARAMETER Experiment Name: At_Drought_P Parameter: Organism Value: A. thaliana
  misc_feature: MA Experiment 20000436 PARAMETER Experiment Name: At_Drought_P Parameter: Plant Line Value: WS
  misc_feature: MA Experiment 20000436 PARAMETER Experiment Name: At_Drought_P Parameter: Timepoint (hr) Value: 12
  misc_feature: MA Experiment 20000436 PARAMETER Experiment Name: At_Drought_P Parameter: Tissue Value: Whole Plant
  misc_feature: MA Experiment 20000436 PARAMETER Experiment Name: At_Drought_P Parameter: Treatment Value: Drought vs. No Drought
  misc_feature: MA Experiment ID: 20000437 Result: Down-regulated in Transcription
  misc_feature: MA Experiment 20000437 PARAMETER Experiment Name: At_Drought_P Parameter: Age (day) Value: 8
  misc_feature: MA Experiment 20000437 PARAMETER Experiment Name: At_Drought_P Parameter: Organism Value: A. thaliana
  misc_feature: MA Experiment 20000437 PARAMETER Experiment Name: At_Drought_P Parameter: Plant Line Value: WS
  misc_feature: MA Experiment 20000437 PARAMETER Experiment Name: At_Drought_P Parameter: Timepoint (hr) Value: 24
  misc_feature: MA Experiment 20000437 PARAMETER Experiment Name: At_Drought_P Parameter: Tissue Value: Whole Plant
  misc_feature: MA Experiment 20000437 PARAMETER Experiment Name: At_Drought_P Parameter: Treatment Value: Drought vs. No Drought
  misc_feature: MA Experiment ID: 20000438 Result: Down-regulated in Transcription
  misc_feature: MA Experiment 20000438 PARAMETER Experiment Name: At_Shoots__P Parameter: Age (day) Value: 14
  misc_feature: MA Experiment 20000438 PARAMETER Experiment Name: At_Shoots__P Parameter: Tissue Value: Shoots vs. Whole Plant
  misc_feature: MA Experiment ID: 20000441 Result: Up-regulated in Transcription
  misc_feature: MA Experiment 20000441 PARAMETER Experiment Name: At_1uM_BR-BRZ__P Parameter: Tissue Value: Shoot Apices
  misc_feature: MA Experiment 20000441 PARAMETER Experiment Name: At_1uM_BR-BRZ__P Parameter: Treatment Value: 1uM BR vs. No Treatment
  misc_feature: MA Experiment ID: 20000443 Result: Up-regulated in Transcription
  misc_feature: MA Experiment 20000443 PARAMETER Experiment Name: At_1uM_BR-BRZ__P Parameter: Tissue Value: Shoot Apices
  misc_feature: MA Experiment 20000443 PARAMETER Experiment Name: At_1uM_BR-BRZ__P Parameter: Treatment Value: 1uM BRZ vs. No Treatment
  misc_feature: MA Experiment ID: 20000453 Result: Up-regulated in Transcription
  misc_feature: MA Experiment 20000453 PARAMETER Experiment Name: At_100uM_ABA_P Parameter: Age (day) Value: 15
  misc_feature: MA Experiment 20000453 PARAMETER Experiment Name: At_100uM_ABA_P Parameter: Organism Value: A. thaliana
  misc_feature: MA Experiment 20000453 PARAMETER Experiment Name: At_100uM_ABA_P Parameter: Plant Line Value: WS
  misc_feature: MA Experiment 20000453 PARAMETER Experiment Name: At_100uM_ABA_P Parameter: Timepoint (hr) Value: 24
  misc_feature: MA Experiment 20000453 PARAMETER Experiment Name: At_100uM_ABA_P Parameter: Tissue Value: Aerial
  misc_feature: MA Experiment 20000453 PARAMETER Experiment Name: At_100uM_ABA_P Parameter: Treatment Value: 100uM ABA vs. No Treatment
  misc_feature: MA Experiment ID: 20000495 Result: Down-regulated in Transcription
  misc_feature: MA Experiment 20000495 PARAMETER Experiment Name: At_Guard_Cells_P Parameter: Harvest Date Value: 8/2/2002
  misc_feature: MA Experiment 20000495 PARAMETER Experiment Name: At_Guard_Cells_P Parameter: Organism Value: A. thaliana
  misc_feature: MA Experiment 20000495 PARAMETER Experiment Name: At_Guard_Cells_P Parameter: Tissue Value: Guard Cells vs. Leaves
  misc_feature: MA Experiment ID: 20000573 Result: Up-regulated in Transcription
  misc_feature: MA Experiment 20000573 PARAMETER Experiment Name: At_100uM_ABA_Mutants__P Parameter: Organism Value: A. thaliana
  misc_feature: MA Experiment 20000573 PARAMETER Experiment Name: At_100uM_ABA_Mutants__P Parameter: Plant Line Value: CS22 vs. Ler wt
  misc_feature: MA Experiment 20000573 PARAMETER Experiment Name: At_100uM_ABA_Mutants__P Parameter: Timepoint (hr) Value: N/A
  misc_feature: MA Experiment 20000573 PARAMETER Experiment Name: At_100uM_ABA_Mutants__P Parameter: Tissue Value: Whole Plant
  misc_feature: MA Experiment 20000573 PARAMETER Experiment Name: At_100uM_ABA_Mutants__P Parameter: Treatment Value: None
  misc_feature: MA Experiment ID: 20000574 Result: Up-regulated in Transcription
  misc_feature: MA Experiment 20000574 PARAMETER Experiment Name: At_100uM_ABA_Mutants__P Parameter: Organism Value: A. thaliana
  misc_feature: MA Experiment 20000574 PARAMETER Experiment Name: At_100uM_ABA_Mutants__P Parameter: Plant Line Value: CS23 vs. Ler wt
  misc_feature: MA Experiment 20000574 PARAMETER Experiment Name: At_100uM_ABA_Mutants__P Parameter: Timepoint (hr) Value: N/A
  misc_feature: MA Experiment 20000574 PARAMETER Experiment Name: At_100uM_ABA_Mutants__P Parameter: Tissue Value: Whole Plant
  misc_feature: MA Experiment 20000574 PARAMETER Experiment Name: At_100uM_ABA_Mutants__P Parameter: Treatment Value: None
  misc_feature: MA Experiment ID: 20000794 Result: Up-regulated in Transcription
  misc_feature: MA Experiment 20000794 PARAMETER Experiment Name: At_Petals_P Parameter: Age (day) Value: 23-25 days
  misc_feature: MA Experiment 20000794 PARAMETER Experiment Name: At_Petals_P Parameter: Plant Line Value: WS
  misc_feature: MA Experiment 20000794 PARAMETER Experiment Name: At_Petals_P Parameter: Tissue Value: Petals vs. Whole plant
  misc_feature: MA Experiment ID: 20001248 Result: Up-regulated in Transcription
  misc_feature: MA Experiment 20001248 PARAMETER Experiment Name: At_Far-red-induction_P Parameter: Age (day) Value: 7
  misc_feature: MA Experiment 20001248 PARAMETER Experiment Name: At_Far-red-induction_P Parameter: Light Value: Far-red vs. White
  misc_feature: MA Experiment 20001248 PARAMETER Experiment Name: At_Far-red-induction_P Parameter: Organism Value: A. thaliana
  misc_feature: MA Experiment 20001248 PARAMETER Experiment Name: At_Far-red-induction_P Parameter: Plant Line Value: Columbia
  misc_feature: MA Experiment 20001248 PARAMETER Experiment Name: At_Far-red-induction_P Parameter: Timepoint (hr) Value: 4
  misc_feature: MA Experiment 20001248 PARAMETER Experiment Name: At_Far-red-induction_P Parameter: Tissue Value: Whole Plant
  misc_feature: MA Experiment ID: 20001450 Result: Up-regulated in Transcription
  misc_feature: MA Experiment 20001450 PARAMETER Experiment Name: At_Far-red-induction_P Parameter: Age (day) Value: 7
  misc_feature: MA Experiment 20001450 PARAMETER Experiment Name: At_Far-red-induction_P Parameter: Light Value: Far-red vs. White
  misc_feature: MA Experiment 20001450 PARAMETER Experiment Name: At_Far-red-induction_P Parameter: Organism Value: A. thaliana
  misc_feature: MA Experiment 20001450 PARAMETER Experiment Name: At_Far-red-induction_P Parameter: Plant Line Value: Columbia
  misc_feature: MA Experiment 20001450 PARAMETER Experiment Name: At_Far-red-induction_P Parameter: Timepoint (hr) Value: 8
  misc_feature: MA Experiment 20001450 PARAMETER Experiment Name: At_Far-red-induction_P Parameter: Tissue Value: Whole Plant
  misc_feature: MA Experiment ID: 20001451 Result: Up-regulated in Transcription
  misc_feature: MA Experiment 20001451 PARAMETER Experiment Name: At_Far-red-induction_P Parameter: Age (day) Value: 7
  misc_feature: MA Experiment 20001451 PARAMETER Experiment Name: At_Far-red-induction_P Parameter: Light Value: Far-red vs. White
  misc_feature: MA Experiment 20001451 PARAMETER Experiment Name: At_Far-red-induction_P Parameter: Organism Value: A. thaliana
  misc_feature: MA Experiment 20001451 PARAMETER Experiment Name: At_Far-red-induction_P Parameter: Plant Line Value: Columbia
  misc_feature: MA Experiment 20001451 PARAMETER Experiment Name: At_Far-red-induction_P Parameter: Timepoint (hr) Value: 24
  misc_feature: MA Experiment 20001451 PARAMETER Experiment Name: At_Far-red-induction_P Parameter: Tissue Value: Whole Plant
  misc_feature: MA Experiment ID: 20001554 Result: Down-regulated in Transcription
  misc_feature: MA Experiment 20001554 PARAMETER Experiment Name: At_Drought_Soil_Dry_P Parameter: Age (day) Value: 21
  misc_feature: MA Experiment 20001554 PARAMETER Experiment Name: At_Drought_Soil_Dry_P Parameter: Organism Value: A. thaliana
  misc_feature: MA Experiment 20001554 PARAMETER Experiment Name: At_Drought_Soil_Dry_P Parameter: Plant Line Value: WS
  misc_feature: MA Experiment 20001554 PARAMETER Experiment Name: At_Drought_Soil_Dry_P Parameter: Post Timepoint (hr) Value: None
  misc_feature: MA Experiment 20001554 PARAMETER Experiment Name: At_Drought_Soil_Dry_P Parameter: Post-Treatment Value: None
  misc_feature: MA Experiment 20001554 PARAMETER Experiment Name: At_Drought_Soil_Dry_P Parameter: Timepoint (day) Value: 7
  misc_feature: MA Experiment 20001554 PARAMETER Experiment Name: At_Drought_Soil_Dry_P Parameter: Treatment Value: Drought vs. No Drought
  misc_feature: MA Experiment ID: 20001555 Result: Down-regulated in Transcription
  misc_feature: MA Experiment 20001555 PARAMETER Experiment Name: At_Drought_Soil_Dry_P Parameter: Age (day) Value: 24
  misc_feature: MA Experiment 20001555 PARAMETER Experiment Name: At_Drought_Soil_Dry_P Parameter: Organism Value: A. thaliana
  misc_feature: MA Experiment 20001555 PARAMETER Experiment Name: At_Drought_Soil_Dry_P Parameter: Plant Line Value: WS
  misc_feature: MA Experiment 20001555 PARAMETER Experiment Name: At_Drought_Soil_Dry_P Parameter: Post Timepoint (hr) Value: None
  misc_feature: MA Experiment 20001555 PARAMETER Experiment Name: At_Drought_Soil_Dry_P Parameter: Post-Treatment Value: None
  misc_feature: MA Experiment 20001555 PARAMETER Experiment Name: At_Drought_Soil_Dry_P Parameter: Timepoint (day) Value: 10
  misc_feature: MA Experiment 20001555 PARAMETER Experiment Name: At_Drought_Soil_Dry_P Parameter: Treatment Value: Drought vs. No Drought
  misc_feature: MA Experiment ID: 20001556 Result: Down-regulated in Transcription
  misc_feature: MA Experiment 20001556 PARAMETER Experiment Name: At_Drought_Soil_Dry_P Parameter: Age (day) Value: 26
  misc_feature: MA Experiment 20001556 PARAMETER Experiment Name: At_Drought_Soil_Dry_P Parameter: Organism Value: A. thaliana
  misc_feature: MA Experiment 20001556 PARAMETER Experiment Name: At_Drought_Soil_Dry_P Parameter: Plant Line Value: WS
  misc_feature: MA Experiment 20001556 PARAMETER Experiment Name: At_Drought_Soil_Dry_P Parameter: Post Timepoint (hr) Value: None
  misc_feature: MA Experiment 20001556 PARAMETER Experiment Name: At_Drought_Soil_Dry_P Parameter: Post-Treatment Value: None
  misc_feature: MA Experiment 20001556 PARAMETER Experiment Name: At_Drought_Soil_Dry_P Parameter: Timepoint (day) Value: 12
  misc_feature: MA Experiment 20001556 PARAMETER Experiment Name: At_Drought_Soil_Dry_P Parameter: Treatment Value: Drought vs. No Drought
  misc_feature: MA Experiment ID: 20001557 Result: Down-regulated in Transcription
  misc_feature: MA Experiment 20001557 PARAMETER Experiment Name: At_Drought_Soil_Dry_P Parameter: Age (day) Value: 27
  misc_feature: MA Experiment 20001557 PARAMETER Experiment Name: At_Drought_Soil_Dry_P Parameter: Organism Value: A. thaliana
  misc_feature: MA Experiment 20001557 PARAMETER Experiment Name: At_Drought_Soil_Dry_P Parameter: Plant Line Value: WS
  misc_feature: MA Experiment 20001557 PARAMETER Experiment Name: At_Drought_Soil_Dry_P Parameter: Post Timepoint (hr) Value: 3
  misc_feature: MA Experiment 20001557 PARAMETER Experiment Name: At_Drought_Soil_Dry_P Parameter: Post-Treatment Value: Re-Water vs. No Drought
  misc_feature: MA Experiment 20001557 PARAMETER Experiment Name: At_Drought_Soil_Dry_P Parameter: Timepoint (day) Value: 13
  misc_feature: MA Experiment 20001557 PARAMETER Experiment Name: At_Drought_Soil_Dry_P Parameter: Treatment Value: Drought vs. No Drought
  misc_feature: MA Experiment ID: 20001559 Result: Down-regulated in Transcription
  misc_feature: MA Experiment 20001559 PARAMETER Experiment Name: At_Drought_Soil_Dry_P Parameter: Age (day) Value: 28
  misc_feature: MA Experiment 20001559 PARAMETER Experiment Name: At_Drought_Soil_Dry_P Parameter: Organism Value: A. thaliana
  misc_feature: MA Experiment 20001559 PARAMETER Experiment Name: At_Drought_Soil_Dry_P Parameter: Plant Line Value: WS
  misc_feature: MA Experiment 20001559 PARAMETER Experiment Name: At_Drought_Soil_Dry_P Parameter: Post Timepoint (hr) Value: 29
  misc_feature: MA Experiment 20001559 PARAMETER Experiment Name: At_Drought_Soil_Dry_P Parameter: Post-Treatment Value: Re-Water vs. No Drought
  misc_feature: MA Experiment 20001559 PARAMETER Experiment Name: At_Drought_Soil_Dry_P Parameter: Timepoint (day) Value: 14
  misc_feature: MA Experiment 20001559 PARAMETER Experiment Name: At_Drought_Soil_Dry_P Parameter: Treatment Value: Drought vs. No Drought
  misc_feature: MA Experiment ID: 20001904 Result: Down-regulated in Transcription
  misc_feature: MA Experiment 20001904 PARAMETER Experiment Name: At_Drought_Reproduction_P Parameter: Age (day) Value: 37
  misc_feature: MA Experiment 20001904 PARAMETER Experiment Name: At_Drought_Reproduction_P Parameter: Organism Value: A. thaliana
  misc_feature: MA Experiment 20001904 PARAMETER Experiment Name: At_Drought_Reproduction_P Parameter: Plant Line Value: WS
  misc_feature: MA Experiment 20001904 PARAMETER Experiment Name: At_Drought_Reproduction_P Parameter: Timepoint (day) Value: 7
  misc_feature: MA Experiment 20001904 PARAMETER Experiment Name: At_Drought_Reproduction_P Parameter: Tissue Value: Rosettes
  misc_feature: MA Experiment 20001904 PARAMETER Experiment Name: At_Drought_Reproduction_P Parameter: Treatment Value: Drought vs. No Drought
  misc_feature: MA Experiment ID: 20001905 Result: Down-regulated in Transcription
  misc_feature: MA Experiment 20001905 PARAMETER Experiment Name: At_Drought_Reproduction_P Parameter: Age (day) Value: 40
  misc_feature: MA Experiment 20001905 PARAMETER Experiment Name: At_Drought_Reproduction_P Parameter: Organism Value: A. thaliana
  misc_feature: MA Experiment 20001905 PARAMETER Experiment Name: At_Drought_Reproduction_P Parameter: Plant Line Value: WS
  misc_feature: MA Experiment 20001905 PARAMETER Experiment Name: At_Drought_Reproduction_P Parameter: Timepoint (day) Value: 10
  misc_feature: MA Experiment 20001905 PARAMETER Experiment Name: At_Drought_Reproduction_P Parameter: Tissue Value: Rosettes
  misc_feature: MA Experiment 20001905 PARAMETER Experiment Name: At_Drought_Reproduction_P Parameter: Treatment Value: Drought vs. No Drought
  misc_feature: MA Experiment ID: 20001906 Result: Down-regulated in Transcription
  misc_feature: MA Experiment 20001906 PARAMETER Experiment Name: At_Drought_Reproduction_P Parameter: Age (day) Value: 35
  misc_feature: MA Experiment 20001906 PARAMETER Experiment Name: At_Drought_Reproduction_P Parameter: Organism Value: A. thaliana
  misc_feature: MA Experiment 20001906 PARAMETER Experiment Name: At_Drought_Reproduction_P Parameter: Plant Line Value: WS
  misc_feature: MA Experiment 20001906 PARAMETER Experiment Name: At_Drought_Reproduction_P Parameter: Timepoint (day) Value: 5
  misc_feature: MA Experiment 20001906 PARAMETER Experiment Name: At_Drought_Reproduction_P Parameter: Tissue Value: Siliques
  misc_feature: MA Experiment 20001906 PARAMETER Experiment Name: At_Drought_Reproduction_P Parameter: Treatment Value: Drought vs. No Drought
  misc_feature: MA Experiment ID: 20001907 Result: Down-regulated in Transcription
  misc_feature: MA Experiment 20001907 PARAMETER Experiment Name: At_Drought_Reproduction_P Parameter: Age (day) Value: 37
  misc_feature: MA Experiment 20001907 PARAMETER Experiment Name: At_Drought_Reproduction_P Parameter: Organism Value: A. thaliana
  misc_feature: MA Experiment 20001907 PARAMETER Experiment Name: At_Drought_Reproduction_P Parameter: Plant Line Value: WS
  misc_feature: MA Experiment 20001907 PARAMETER Experiment Name: At_Drought_Reproduction_P Parameter: Timepoint (day) Value: 7
  misc_feature: MA Experiment 20001907 PARAMETER Experiment Name: At_Drought_Reproduction_P Parameter: Tissue Value: Siliques
  misc_feature: MA Experiment 20001907 PARAMETER Experiment Name: At_Drought_Reproduction_P Parameter: Treatment Value: Drought vs. No Drought
  misc_feature: MA Experiment ID: 20001908 Result: Down-regulated in Transcription
  misc_feature: MA Experiment 20001908 PARAMETER Experiment Name: At_Drought_Reproduction_P Parameter: Age (day) Value: 40
  misc_feature: MA Experiment 20001908 PARAMETER Experiment Name: At_Drought_Reproduction_P Parameter: Organism Value: A. thaliana
  misc_feature: MA Experiment 20001908 PARAMETER Experiment Name: At_Drought_Reproduction_P Parameter: Plant Line Value: WS
  misc_feature: MA Experiment 20001908 PARAMETER Experiment Name: At_Drought_Reproduction_P Parameter: Timepoint (day) Value: 10
  misc_feature: MA Experiment 20001908 PARAMETER Experiment Name: At_Drought_Reproduction_P Parameter: Tissue Value: Siliques
  misc_feature: MA Experiment 20001908 PARAMETER Experiment Name: At_Drought_Reproduction_P Parameter: Treatment Value: Drought vs. No Drought
  misc_feature: MA Experiment ID: 20001910 Result: Down-regulated in Transcription
  misc_feature: MA Experiment 20001910 PARAMETER Experiment Name: At_Drought_Reproduction_P Parameter: Age (day) Value: 37
  misc_feature: MA Experiment 20001910 PARAMETER Experiment Name: At_Drought_Reproduction_P Parameter: Organism Value: A. thaliana
  misc_feature: MA Experiment 20001910 PARAMETER Experiment Name: At_Drought_Reproduction_P Parameter: Plant Line Value: WS
  misc_feature: MA Experiment 20001910 PARAMETER Experiment Name: At_Drought_Reproduction_P Parameter: Timepoint (day) Value: 7
  misc_feature: MA Experiment 20001910 PARAMETER Experiment Name: At_Drought_Reproduction_P Parameter: Tissue Value: Flowers
  misc_feature: MA Experiment 20001910 PARAMETER Experiment Name: At_Drought_Reproduction_P Parameter: Treatment Value: Drought vs. No Drought
  misc_feature: MA Experiment ID: 20001911 Result: Down-regulated in Transcription
  misc_feature: MA Experiment 20001911 PARAMETER Experiment Name: At_Drought_Reproduction_P Parameter: Age (day) Value: 40
  misc_feature: MA Experiment 20001911 PARAMETER Experiment Name: At_Drought_Reproduction_P Parameter: Organism Value: A. thaliana
  misc_feature: MA Experiment 20001911 PARAMETER Experiment Name: At_Drought_Reproduction_P Parameter: Plant Line Value: WS
  misc_feature: MA Experiment 20001911 PARAMETER Experiment Name: At_Drought_Reproduction_P Parameter: Timepoint (day) Value: 10
  misc_feature: MA Experiment 20001911 PARAMETER Experiment Name: At_Drought_Reproduction_P Parameter: Tissue Value: Flowers
  misc_feature: MA Experiment 20001911 PARAMETER Experiment Name: At_Drought_Reproduction_P Parameter: Treatment Value: Drought vs. No Drought
acattcctcaccaaaccctctccaaaacacacccacacgtacgcacacacacaaagacaatgtctcctttcaaaatattcttcttcacgactcttctcgtggcggcgttttcagtgtcggctgctgatttcaacactgacgtcaacgtagcttggggaaatggccgtgggaagatactcaacaacggccagcttcttactctctccttagacaaatcctctggttccggttttcaatccaaaacagagtatttgtttggaaagattgatatgcagattaagcttgttcctggtaactctgcaggaacagtcacaactttttacgtgagtttatatattttctttaggagttttaagtgattttggatttggtttttatattgagacttcatcttgacatttttgtgtatttgcagctaaaatccgaaggatccacttgggatgagattgattttgagttcttgggtaatatgagtggagatccttatactttacacactaatgtttacactcaaggtaaaggtgacaaagagcaacaattccatctctggttcgacccaaccgccaatttccacacttactcaatcctctggaaccctcaaagaatcatattgaccgtcgatgacacacccattagagagtttaaaaactatgagtctctcggtgtcttgtttccaaagaacaagccgatgaggatgtacgcgagtttatggaacgcagacgattgggcaacaagaggcggtcttgttaaaactgattggtctaaagctccattcatggcttcttacagaaacattaagattgactcgaaaccaaactccaattggtacactcaagaaatggattcaacaagccaagctagactcaaatgggttcagaagaattacatgatctacaattattgtactgaccataggaggtttccacagggagctcctaaggaatgcacaacaagctcatagaatctcaaattatattctatttatttatctacacttcctctctttcttttatgtgaaaattgtgaatgctctgtttatagcttgtctattatgtccgagaatttctttttctgtttttgattcttttcgttgtatatctttgtccaataaaggaaatgatgtgtctttac

SEQ ID NO: 74531 - protein, 163 aa, Arabidopsis thaliana; identical to SEQ ID NO: 23244
  peptide (1)..(163): Ceres Seq. ID no. 5678107
  misc_feature (1)..(99): Pfam Name: Glycosyl hydrolases family 16 Pfam Description: Glycosyl hydrolases family 16
  misc_feature (1)..(163): Homolog of NCBI NO: 15234678 NR Description: xyloglucan endotransglycosylase (meri5B); protein At4g30270.1, supported by cDNA: 19156., supported by cDNA:
  misc_feature (1)..(163): Homolog of NCBI NO: 21553999 NR Description: xyloglucan endo-1,4-beta-D-glucanase precursor
  misc_feature (1)..(159): Homolog of NCBI NO: 29500891 NR Description: putative xyloglucan endotransglycosylase [Cucumis >gi|29500899|emb|CAD87533.1| putative xyloglucan
  misc_feature (1)..(108): Homolog of NCBI NO: 29500893 NR Description: putative xyloglucan endotransglycosylase [Cucumis >gi|29500901|emb|CAD87534.1| putative xyloglucan
  misc_feature (119)..(159): Homolog of NCBI NO: 29500893 NR Description: putative xyloglucan endotransglycosylase [Cucumis >gi|29500901|emb|CAD87534.1| putative xyloglucan

SEQ ID NO: 74532 - protein, 118 aa, Arabidopsis thaliana; identical to SEQ ID NO: 23245
  peptide (1)..(118): Ceres Seq. ID no. 5678108
  misc_feature (43)..(108): Pfam Name: Glycosyl hydrolases family 16 Pfam Description: Glycosyl hydrolases family 16
  misc_feature (20)..(108): Homolog of NCBI NO: 15234678 NR Description: xyloglucan endotransglycosylase (meri5B); protein At4g30270.1, supported by cDNA: 19156., supported by cDNA:
  misc_feature (20)..(108): Homolog of NCBI NO: 21553999 NR Description: xyloglucan endo-1,4-beta-D-glucanase precursor
  misc_feature (28)..(109): Homolog of NCBI NO: 29500891 NR Description: putative xyloglucan endotransglycosylase [Cucumis >gi|29500899|emb|CAD87533.1| putative xyloglucan
  misc_feature (21)..(108): Homolog of NCBI NO: 29500893 NR Description: putative xyloglucan endotransglycosylase [Cucumis >gi|29500901|emb|CAD87534.1| putative xyloglucan

SEQ ID NO: 74533 - protein, 99 aa, Arabidopsis thaliana; identical to SEQ ID NO: 23246
  peptide (1)..(99): Ceres Seq. ID no. 5678109
  misc_feature (24)..(89): Pfam Name: Glycosyl hydrolases family 16 Pfam Description: Glycosyl hydrolases family 16
  misc_feature (1)..(89): Homolog of NCBI NO: 15234678 NR Description: xyloglucan endotransglycosylase (meri5B); protein At4g30270.1, supported by cDNA: 19156., supported by cDNA:
  misc_feature (1)..(89): Homolog of NCBI NO: 21553999 NR Description: xyloglucan endo-1,4-beta-D-glucanase precursor
  misc_feature (9)..(90): Homolog of NCBI NO: 29500891 NR Description: putative xyloglucan endotransglycosylase [Cucumis >gi|29500899|emb|CAD87533.1| putative xyloglucan
  misc_feature (2)..(89): Homolog of NCBI NO: 29500893 NR Description: putative xyloglucan endotransglycosylase [Cucumis >gi|29500901|emb|CAD87534.1| putative xyloglucan

SEQ ID NO: 74534 - DNA, 1261 bp, Arabidopsis thaliana
  misc_feature (1)..(1261): Ceres Seq. ID no. 5678122
  misc_feature: MA Experiment ID: 20000307 Result: Up-regulated in Transcription
  misc_feature: MA Experiment 20000307 PARAMETER Experiment Name: At_Germinating_Seeds_Sub_P Parameter: Age (hr) Value: 24 vs. 0
  misc_feature: MA Experiment 20000307 PARAMETER Experiment Name: At_Germinating_Seeds_Sub_P Parameter: Organism Value: A. thaliana
  misc_feature: MA Experiment 20000307 PARAMETER Experiment Name: At_Germinating_Seeds_Sub_P Parameter: Plant Line Value: WS
  misc_feature: MA Experiment 20000307 PARAMETER Experiment Name: At_Germinating_Seeds_Sub_P Parameter: Tissue Value: Germinating Seeds
  misc_feature: MA Experiment ID: 20000315 Result: Down-regulated in Transcription
  misc_feature: MA Experiment 20000315 PARAMETER Experiment Name: At_14day_Shoots-Roots_Sub_P Parameter: Age (day) Value: 14
  misc_feature: MA Experiment 20000315 PARAMETER Experiment Name: At_14day_Shoots-Roots_Sub_P Parameter: Organism Value: A. thaliana
  misc_feature: MA Experiment 20000315 PARAMETER Experiment Name: At_14day_Shoots-Roots_Sub_P Parameter: Plant Line Value: WS
  misc_feature: MA Experiment 20000315 PARAMETER Experiment Name: At_14day_Shoots-Roots_Sub_P Parameter: Tissue Value: Shoots vs. Whole Plant
  misc_feature: MA Experiment ID: 20000328 Result: Down-regulated in Transcription
  misc_feature: MA Experiment 20000328 PARAMETER Experiment Name: At_42deg_Heat_Sub_P Parameter: Age (day) Value: 14
  misc_feature: MA Experiment 20000328 PARAMETER Experiment Name: At_42deg_Heat_Sub_P Parameter: Organism Value: A. thaliana
  misc_feature: MA Experiment 20000328 PARAMETER Experiment Name: At_42deg_Heat_Sub_P Parameter: Plant Line Value: WS
  misc_feature: MA Experiment 20000328 PARAMETER Experiment Name: At_42deg_Heat_Sub_P Parameter: Temperature (deg C) Value: 42 vs. 22
  misc_feature: MA Experiment 20000328 PARAMETER Experiment Name: At_42deg_Heat_Sub_P Parameter: Timepoint (hr) Value: 6
  misc_feature: MA Experiment 20000328 PARAMETER Experiment Name: At_42deg_Heat_Sub_P Parameter: Tissue Value: Aerial
gattttgtttgatgatcgttgggttttgaaagaagagcaatgagcaattatgcagccggactcggtaagcctggctcaggtaaaaggagaatcagagatcttttaaatcaacctgataaccgagtctgcgctgattgtggcgcttctgatcctaaatgggcatcagcaaatatcggagtattcatttgcttaaaatgttgcggtgtgcacaggagcctcggcactcatatttcaaaggttttgtctgtgacactagatgaatggtcagatgaggaagtcgattccatgattgaaattggaggaaatgcgtctgctaattcaatttatgaagcttttttacctgacacgtgctctaagcctggacctgatgttaatcatgaccagcgtatgagattcattagggcaaaatatgaactgcaagagtttctgaaaccaagcttgcggattacatccgggaaaggctcaacaaagagttcagcttttcttacatcaagtctttctagaaagatcatggatagttttcgcacaaattcatcatcgcagacgatgtttcaggaaggaatggtagagtttattggattgttgaaggtgactattaagaagggaactaacttagcaatcagagacatgatgtcaagtgatccatatgttgtgttgaatctagggaagcaaaaacttcagacaactgttatgaatagtaatttgaacccggtatggaatcaagaactcatgctgtctgttcctgagagctatggccctgtgaaattgcaagtgtatgattatgatacattttctgctgatgacataatgggagaagcagatattgatatacaacctttgataacatctgcaatggcttttggggatccagaaatgtttggggatatgcagattgggaaatggctaaaatcgcatgataacccattaatagatgacagtatcattaacattgttgatgggaaagtgaaacaggaggttcagatcaagcttcagaatgtagagtctggagaattagagctagaaatggaatggctgccacttgaccaataagtgtcatataggtctcataacctttataaatgtactgattgatttaattctttgttttttttttttctctccatttgttggaaattttcaaaaatctctttgcatttttttcctcatttcagaggtaaatgtattttgatgtttgtataaaccaatggattactatatgatgttttgattgatggaaaaagggtgaaatatccacttatgt

SEQ ID NO: 74535 - protein, 336 aa, Arabidopsis thaliana; identical to SEQ ID NO: 40769
  peptide (1)..(336): Ceres Seq. ID no. 5678123
  misc_feature (15)..(137): Pfam Name: Putative GTPase activating protein for Arf Pfam Description: Putative GTPase activating protein for Arf
  misc_feature (1)..(336): Homolog of NCBI NO: 18412932 NR Description: putative protein; protein id: At4g05330.1, by cDNA: 116234. [Arabidopsis thaliana]
  misc_feature (1)..(336): Homolog of NCBI NO: 25407332 NR Description: hypothetical protein AT4g05330 [imported] - thaliana >gi|7267293|emb|CAB81075.1| putative protein
  misc_feature (1)..(336): Homolog of NCBI NO: 18415638 NR Description: putative protein; protein id: At4g21160.1, by cDNA: 6665., supported by cDNA: gi_17064945, supported by gi_9957237 [Arabidopsis thaliana]
  misc_feature (1)..(336): Homolog of NCBI NO: 21594052 NR Description: putative GTPase activating protein [Arabidopsis
  misc_feature (40)..(336): Homolog of NCBI NO: 7486586 NR Description: hypothetical protein F7J7.100 - Arabidopsis >gi|2911073|emb|CAA17535.1| putative protein [Arabidopsis >gi|7268913|emb|CAB79116.1| putative protein [Arabidopsis
  misc_feature (1)..(41): Homolog of NCBI NO: 7486586 NR Description: hypothetical protein F7J7.100 - Arabidopsis >gi|2911073|emb|CAA17535.1| putative protein [Arabidopsis >gi|7268913|emb|CAB79116.1| putative protein [Arabidopsis
  misc_feature (9)..(336): Homolog of NCBI NO: 19386828 NR Description: putative zinc finger and C2 domain protein [Oryza
  misc_feature (132)..(336): Homolog of NCBI NO: 6648206 NR Description: putative GTPase activating protein [Arabidopsis
  misc_feature (132)..(336): Homolog of NCBI NO: 30680493 NR Description: zinc finger and C2 domain protein, putative
  misc_feature (17)..(132): Homolog of NCBI NO: 6648206 NR Description: putative GTPase activating protein [Arabidopsis

SEQ ID NO: 74536 - protein, 254 aa, Arabidopsis thaliana; identical to SEQ ID NO: 40770
  peptide (1)..(254): Ceres Seq. ID no. 5678124
  misc_feature (1)..(55): Pfam Name: Putative GTPase activating protein for Arf Pfam Description: Putative GTPase activating protein for Arf
  misc_feature (1)..(254): Homolog of NCBI NO: 18412932 NR Description: putative protein; protein id: At4g05330.1, by cDNA: 116234. [Arabidopsis thaliana]
  misc_feature (1)..(254): Homolog of NCBI NO: 25407332 NR Description: hypothetical protein AT4g05330 [imported] - thaliana >gi|7267293|emb|CAB81075.1| putative protein
  misc_feature (1)..(254): Homolog of NCBI NO: 18415638 NR Description: putative protein; protein id: At4g21160.1, by cDNA: 6665., supported by cDNA: gi_17064945, supported by gi_9957237 [Arabidopsis thaliana]
  misc_feature (1)..(254): Homolog of NCBI NO: 21594052 NR Description: putative GTPase activating protein [Arabidopsis
  misc_feature (1)..(254): Homolog of NCBI NO: 7486586 NR Description: hypothetical protein F7J7.100 - Arabidopsis >gi|2911073|emb|CAA17535.1| putative protein [Arabidopsis >gi|7268913|emb|CAB79116.1| putative protein [Arabidopsis
  misc_feature (1)..(254): Homolog of NCBI NO: 19386828 NR Description: putative zinc finger and C2 domain protein [Oryza
  misc_feature (50)..(254): Homolog of NCBI NO: 6648206 NR Description: putative GTPase activating protein [Arabidopsis
  misc_feature (50)..(254): Homolog of NCBI NO: 30680493 NR Description: zinc finger and C2 domain protein, putative
  misc_feature (1)..(50): Homolog of NCBI NO: 6648206 NR Description: putative GTPase activating protein [Arabidopsis
  misc_feature (1)..(50): Homolog of NCBI NO: 30680493 NR Description: zinc finger and C2 domain protein, putative

SEQ ID NO: 74537 - protein, 220 aa, Arabidopsis thaliana; identical to SEQ ID NO: 40771
  peptide (1)..(220): Ceres Seq. ID no. 5678125
  misc_feature (66)..(145): Pfam Name: C2 domain Pfam Description: C2 domain
  misc_feature (1)..(220): Homolog of NCBI NO: 18412932 NR Description: putative protein; protein id: At4g05330.1, by cDNA: 116234. [Arabidopsis thaliana]
  misc_feature (1)..(220): Homolog of NCBI NO: 25407332 NR Description: hypothetical protein AT4g05330 [imported] - thaliana >gi|7267293|emb|CAB81075.1| putative protein
  misc_feature (1)..(220): Homolog of NCBI NO: 18415638 NR Description: putative protein; protein id: At4g21160.1, by cDNA: 6665., supported by cDNA: gi_17064945, supported by gi_9957237 [Arabidopsis thaliana]
  misc_feature (1)..(220): Homolog of NCBI NO: 21594052 NR Description: putative GTPase activating protein [Arabidopsis
  misc_feature (1)..(220): Homolog of NCBI NO: 7486586 NR Description: hypothetical protein F7J7.100 - Arabidopsis >gi|2911073|emb|CAA17535.1| putative protein [Arabidopsis >gi|7268913|emb|CAB79116.1| putative protein [Arabidopsis
  misc_feature (1)..(220): Homolog of NCBI NO: 19386828 NR Description: putative zinc finger and C2 domain protein [Oryza
  misc_feature (16)..(220): Homolog of NCBI NO: 6648206 NR Description: putative GTPase activating protein [Arabidopsis
  misc_feature (16)..(220): Homolog of NCBI NO: 30680493 NR Description: zinc finger and C2 domain protein, putative
  misc_feature (1)..(16): Homolog of NCBI NO: 6648206 NR Description: putative GTPase activating protein [Arabidopsis
  misc_feature (1)..(16): Homolog of NCBI NO: 30680493 NR Description: zinc finger and C2 domain protein, putative

SEQ ID NO: 74538 - DNA, 1274 bp, Arabidopsis thaliana
  misc_feature (1)..(1274): Ceres Seq. ID no. 5678146
  misc_feature: MA Experiment ID: 108462 Result: Down-regulated in Transcription
  misc_feature: MA Experiment 108462 PARAMETER Experiment Name: At_Germinating_Seeds_cDNA_P Parameter: Age (day) Value: 2 vs. 0
  misc_feature: MA Experiment 108462 PARAMETER Experiment Name: At_Germinating_Seeds_cDNA_P Parameter: Tissue Value: Germinating Seeds
  misc_feature: MA Experiment ID: 20000111 Result: Up-regulated in Transcription
  misc_feature: MA Experiment 20000111 PARAMETER Experiment Name: At_42deg_Heat_cDNA_P Parameter: Temperature (deg C) Value: 42 vs. 22
  misc_feature: MA Experiment 20000111 PARAMETER Experiment Name: At_42deg_Heat_cDNA_P Parameter: Timepoint (hr) Value: 6
  misc_feature: MA Experiment 20000111 PARAMETER Experiment Name: At_42deg_Heat_cDNA_P Parameter: Tissue Value: Aerial
  misc_feature: MA Experiment ID: 20000112 Result: Up-regulated in Transcription
  misc_feature: MA Experiment 20000112 PARAMETER Experiment Name: At_42deg_Heat_cDNA_P Parameter: Temperature (deg C) Value: 42 vs. 22
  misc_feature: MA Experiment 20000112 PARAMETER Experiment Name: At_42deg_Heat_cDNA_P Parameter: Timepoint (hr) Value: 2
  misc_feature: MA Experiment 20000112 PARAMETER Experiment Name: At_42deg_Heat_cDNA_P Parameter: Tissue Value: Aerial
  misc_feature: MA Experiment ID: 20000113 Result: Up-regulated in Transcription
  misc_feature: MA Experiment 20000113 PARAMETER Experiment Name: At_42deg_Heat_cDNA_P Parameter: Temperature (deg C) Value: 42 vs. 22
  misc_feature: MA Experiment 20000113 PARAMETER Experiment Name: At_42deg_Heat_cDNA_P Parameter: Timepoint (hr) Value: 8
  misc_feature: MA Experiment 20000113 PARAMETER Experiment Name: At_42deg_Heat_cDNA_P Parameter: Tissue Value: Aerial
  misc_feature: MA Experiment ID: 20000184 Result: Down-regulated in Transcription
  misc_feature: MA Experiment 20000184 PARAMETER Experiment Name: At_Shoots__P Parameter: Age (day) Value: 7
  misc_feature: MA Experiment 20000184 PARAMETER Experiment Name: At_Shoots__P Parameter: Tissue Value: Shoots vs. Whole Plant
ctcgaaatctgaatccagagattaaacaaaaattggtattgcgaatgatcgattcttcttcctctaaactctgattcctgaacggacttgctttgacacagcagaccgtaaatcgggatgggtgctcctaagcagaaatggactcaagaagaagagtcagctttaaagtctggagttataaagcatggacctggtaaatggcgcacaattctcaaagatcctgaatttagcggagtcttgtacctgcgttccaatgttgatcttaaggacaaatggagaaacatgagtgtcatggcaaatggctggggatcgcgcgaaaagtctaggttagctgttaaaaggacgttctcccttcctaaacaggaagagaactcactagccctaaccaattctttgcaaagtgatgaagaaaatgtggatgcgacctctggactccaagtttcttctaatcctcctccaaggagacctaatgtaaggttggatagccttataatggaagcaatagctaccctgaaagaacctggtggctgtaacaaaacaacaattggtgcctacattgaggatcaatatcatgctccaccagacttcaaacgcttgttgtctaccaagctaaagtacttgacatcttgcgggaaacttgtgaaggttaaacgtaagtacagaattccaaactccactcccttgtcttcccacaggagaaaaggtctgggggtgtttggaggaaaacagaggacttcttctttgccttcacctaaaacagacatagatgaagtgaattttcagacaaggtcacagattgatacagagatagccagaatgaagagtatgaacgtacatgaggcggcagcagttgcagcacaggcagtagcagaggcagaagctgccatggcagaggctgaggaagctgcaaaggaagcggaggcagcagaagccgaagcagaagcagctcaagctttcgctgaggaagcttcaaagacattgaaaggaagaaacatctgcaaaatgatgatccgtgcctgaggtaatggaaagcgagagaagaaggagactaaatgtgaagagagagtagagagaagcctagtgtttgtgttgatcattctctttacttgggaagttgttttttagtagtaagcaatcaaatatgtttgtcagtatgtcgtcgctctgactcttttgattcctgcacaacttttgggaaaaaatgttttatttggctcttctcactctccaatatacatacaactatcgttagtaatgtgtataatttatagacc

SEQ ID NO: 74539 - protein, 300 aa, Arabidopsis thaliana
  peptide (1)..(300): Ceres Seq. ID no. 5678147
  misc_feature (123)..(185): Pfam Name: linker histone H1 and H5 family Pfam Description: linker histone H1 and H5 family
  misc_feature (1)..(300): Homolog of NCBI NO: 18402853 NR Description: DNA-binding protein PcMYB1, putative; protein id: supported by cDNA: 40229., supported by cDNA: gi_17065319, by cDNA: gi_18481419 [Arabidopsis thaliana]
  misc_feature (1)..(300): Homolog of NCBI NO: 18481420 NR Description: telomere repeat binding factor 1 [Arabidopsis
  misc_feature (1)..(300): Homolog of NCBI NO: 21593573 NR Description: DNA-binding protein PcMYB1, putative [Arabidopsis
  misc_feature (1)..(297): Homolog of NCBI NO: 25405344 NR Description: hypothetical protein F2J10.16 [imported] -
  misc_feature (1)..(297): Homolog of NCBI NO: 34105723 NR Description: Single myb histone 6 [Zea mays subsp. mays]
  misc_feature (1)..(292): Homolog of NCBI NO: 34912214 NR Description: putative telomere repeat binding factor [Oryza
  misc_feature (1)..(300): Homolog of NCBI NO: 33286863 NR Description: Single myb histone 1 [Zea mays subsp. mays]
  misc_feature (1)..(297): Homolog of NCBI NO: 34105719 NR Description: Single myb histone 5 [Zea mays subsp. mays]
  misc_feature (1)..(291): Homolog of NCBI NO: 15240783 NR Description: putative protein; protein id: At5g67580.1, by cDNA: gi_14532517, supported by cDNA: gi_18481425, supported cDNA: gi_18655380 [Arabidopsis thaliana]
  misc_feature (1)..(291): Homolog of NCBI NO: 18481426 NR Description: telomere repeat binding factor 2 [Arabidopsis
MGAPKQKWTQEEESALKSGVIKHGPGKWRTILKDPEFSGVLYLRSNVDLKDKWRNMSVMANGWGSREKSRLAVKRTFSLPKQEENSLALTNSLQSDEENVDATSGLQVSSNPPPRRPNVRLDSLIMEAIATLKEPGGCNKTTIGAYIEDQYHAPPDFKRLLSTKLKYLTSCGKLVKVKRKYRIPNSTPLSSHRRKGLGVFGGKQRTSSLPSPKTDIDEVNFQTRSQIDTEIARMKSMNVHEAAAVAAQAVAEAEAAMAEAEEAAKEAEAAEAEAEAAQAFAEEASKTLKGRNICKMMIRA

SEQ ID NO: 74540 - protein, 245 aa, Arabidopsis thaliana
  peptide (1)..(245): Ceres Seq. ID no. 5678148
  misc_feature (68)..(130): Pfam Name: linker histone H1 and H5 family Pfam Description: linker histone H1 and H5 family
  misc_feature (1)..(245): Homolog of NCBI NO: 18402853 NR Description: DNA-binding protein PcMYB1, putative; protein id: supported by cDNA: 40229., supported by cDNA: gi_17065319, by cDNA: gi_18481419 [Arabidopsis thaliana]
  misc_feature (1)..(245): Homolog of NCBI NO: 18481420 NR Description: telomere repeat binding factor 1 [Arabidopsis
  misc_feature (1)..(245): Homolog of NCBI NO: 21593573 NR Description: DNA-binding protein PcMYB1, putative [Arabidopsis
  misc_feature (1)..(242): Homolog of NCBI NO: 25405344 NR Description: hypothetical protein F2J10.16 [imported] -
  misc_feature (1)..(242): Homolog of NCBI NO: 34105723 NR Description: Single myb histone 6 [Zea mays subsp. mays]
  misc_feature (1)..(237): Homolog of NCBI NO: 34912214 NR Description: putative telomere repeat binding factor [Oryza
  misc_feature (1)..(245): Homolog of NCBI NO: 33286863 NR Description: Single myb histone 1 [Zea mays subsp. mays]
  misc_feature (1)..(242): Homolog of NCBI NO: 34105719 NR Description: Single myb histone 5 [Zea mays subsp. mays]
  misc_feature (1)..(236): Homolog of NCBI NO: 15240783 NR Description: putative protein; protein id: At5g67580.1, by cDNA: gi_14532517, supported by cDNA: gi_18481425, supported cDNA: gi_18655380 [Arabidopsis thaliana]
  misc_feature (1)..(236): Homolog of NCBI NO: 18481426 NR Description: telomere repeat binding factor 2 [Arabidopsis
MSVMANGWGSREKSRLAVKRTFSLPKQEENSLALTNSLQSDEENVDATSGLQVSSNPPPRRPNVRLDSLIMEAIATLKEPGGCNKTTIGAYIEDQYHAPPDFKRLLSTKLKYLTSCGKLVKVKRKYRIPNSTPLSSHRRKGLGVFGGKQRTSSLPSPKTDIDEVNFQTRSQIDTEIARMKSMNVHEAAAVAAQAVAEAEAAMAEAEEAAKEAEAAEAEAEAAQAFAEEASKTLKGRNICKMMIRA

SEQ ID NO: 74541 - protein, 242 aa, Arabidopsis thaliana
  peptide (1)..(242): Ceres Seq. ID no. 5678149
  misc_feature (65)..(127): Pfam Name: linker histone H1 and H5 family Pfam Description: linker histone H1 and H5 family
  misc_feature (1)..(242): Homolog of NCBI NO: 18402853 NR Description: DNA-binding protein PcMYB1, putative; protein id: supported by cDNA: 40229., supported by cDNA: gi_17065319, by cDNA: gi_18481419 [Arabidopsis thaliana]
  misc_feature (1)..(242): Homolog of NCBI NO: 18481420 NR Description: telomere repeat binding factor 1 [Arabidopsis
  misc_feature (1)..(242): Homolog of NCBI NO: 21593573 NR Description: DNA-binding protein PcMYB1, putative [Arabidopsis
  misc_feature (1)..(239): Homolog of NCBI NO: 25405344 NR Description: hypothetical protein F2J10.16 [imported] -
  misc_feature (1)..(239): Homolog of NCBI NO: 34105723 NR Description: Single myb histone 6 [Zea mays subsp. mays]
  misc_feature (1)..(234): Homolog of NCBI NO: 34912214 NR Description: putative telomere repeat binding factor [Oryza
  misc_feature (1)..(242): Homolog of NCBI NO: 33286863 NR Description: Single myb histone 1 [Zea mays subsp. mays]
  misc_feature (1)..(239): Homolog of NCBI NO: 34105719 NR Description: Single myb histone 5 [Zea mays subsp. mays]
  misc_feature (1)..(233): Homolog of NCBI NO: 15240783 NR Description: putative protein; protein id: At5g67580.1, by cDNA: gi_14532517, supported by cDNA: gi_18481425, supported cDNA: gi_18655380 [Arabidopsis thaliana]
  misc_feature (1)..(233): Homolog of NCBI NO: 18481426 NR Description: telomere repeat binding factor 2 [Arabidopsis
MANGWGSREKSRLAVKRTFSLPKQEENSLALTNSLQSDEENVDATSGLQVSSNPPPRRPNVRLDSLIMEAIATLKEPGGCNKTTIGAYIEDQYHAPPDFKRLLSTKLKYLTSCGKLVKVKRKYRIPNSTPLSSHRRKGLGVFGGKQRTSSLPSPKTDIDEVNFQTRSQIDTEIARMKSMNVHEAAAVAAQAVAEAEAAMAEAEEAAKEAEAAEAEAEAAQAFAEEASKTLKGRNICKMMIRA

SEQ ID NO: 74542 - DNA, 1444 bp, Arabidopsis thaliana
  misc_feature (1)..(1444): Ceres Seq. ID no. 5678166
  misc_feature: MA Experiment ID: 108434 Result: Down-regulated in Transcription
  misc_feature: MA Experiment 108434 PARAMETER Experiment Name: At_Root_Tips_cDNA_P Parameter: Tissue Value: Root Tips
  misc_feature: MA Experiment ID: 108573 Result: Up-regulated in Transcription
  misc_feature: MA Experiment 108573 PARAMETER Experiment Name: At_Drought_cDNA_P Parameter: Timepoint (hr) Value: 6
  misc_feature: MA Experiment 108573 PARAMETER Experiment Name: At_Drought_cDNA_P Parameter: Tissue Value: Aerial
  misc_feature: MA Experiment 108573 PARAMETER Experiment Name: At_Drought_cDNA_P Parameter: Treatment Value: Drought vs. No Drought
  misc_feature: MA Experiment ID: 108585 Result: Up-regulated in Transcription
  misc_feature: MA Experiment 108585 PARAMETER Experiment Name: At_5mM_NaNP_cDNA_P Parameter: Timepoint (hr) Value: 6
  misc_feature: MA Experiment 108585 PARAMETER Experiment Name: At_5mM_NaNP_cDNA_P Parameter: Tissue Value: Aerial
  misc_feature: MA Experiment 108585 PARAMETER Experiment Name: At_5mM_NaNP_cDNA_P Parameter: Treatment Value: null
  misc_feature: MA Experiment ID: 20000111 Result: Up-regulated in Transcription
  misc_feature: MA Experiment 20000111 PARAMETER Experiment Name: At_42deg_Heat_cDNA_P Parameter: Temperature (deg C) Value: 42 vs. 22
  misc_feature: MA Experiment 20000111 PARAMETER Experiment Name: At_42deg_Heat_cDNA_P Parameter: Timepoint (hr) Value: 6
  misc_feature: MA Experiment 20000111 PARAMETER Experiment Name: At_42deg_Heat_cDNA_P Parameter: Tissue Value: Aerial
  misc_feature: MA Experiment ID: 20000214 Result: Down-regulated in Transcription
  misc_feature: MA Experiment 20000214 PARAMETER Experiment Name: At_4deg_Cold_P Parameter: Timepoint (hr) Value: 6
  misc_feature: MA Experiment ID: 20000224 Result: Down-regulated in Transcription
  misc_feature: MA Experiment ID: 20001247 Result: Up-regulated in Transcription
  misc_feature: MA Experiment 20001247 PARAMETER Experiment Name: At_Far-red-induction_P Parameter: Age (day) Value: 7
  misc_feature: MA Experiment 20001247 PARAMETER Experiment Name: At_Far-red-induction_P Parameter: Light Value: Far-red vs. White
  misc_feature: MA Experiment 20001247 PARAMETER Experiment Name: At_Far-red-induction_P Parameter: Organism Value: A. thaliana
  misc_feature: MA Experiment 20001247 PARAMETER Experiment Name: At_Far-red-induction_P Parameter: Plant Line Value: Columbia
  misc_feature: MA Experiment 20001247 PARAMETER Experiment Name: At_Far-red-induction_P Parameter: Timepoint (hr) Value: 1
  misc_feature: MA Experiment 20001247 PARAMETER Experiment Name: At_Far-red-induction_P Parameter: Tissue Value: Whole Plant
  misc_feature: MA Experiment ID: 20001905 Result: Up-regulated in Transcription
  misc_feature: MA Experiment 20001905 PARAMETER Experiment Name: At_Drought_Reproduction_P Parameter: Age (day) Value: 40
  misc_feature: MA Experiment 20001905 PARAMETER Experiment Name: At_Drought_Reproduction_P Parameter: Organism Value: A. thaliana
  misc_feature: MA Experiment 20001905 PARAMETER Experiment Name: At_Drought_Reproduction_P Parameter: Plant Line Value: WS
  misc_feature: MA Experiment 20001905 PARAMETER Experiment Name: At_Drought_Reproduction_P Parameter: Timepoint (day) Value: 10
  misc_feature: MA Experiment 20001905 PARAMETER Experiment Name: At_Drought_Reproduction_P Parameter: Tissue Value: Rosettes
  misc_feature: MA Experiment 20001905 PARAMETER Experiment Name: At_Drought_Reproduction_P Parameter: Treatment Value: Drought vs. No Drought
atcttcaatttggacttccaacgccgacaccgtttaactccgatggttcccccgccgtctaatccgcagcaggttcagcagttcctctcctctgccctctcccagcgcggcccatcttcagtcccctacgaagagtccaacaagtggttgatccggcaacatctacttaacctaatctcttcttacccttccttagagcccgctccgtcaacctccttcaagcagatggtacgattccgatgccttttcatggagtcacctataacatacctgtgattatctggctcctcgagtcatatcctcgtcatcctccttgcgtctatgtgaatcccaccgctgatatgatcatcaagcgacctcacgcacatgtcactccttctggtctcgtttctcttccgtaccttcagaattgggtctaccctagctccaatctcgtagatctcgtctccgatctcagcgctgcttttgctcgtgatccgcctctttattctcgacgccgtcctcagccaccgccaccgtctcctcctacggtatacgattcgtctctgtcacgacctccttcggctgatcagtcattgcctagaccgttcccgccatcaccttacggcggaggagtaagtagggtgcaagtgcagcatgttcaccaccagcagcaatctgatgatgcggcggaggttttcaagagaaatgcgattaataagatggtggagatggttcatagcgatttggtttcgatgaggagagccagagaagctgaagcagaggagctgctgagcttgcaagctgggctgaagagaagagaggatgagcttaatatagggttgaaagagatggttgaggagaaagaaacacttgaacaacaattacagattatctccatgaacactgatattctagactcgtgggttagagagaaccaaggcaaaaccaagaatttagttgatttggatgtggataatgcttttgaatgtggtgacacactctctaagcagatgttagagtgtactgctttggatttagccattgaagatgctatttattccttggataagtcgtttcaagatggtgttgttccctttgatcagtatttgaggaatgtgaggttgttgtcgagagaacagttcttccaccgagccacgggttctaaagtcagggcggcacaaatggaggttcaggttgcagccatcgcaggtaggttacattcatgaatgaaattcagtgtttttgtttgcgggatactgtgtcacacaatgctggtttatatagtctgagattagcatctttgaggagtatttctgtggctatgcgtgtgatgatggttcctctttaagattgaattaaatgtctatagactatatatacacgtacactgttgtgcacatacatatttgaatggatcagggcctgagaatcgtctccttttgtgatctatgactactttttt

SEQ ID NO: 74543 - protein, 322 aa, Arabidopsis thaliana; identical to SEQ ID NO: 40789
  peptide (1)..(322): Ceres Seq. ID no. 5678167
  misc_feature (1)..(309): Pfam Name: Tumour susceptibility gene 101 protein (TSG101) Pfam Description: Tumour susceptibility gene 101 protein (TSG101)
  misc_feature (1)..(322): Homolog of NCBI NO: 18399596 NR Description: expressed protein; protein id: At3g12400.1
  misc_feature (101)..(322): Homolog of NCBI NO: 15240732 NR Description: putative protein; protein id: At5g13860.1 thaliana] >gi|10177652|dbj|BAB11114.1| contains similarity to polypeptide associated complex alpha chain~gene_id:MAC12.18
  misc_feature (1)..(106): Homolog of NCBI NO: 15240732 NR Description: putative protein; protein id: At5g13860.1 thaliana] >gi|10177652|dbj|BAB11114.1| contains similarity to polypeptide associated complex alpha chain~gene_id:MAC12.18
  misc_feature (1)..(305): Homolog of NCBI NO: 5454140 NR Description: tumor susceptibility gene 101 [Homo sapiens] Tumor susceptibility gene 101 protein >gi|3184258|gb|AAC52083.1|
  misc_feature (1)..(305): Homolog of NCBI NO: 12803337 NR Description: tumor susceptibility gene 101 [Homo sapiens]
  misc_feature (87)..(304): Homolog of NCBI NO: 32410255 NR Description: hypothetical protein [Neurospora crassa]
  misc_feature (1)..(121): Homolog of NCBI NO: 32410255 NR Description: hypothetical protein [Neurospora crassa]
  misc_feature (92)..(305): Homolog of NCBI NO: 33285220 NR Description: Hypothetical protein C09G12.9 [Caenorhabditis
  misc_feature (1)..(118): Homolog of NCBI NO: 33285220 NR Description: Hypothetical protein C09G12.9 [Caenorhabditis
  misc_feature (1)..(219): Homolog of NCBI NO: 9454364 NR Description: tumor susceptibility protein 101 [Chelonia mydas]

SEQ ID NO: 74544 - protein, 288 aa, Arabidopsis thaliana; identical to SEQ ID NO: 40790
  peptide (1)..(288): Ceres Seq. ID no. 5678168
  misc_feature (1)..(275): Pfam Name: Tumour susceptibility gene 101 protein (TSG101) Pfam Description: Tumour susceptibility gene 101 protein (TSG101)
  misc_feature (1)..(288): Homolog of NCBI NO: 18399596 NR Description: expressed protein; protein id: At3g12400.1
  misc_feature (67)..(288): Homolog of NCBI NO: 15240732 NR Description: putative protein; protein id: At5g13860.1 thaliana] >gi|10177652|dbj|BAB11114.1| contains similarity to polypeptide associated complex alpha chain~gene_id:MAC12.18
  misc_feature (1)..(72): Homolog of NCBI NO: 15240732 NR Description: putative protein; protein id: At5g13860.1 thaliana] >gi|10177652|dbj|BAB11114.1| contains similarity to polypeptide associated complex alpha chain~gene_id:MAC12.18
  misc_feature (1)..(271): Homolog of NCBI NO: 5454140 NR Description: tumor susceptibility gene 101 [Homo sapiens] Tumor susceptibility gene 101 protein >gi|3184258|gb|AAC52083.1|
  misc_feature (1)..(271): Homolog of NCBI NO: 12803337 NR Description: tumor susceptibility gene 101 [Homo sapiens]
  misc_feature (53)..(270): Homolog of NCBI NO: 32410255 NR Description: hypothetical protein [Neurospora crassa]
  misc_feature (1)..(87): Homolog of NCBI NO: 32410255 NR Description: hypothetical protein [Neurospora crassa]
  misc_feature (58)..(271): Homolog of NCBI NO: 33285220 NR Description: Hypothetical protein C09G12.9 [Caenorhabditis
  misc_feature (1)..(84): Homolog of NCBI NO: 33285220 NR Description: Hypothetical protein C09G12.9 [Caenorhabditis
  misc_feature (1)..(185): Homolog of NCBI NO: 9454364 NR Description: tumor susceptibility protein 101 [Chelonia mydas]

SEQ ID NO: 74545 - protein, 168 aa, Arabidopsis thaliana; identical to SEQ ID NO: 40791
  peptide (1)..(168): Ceres Seq. ID no. 5678169
  misc_feature (1)..(155): Pfam Name: Tumour susceptibility gene 101 protein (TSG101) Pfam Description: Tumour susceptibility gene 101 protein (TSG101)
  misc_feature (1)..(168): Homolog of NCBI NO: 18399596 NR Description: expressed protein; protein id: At3g12400.1
  misc_feature (1)..(168): Homolog of NCBI NO: 15240732 NR Description: putative protein; protein id: At5g13860.1 thaliana] >gi|10177652|dbj|BAB11114.1| contains similarity to polypeptide associated complex alpha chain~gene_id:MAC12.18
  misc_feature (1)..(151): Homolog of NCBI NO: 5454140 NR Description: tumor susceptibility gene 101 [Homo sapiens] Tumor susceptibility gene 101 protein >gi|3184258|gb|AAC52083.1|
  misc_feature (1)..(151): Homolog of NCBI NO: 12803337 NR Description: tumor susceptibility gene 101 [Homo sapiens]
  misc_feature (1)..(150): Homolog of NCBI NO: 32410255 NR Description: hypothetical protein [Neurospora crassa]
  misc_feature (1)..(151): Homolog of NCBI NO: 33285220 NR Description: Hypothetical protein C09G12.9 [Caenorhabditis
  misc_feature (1)..(65): Homolog of NCBI NO: 9454364 NR Description: tumor susceptibility protein 101 [Chelonia mydas]
  misc_feature (1)..(65): Homolog of NCBI NO: 11230780 NR Description: tumor susceptibility gene 101 protein [Mus >gi|9789789|sp|Q61187|T101_MOUSE Tumor susceptibility gene 101 >gi|3184260|gb|AAC53586.1| tumor susceptibility protein TSG101
  misc_feature (1)..(65): Homolog of NCBI NO: 31745166 NR Description: Tumor supressor gene; similar to tumor gene 101 protein [Mus musculus] [Rattus norvegicus]
  misc_feature (1)..(151): Homolog of NCBI NO: 31745166 NR Description: Tumor supressor gene; similar to tumor gene 101 protein [Mus musculus] [Rattus norvegicus]

SEQ ID NO: 74546 - DNA, 700 bp, Arabidopsis thaliana
  misc_feature (1)..(700): Ceres Seq. ID no. 5678197
  misc_feature: MA Experiment ID: 108577 Result: Down-regulated in Transcription
  misc_feature: MA Experiment 108577 PARAMETER Experiment Name: At_42deg_Heat_cDNA_P Parameter: Temperature (deg C) Value: 42 vs. 22
  misc_feature: MA Experiment 108577 PARAMETER Experiment Name: At_42deg_Heat_cDNA_P Parameter: Timepoint (hr) Value: 6
  misc_feature: MA Experiment 108577 PARAMETER Experiment Name: At_42deg_Heat_cDNA_P Parameter: Tissue Value: Aerial
  misc_feature: MA Experiment ID: 20000439 Result: Up-regulated in Transcription
  misc_feature: MA Experiment 20000439 PARAMETER Experiment Name: At_Roots__P Parameter: Age (day) Value: 14 vs. 21
  misc_feature: MA Experiment 20000439 PARAMETER Experiment Name: At_Roots__P Parameter: Organism Value: A. thaliana
  misc_feature: MA Experiment 20000439 PARAMETER Experiment Name: At_Roots__P Parameter: Tissue Value: Roots vs. Whole Plant
gtgccgctttgttcctaaacgattttctgtctgttctctctttgctctctcgccctctcttgctcttctgggttcgtcttcctcggctagggtttatcagtggtttgtcaatggaggcttcatcatctcaaccatccgattcttctgatcaaactgcttccaagttcctttctgacctcccgtctcgaggtttcttgtcttctaccgtcgtctcttccaatccgggaagcttgcgggtctacatttgtgagcatgacacatctcccccagaaggacagcttatcaaaacaaaccagcaaaatatactaatcagatctctcttgttaaagaagcaaaaaggcgaatctagttctaaagactcaaaaggaactgctgaagatggtcctaaaaagagggctgcaaatagagctctggacgacagaagctcagctaaaagagctgctaatgcatctagacaagaaggatcaagcagtcgcacaggcgaaagagactttcagtctttgaccgttgagaagctccgcgccatgctcaaggagaagggccttccaacaaaaggaagaaaggatgagctcattgcgcgtctgaagagtgccaactgaaatgaagttgagaagggtgctctggtgaatatatgtatctttagaggtttcccaaataggagagaattgttgttgttcttgatcaaatacaaatccttttg

SEQ ID NO: 74547 - protein, 198 aa, Arabidopsis thaliana; identical to SEQ ID NO: 37026
  peptide (1)..(198): Ceres Seq. ID no. 5678198
  misc_feature (37)..(187): Homolog of NCBI NO: 15242782 NR Description: unknown protein; protein id: At5g63460.1 thaliana] >gi|9758287|dbj|BAB08811.1| gene_id:MLE2.9~unknown

SEQ ID NO: 74548 - protein, 162 aa, Arabidopsis thaliana; identical to SEQ ID NO: 37027
  peptide (1)..(162): Ceres Seq. ID no. 5678199
  misc_feature (1)..(151): Homolog of NCBI NO: 15242782 NR Description: unknown protein; protein id: At5g63460.1 thaliana] >gi|9758287|dbj|BAB08811.1| gene_id:MLE2.9~unknown

SEQ ID NO: 74549 - DNA, 1418 bp, Arabidopsis thaliana
  misc_feature (1)..(1418): Ceres Seq. ID no. 5678239
  misc_feature: MA Experiment ID: 108434 Result: Up-regulated in Transcription
  misc_feature: MA Experiment 108434 PARAMETER Experiment Name: At_Root_Tips_cDNA_P Parameter: Tissue Value: Root Tips
  misc_feature: MA Experiment ID: 20000111 Result: Down-regulated in Transcription
  misc_feature: MA Experiment 20000111 PARAMETER Experiment Name: At_42deg_Heat_cDNA_P Parameter: Temperature (deg C) Value: 42 vs. 22
  misc_feature: MA Experiment 20000111 PARAMETER Experiment Name: At_42deg_Heat_cDNA_P Parameter: Timepoint (hr) Value: 6
  misc_feature: MA Experiment 20000111 PARAMETER Experiment Name: At_42deg_Heat_cDNA_P Parameter: Tissue Value: Aerial
  misc_feature: MA Experiment ID: 20000113 Result: Down-regulated in Transcription
  misc_feature: MA Experiment 20000113 PARAMETER Experiment Name: At_42deg_Heat_cDNA_P Parameter: Temperature (deg C) Value: 42 vs. 22
  misc_feature: MA Experiment 20000113 PARAMETER Experiment Name: At_42deg_Heat_cDNA_P Parameter: Timepoint (hr) Value: 8
  misc_feature: MA Experiment 20000113 PARAMETER Experiment Name: At_42deg_Heat_cDNA_P Parameter: Tissue Value: Aerial
  misc_feature: MA Experiment ID: 20000171 Result: Down-regulated in Transcription
  misc_feature: MA Experiment 20000171 PARAMETER Experiment Name: At_42deg_Heat_P Parameter: Age (day) Value: 14
  misc_feature: MA Experiment 20000171 PARAMETER Experiment Name: At_42deg_Heat_P Parameter: Organism Value: A. thaliana
  misc_feature: MA Experiment 20000171 PARAMETER Experiment Name: At_42deg_Heat_P Parameter: Plant Line Value: WS
  misc_feature: MA Experiment 20000171 PARAMETER Experiment Name: At_42deg_Heat_P Parameter: Temperature (deg C) Value: 42 vs. 22
  misc_feature: MA Experiment 20000171 PARAMETER Experiment Name: At_42deg_Heat_P Parameter: Timepoint (hr) Value: 1
  misc_feature: MA Experiment 20000171 PARAMETER Experiment Name: At_42deg_Heat_P Parameter: Tissue Value: Aerial
  misc_feature: MA Experiment ID: 20000173 Result: Down-regulated in Transcription
  misc_feature: MA Experiment 20000173 PARAMETER Experiment Name: At_42deg_Heat_P Parameter: Age (day) Value: 14
  misc_feature: MA Experiment 20000173 PARAMETER Experiment Name: At_42deg_Heat_P Parameter: Organism Value: A. thaliana
  misc_feature: MA Experiment 20000173 PARAMETER Experiment Name: At_42deg_Heat_P Parameter: Plant Line Value: WS
  misc_feature: MA Experiment 20000173 PARAMETER Experiment Name: At_42deg_Heat_P Parameter: Temperature (deg C) Value: 42 vs. 22
  misc_feature: MA Experiment 20000173 PARAMETER Experiment Name: At_42deg_Heat_P Parameter: Timepoint (hr) Value: 6
  misc_feature: MA Experiment 20000173 PARAMETER Experiment Name: At_42deg_Heat_P Parameter: Tissue Value: Aerial
ataggactcgacaaatagaagaagcagattcgttgctaacgaagtaaaggatcttacttttttagtctttgctttagaaataacttataactacaagtcagagaggggccgagtaaatcggaaagatgacggcgccgatgatcctgaccggaagtggatcggcggcggagagagacgctcggatggcgcacactgctatggcgtttgttcagctctttaatggtggataccatgtgattactaaagtagctcttaatgttggagtcaaccagcttgtcttctgtgtatgccgtgatcttcttgctctctctattctcgctcctcttgcttacttccgcgaaagaaagatcagaactccaatgaataaaagccttctcttgtcattcttctttctgggcttagcaggggtatttgggaaccagttgttatttcttatcggtcttacatacacaaatcccacttatgctgctgccattcaaccatccatcccggtcttcacctttctcttggctgtcatgatgggtacagaaagagtgaatttgttgagaatcgaaggtcaaactaaggttggaggcacacttgtgtgtgttatgggtgctgtcttcatggttgtatttcgaggtccggccttgttaggagataaagatgcagactttgcgatgaacaatgaaatcagtgctaaaggtcaacctgagcctactggttggttagtctctggttttctcgatcttggatttgagcaatggcacattggagttttatgcttgattggaaactgcatgtgtatggctacttttcttgccattcaggcgccacttttgaagaagtatccggcaaatctttctgttgctgcattatcatacttctttggcacagtactaatgtgcacaacagctttctttatggtaaaggagccattggattggaagctaacacaatctgaggttcttgcagttatatatgcaggagttatcgcatcagcactaaactatggactcttgacttggtccaataagattattggtcctgccttggttgctctctacaatcctcttcaacccgctgcatcagctttcctatcgagaatctttctcggtagccccatttatctcggaagcgttgtgggtggattcttcatcattctaggactctatatggtcacttgggcatcgtttagagagcgaaaaacagcggtttccgggattgggattgcgccccatggtctaaaaacctcagagcctctgatatttaatgggacagttaacagactaggacagttgttttctggattacccagttcctctgtgaaatctgcagactaaaaagataccaaaaagttaagattcagacgagatcccattttacaacagctataactttttgttaactttcatctcttattaatatcttcttcgatt

SEQ ID NO: 74550 - protein, 398 aa, Arabidopsis thaliana; identical to SEQ ID NO: 23538
  peptide (1)..(398): Ceres Seq. ID no. 5678240
  misc_feature (30)..(164): Pfam Name: Integral membrane protein DUF6 Pfam Description: Integral membrane protein DUF6
  misc_feature (1)..(398): Homolog of NCBI NO: 18415262 NR Description: Expressed protein; protein id: At4g19185.1, by cDNA: 36576., supported by cDNA: gi_16974592 [Arabidopsis >gi|16974593|gb|AAL31201.1| AT4g19180/T18B16_150 [Arabidopsis
  misc_feature (25)..(398): Homolog of NCBI NO: 21593145 NR Description: unknown [Arabidopsis thaliana]
  misc_feature (196)..(375): Homolog of NCBI NO: 30694751 NR Description: nodulin N21 family protein [Arabidopsis thaliana]
  misc_feature (1)..(171): Homolog of NCBI NO: 30694751 NR Description: nodulin N21 family protein [Arabidopsis thaliana]
  misc_feature (95)..(375): Homolog of NCBI NO: 9758727 NR Description: nodulin-like protein [Arabidopsis thaliana]
  misc_feature (1)..(73): Homolog of NCBI NO: 9758727 NR Description: nodulin-like protein [Arabidopsis thaliana]
  misc_feature (1)..(221): Homolog of NCBI NO: 7487133 NR Description: hypothetical protein T18B16.150 - Arabidopsis >gi|2828293|emb|CAA16707.1| putative protein [Arabidopsis >gi|7268713|emb|CAB78920.1| putative protein [Arabidopsis
  misc_feature (227)..(330): Homolog of NCBI NO: 7487133 NR Description: hypothetical protein T18B16.150 - Arabidopsis >gi|2828293|emb|CAA16707.1| putative protein [Arabidopsis >gi|7268713|emb|CAB78920.1| putative protein [Arabidopsis
  misc_feature (227)..(398): Homolog of NCBI NO: 15231274 NR Description: putative protein; protein id: At3g45870.1
  misc_feature (12)..(176): Homolog of NCBI NO: 15231274 NR Description: putative protein; protein id: At3g45870.1

SEQ ID NO: 74551 - protein, 394 aa, Arabidopsis thaliana; identical to SEQ ID NO: 23539
  peptide (1)..(394): Ceres Seq. ID no. 5678241
  misc_feature (26)..(160): Pfam Name: Integral membrane protein DUF6 Pfam Description: Integral membrane protein DUF6
  misc_feature (1)..(394): Homolog of NCBI NO: 18415262 NR Description: Expressed protein; protein id: At4g19185.1, by cDNA: 36576., supported by cDNA: gi_16974592 [Arabidopsis >gi|16974593|gb|AAL31201.1| AT4g19180/T18B16_150 [Arabidopsis
  misc_feature (21)..(394): Homolog of NCBI NO: 21593145 NR Description: unknown [Arabidopsis thaliana]
  misc_feature (192)..(371): Homolog of NCBI NO: 30694751 NR Description: nodulin N21 family protein [Arabidopsis thaliana]
  misc_feature (1)..(167): Homolog of NCBI NO: 30694751 NR Description: nodulin N21 family protein [Arabidopsis thaliana]
  misc_feature (91)..(371): Homolog of NCBI NO: 9758727 NR Description: nodulin-like protein [Arabidopsis thaliana]
  misc_feature (1)..(69): Homolog of NCBI NO: 9758727 NR Description: nodulin-like protein [Arabidopsis thaliana]
  misc_feature (1)..(217): Homolog of NCBI NO: 7487133 NR Description: hypothetical protein T18B16.150 - Arabidopsis >gi|2828293|emb|CAA16707.1| putative protein [Arabidopsis >gi|7268713|emb|CAB78920.1| putative protein [Arabidopsis
  misc_feature (223)..(326): Homolog of NCBI NO: 7487133 NR Description: hypothetical protein T18B16.150 - Arabidopsis >gi|2828293|emb|CAA16707.1| putative protein [Arabidopsis >gi|7268713|emb|CAB78920.1| putative protein [Arabidopsis
  misc_feature (223)..(394): Homolog of NCBI NO: 15231274 NR Description: putative protein; protein id: At3g45870.1
  misc_feature (8)..(172): Homolog of NCBI NO: 15231274 NR Description: putative protein; protein id: At3g45870.1

SEQ ID NO: 74552 - protein, 379 aa, Arabidopsis thaliana; identical to SEQ ID NO: 23540
  peptide (1)..(379): Ceres Seq. ID no. 5678242
  misc_feature (11)..(145): Pfam Name: Integral membrane protein DUF6 Pfam Description: Integral membrane protein DUF6
  misc_feature (1)..(379): Homolog of NCBI NO: 18415262 NR Description: Expressed protein; protein id: At4g19185.1, by cDNA: 36576., supported by cDNA: gi_16974592 [Arabidopsis >gi|16974593|gb|AAL31201.1| AT4g19180/T18B16_150 [Arabidopsis
  misc_feature (6)..(379): Homolog of NCBI NO: 21593145 NR Description: unknown [Arabidopsis thaliana]
  misc_feature (177)..(356): Homolog of NCBI NO: 30694751 NR Description: nodulin N21 family protein [Arabidopsis thaliana]
  misc_feature (1)..(152): Homolog of NCBI NO: 30694751 NR Description: nodulin N21 family protein [Arabidopsis thaliana]
  misc_feature (76)..(356): Homolog of NCBI NO: 9758727 NR Description: nodulin-like protein [Arabidopsis thaliana]
  misc_feature (1)..(54): Homolog of NCBI NO: 9758727 NR Description: nodulin-like protein [Arabidopsis thaliana]
  misc_feature (1)..(202): Homolog of NCBI NO: 7487133 NR Description: hypothetical protein T18B16.150 - Arabidopsis >gi|2828293|emb|CAA16707.1| putative protein [Arabidopsis >gi|7268713|emb|CAB78920.1| putative protein [Arabidopsis
  misc_feature (208)..(311): Homolog of NCBI NO: 7487133 NR Description: hypothetical protein T18B16.150 - Arabidopsis >gi|2828293|emb|CAA16707.1| putative protein [Arabidopsis >gi|7268713|emb|CAB78920.1| putative protein [Arabidopsis
  misc_feature (208)..(379): Homolog of NCBI NO: 15231274 NR Description: putative protein; protein id: At3g45870.1
  misc_feature (1)..(157): Homolog of NCBI NO: 15231274 NR Description: putative protein; protein id: At3g45870.1

SEQ ID NO: 74553 - DNA, 732 bp, Arabidopsis thaliana
  misc_feature (1)..(732): Ceres Seq. ID no. 5678263
  misc_feature: MA Experiment ID: 108434 Result: Up-regulated in Transcription
  misc_feature: MA Experiment 108434 PARAMETER Experiment Name: At_Root_Tips_cDNA_P Parameter: Tissue Value: Root Tips
  misc_feature: MA Experiment ID: 108462 Result: Up-regulated in Transcription
  misc_feature: MA Experiment 108462 PARAMETER Experiment Name: At_Germinating_Seeds_cDNA_P Parameter: Age (day) Value: 2 vs. 0
  misc_feature: MA Experiment 108462 PARAMETER Experiment Name: At_Germinating_Seeds_cDNA_P Parameter: Tissue Value: Germinating Seeds
  misc_feature: MA Experiment ID: 20000111 Result: Down-regulated in Transcription
  misc_feature: MA Experiment 20000111 PARAMETER Experiment Name: At_42deg_Heat_cDNA_P Parameter: Temperature (deg C) Value: 42 vs. 22
  misc_feature: MA Experiment 20000111 PARAMETER Experiment Name: At_42deg_Heat_cDNA_P Parameter: Timepoint (hr) Value: 6
  misc_feature: MA Experiment 20000111 PARAMETER Experiment Name: At_42deg_Heat_cDNA_P Parameter: Tissue Value: Aerial
  misc_feature: MA Experiment ID: 20000113 Result: Down-regulated in Transcription
  misc_feature: MA Experiment 20000113 PARAMETER Experiment Name: At_42deg_Heat_cDNA_P Parameter: Temperature (deg C) Value: 42 vs. 22
  misc_feature: MA Experiment 20000113 PARAMETER Experiment Name: At_42deg_Heat_cDNA_P Parameter: Timepoint (hr) Value: 8
  misc_feature: MA Experiment 20000113 PARAMETER Experiment Name: At_42deg_Heat_cDNA_P Parameter: Tissue Value: Aerial
  misc_feature: MA Experiment ID: 20000171 Result: Down-regulated in Transcription
  misc_feature: MA Experiment 20000171 PARAMETER Experiment Name: At_42deg_Heat_P Parameter: Age (day) Value: 14
  misc_feature: MA Experiment 20000171 PARAMETER Experiment Name: At_42deg_Heat_P Parameter: Organism Value: A. thaliana
  misc_feature: MA Experiment 20000171 PARAMETER Experiment Name: At_42deg_Heat_P Parameter: Plant Line Value: WS
  misc_feature: MA Experiment 20000171 PARAMETER Experiment Name: At_42deg_Heat_P Parameter: Temperature (deg C) Value: 42 vs. 22
  misc_feature: MA Experiment 20000171 PARAMETER Experiment Name: At_42deg_Heat_P Parameter: Timepoint (hr) Value: 1
  misc_feature: MA Experiment 20000171 PARAMETER Experiment Name: At_42deg_Heat_P Parameter: Tissue Value: Aerial
  misc_feature: MA Experiment ID: 20000173 Result: Down-regulated in Transcription
  misc_feature: MA Experiment 20000173 PARAMETER Experiment Name: At_42deg_Heat_P Parameter: Age (day) Value: 14
  misc_feature: MA Experiment 20000173 PARAMETER Experiment Name: At_42deg_Heat_P Parameter: Organism Value: A. thaliana
  misc_feature: MA Experiment 20000173 PARAMETER Experiment Name: At_42deg_Heat_P Parameter: Plant Line Value: WS
  misc_feature: MA Experiment 20000173 PARAMETER Experiment Name: At_42deg_Heat_P Parameter: Temperature (deg C) Value: 42 vs. 22
  misc_feature: MA Experiment 20000173 PARAMETER Experiment Name: At_42deg_Heat_P Parameter: Timepoint (hr) Value: 6
  misc_feature: MA Experiment 20000173 PARAMETER Experiment Name: At_42deg_Heat_P Parameter: Tissue Value: Aerial
  misc_feature: MA Experiment ID: 20000180 Result: Up-regulated in Transcription
  misc_feature: MA Experiment 20000180 PARAMETER Experiment Name: At_Germinating_Seeds_P Parameter: Age (hr) Value: 24 vs. 0
  misc_feature: MA Experiment 20000180 PARAMETER Experiment Name: At_Germinating_Seeds_P Parameter: Tissue Value: Germinating Seeds
  misc_feature: MA Experiment ID: 20000184 Result: Down-regulated in Transcription
  misc_feature: MA Experiment 20000184 PARAMETER Experiment Name: At_Shoots__P Parameter: Age (day) Value: 7
  misc_feature: MA Experiment 20000184 PARAMETER Experiment Name: At_Shoots__P Parameter: Tissue Value: Shoots vs. Whole Plant
  misc_feature: MA Experiment ID: 20000224 Result: Up-regulated in Transcription
  misc_feature: MA Experiment ID: 20000234 Result: Up-regulated in Transcription
  misc_feature: MA Experiment 20000234 PARAMETER Experiment Name: At_Siliques_P Parameter: Age (day) Value: 21
  misc_feature: MA Experiment 20000234 PARAMETER Experiment Name: At_Siliques_P Parameter: Organism Value: A. thaliana
  misc_feature: MA Experiment 20000234 PARAMETER Experiment Name: At_Siliques_P Parameter: Plant Line Value: WS
  misc_feature: MA Experiment 20000234 PARAMETER Experiment Name: At_Siliques_P Parameter: Tissue Value: Less Than 5mm Siliques vs. Whole Plant
  misc_feature: MA Experiment ID: 20000265 Result: Up-regulated in Transcription
  misc_feature: MA Experiment 20000265 PARAMETER Experiment Name: At_Open_Flower_P Parameter: Age (day) Value: 21
  misc_feature: MA Experiment 20000265 PARAMETER Experiment Name: At_Open_Flower_P Parameter: Plant Line Value: WS
  misc_feature: MA Experiment 20000265 PARAMETER Experiment Name: At_Open_Flower_P Parameter: Tissue Value: Closed Flower vs. Whole Plant
  misc_feature: MA Experiment ID: 20000286 Result: Up-regulated in Transcription
  misc_feature: MA Experiment 20000286 PARAMETER Experiment Name: At_Open_Flower_P Parameter: Age (day) Value: 21
  misc_feature: MA Experiment 20000286 PARAMETER Experiment Name: At_Open_Flower_P Parameter: Plant Line Value: WS
  misc_feature: MA Experiment 20000286 PARAMETER Experiment Name: At_Open_Flower_P Parameter: Tissue Value: Half Open vs. Whole Plant
  misc_feature: MA Experiment ID: 20000794 Result: Up-regulated in Transcription
  misc_feature: MA Experiment 20000794 PARAMETER Experiment Name: At_Petals_P Parameter: Age (day) Value: 23-25 days
  misc_feature: MA Experiment 20000794 PARAMETER Experiment Name: At_Petals_P Parameter: Plant Line Value: WS
  misc_feature: MA Experiment 20000794 PARAMETER Experiment Name: At_Petals_P Parameter: Tissue Value: Petals vs. Whole plant
actttttcaacttactttatcgtgcgtctgtacggaccacaaaaggctctctctttatttctctgtgagatttttttaggatctgagagagccaaagatcatggaggaaagccaagaacttgccttgacccagttgagaaaatcggtcgagaaactctcttcttctactgagagtttgttgtttatgcgctagacaaaacaatcgcaagtggcaacaatggcaaagaagttggaggtgagaaattagtagccgttattgatctggcaaacattacatacaagaaccttgatgctcgtggattgatcactggctttcaattcttacaatcttactacccggaacgccttgcaaaatgctacattttgcatatgcccggattcttcgtgaccgtttggaaattcgtctgccgttttctagagaaagcaactcaggaaaagattgtgatagttacggatggagaagaacagagaaaattcgaggaggagatcggagcagatgctttaccggaagagtacggtggccgagctaagctcacagcaatccaagatgttcttcttcctcaggctgctccagtaactctaacaaacaataatgtttagctctttatttttggaagcattaacctgaatatttgtaatggtcagaacataactagtggtacatctctaaatttccaaaagaagcaatgaaaacatgagaaagtaatgcgaatatattcaatctggtgactg

SEQ ID NO: 74554 - protein, 76 aa, Arabidopsis thaliana; identical to SEQ ID NO: 28535
  peptide (1)..(76): Ceres Seq. ID no. 5678264
  misc_feature (1)..(51): Pfam Name: CRAL/TRIO domain Pfam Description: CRAL/TRIO domain
  misc_feature (1)..(75): Homolog of NCBI NO: 25402783 NR Description: protein F10B6.22 [imported] - Arabidopsis >gi|8778230|gb|AAF79239.1|AC006917_24 F10B6.22 [Arabidopsis
  misc_feature (1)..(76): Homolog of NCBI NO: 30684014 NR Description: SEC14 cytosolic factor, putative [Arabidopsis >gi|26451546|dbj|BAC42870.1| putative

SEQ ID NO: 74555 - protein, 58 aa, Arabidopsis thaliana; identical to SEQ ID NO: 28537
  peptide (1)..(58): Ceres Seq. ID no. 5678265

SEQ ID NO: 74556 - protein, 56 aa, Arabidopsis thaliana
  peptide (1)..(56): Ceres Seq. ID no. 5678266
  misc_feature (23)..(56): Homolog of NCBI NO: 2286121 NR Description: sec14 like protein [Oryza sativa]
  misc_feature (23)..(56): Homolog of NCBI NO: 34907052 NR Description: sec14 like protein [Oryza sativa (japonica >gi|20160730|dbj|BAB89672.1| sec14 like protein [Oryza sativa
TFSTYFIVRLYGPQKALSLFLCEIFLGSERAKDHGGKPRTCLDPVEKIGRETLFFY

SEQ ID NO: 74557 - DNA, 1226 bp, Arabidopsis thaliana
  misc_feature (1)..(1226): Ceres Seq. ID no. 5678314
  misc_feature: MA Experiment ID: 108579 Result: Down-regulated in Transcription
  misc_feature: MA Experiment 108579 PARAMETER Experiment Name: At_4deg_Cold_cDNA_P Parameter: Temperature (deg C) Value: 4 vs. 22
  misc_feature: MA Experiment 108579 PARAMETER Experiment Name: At_4deg_Cold_cDNA_P Parameter: Timepoint (hr) Value: 6
  misc_feature: MA Experiment 108579 PARAMETER Experiment Name: At_4deg_Cold_cDNA_P Parameter: Tissue Value: Aerial
  misc_feature: MA Experiment ID: 20000794 Result: Up-regulated in Transcription
  misc_feature: MA Experiment 20000794 PARAMETER Experiment Name: At_Petals_P Parameter: Age (day) Value: 23-25 days
  misc_feature: MA Experiment 20000794 PARAMETER Experiment Name: At_Petals_P Parameter: Plant Line Value: WS
  misc_feature: MA Experiment 20000794 PARAMETER Experiment Name: At_Petals_P Parameter: Tissue Value: Petals vs. Whole plant
  misc_feature: Pfam Name: Aldedh Pfam Description: Aldehyde dehydrogenase family
aagggttatattctcaaggaacccattggcgtagttggcatgattactccatggaactatccgttattgatggctgtctggaaagtcgctccttcacttgctgctgggtgcacggctatactgaaaccttcagagttggcctccctgacatgtttggagctcgctgatatttgccgcgaggtgggtctaccacctggtgttcttaatattctgactggtttaggaactgaagcaggtgctccactggcatcgcatccacatgttgacaagattgtattcactggaagcacaacaactggaagcagcattatgacttccgctgccaaattggtgaaacagtttccttggagcttgggggtaaaagccctatcattgtctttgatgatgtcgatattgataaagctgtggaatggactatgtttggttgtttctggacgaatgggcagatttgtagtgccacatctcgacttcttgtgcatgaaaggattgctgacgagtttttggacaagctggtaaagtggaccaagaacattaagatttcagatccttttgaagaaggctgtaggcttggtcctgttgtcagtaaaggacagtacgagagagttctaaagtttgtctcaaacgctaggaatgaaggtgcaactgttctttgtggaggagttcgtcctgagcatttaaagaagggatactttgttgaacctgcgattgtttcaaatgtgactacttcaatggaaatctggagagaggaagtctttggtcctgctctgtgtgtgaaaacattctccaccgaggatgaggcaattcagcttgcaaatgactctcaatatggattagcaggcgcagtattatcaaatgatctggagcggtgtgatcgtgttagtaaggctttccaggcgggaatagtgtgggtcaactgctctcagccatgcttctgccaagctccatggggtggaaccaaacgcagtggatttggccgtgaattgggagaatggggacttgagaactacttgagtgtgaagcaggtgactcagtatatctctgatgaaccatggggatggtacaaacctccttccaagctctgagacaaacactagttcctgatatttccttaaaacatgtactcatgagaatataccaataaagcaagagacccttctgtaagagaaatggtattgctactttaaattcttgaaaaaaatgaaaaataagatgagatgatatttctt

SEQ ID NO: 74558 - protein, 221 aa, Arabidopsis thaliana
  peptide (1)..(221): Ceres Seq. ID no. 5678315
  misc_feature: Pfam Name: Aldedh Pfam Description: Aldehyde dehydrogenase family
  misc_feature (1)..(221): Homolog of NCBI NO: 15228346 NR Description: betaine aldehyde dehydrogenase-like protein; id: At3g48170.1, supported by cDNA: gi_13878140, supported by gi_17104544 [Arabidopsis thaliana] >gi|7431494|pir||T13006
  misc_feature (1)..(218): Homolog of NCBI NO: 11251896 NR Description: betaine-aldehyde dehydrogenase (EC 1.2.1.8) - Amaranthus hypochondriacus >gi|2388710|gb|AAB70010.1| betaine
  misc_feature (1)..(219): Homolog of NCBI NO: 18410730 NR Description: betaine aldehyde dehydrogenase, putative; protein At1g74920.1, supported by cDNA: 34926., supported by cDNA:
  misc_feature (1)..(221): Homolog of NCBI NO: 15131692 NR Description: putative aminoaldehyde dehydrogenase [Pisum
  misc_feature (1)..(218): Homolog of NCBI NO: 20135570 NR Description: betaine aldehyde dehydrogenase BADH2 [Atriplex
  misc_feature (1)..(218): Homolog of NCBI NO: 118490 NR Description: Betaine-aldehyde dehydrogenase, chloroplast
  misc_feature (1)..(218): Homolog of NCBI NO: 17936 NR Description: betaine aldehyd dehydrogenase [Beta vulgaris]
  misc_feature (1)..(218): Homolog of NCBI NO: 2811031 NR Description: Betaine-aldehyde dehydrogenase, chloroplast (BADH) >gi|2109299|gb|AAB58165.1| betaine aldehyde dehydrogenase
  misc_feature (1)..(218): Homolog of NCBI NO: 118492 NR Description: Betaine-aldehyde dehydrogenase, chloroplast
  misc_feature (1)..(218): Homolog of NCBI NO: 24429929 NR Description: betaine aldehyde dehydrogenase [Spinacia oleracea]
MFGCFWTNGQICSATSRLLVHERIADEFLDKLVKWTKNIKISDPFEEGCRLGPVVSKGQYERVLKFVSNARNEGATVLCGGVRPEHLKKGYFVEPAIVSNVTTSMEIWREEVFGPALCVKTFSTEDEAIQLANDSQYGLAGAVLSNDLERCDRVSKAFQAGIVWVNCSQPCFCQAPWGGTKRSGFGRELGEWGLENYLSVKQVTQYISDEPWGWYKPPSKL

SEQ ID NO: 74559 - protein, 171 aa, Arabidopsis thaliana
  peptide (1)..(171): Ceres Seq. ID no. 5678316
  misc_feature: Pfam Name: Aldedh Pfam Description: Aldehyde dehydrogenase family
  misc_feature (1)..(122): Homolog of NCBI NO: 15228346 NR Description: betaine aldehyde dehydrogenase-like protein; id: At3g48170.1, supported by cDNA: gi_13878140, supported by gi_17104544 [Arabidopsis thaliana] >gi|7431494|pir||T13006
  misc_feature (1)..(122): Homolog of NCBI NO: 11251896 NR Description: betaine-aldehyde dehydrogenase (EC 1.2.1.8) - Amaranthus hypochondriacus >gi|2388710|gb|AAB70010.1| betaine
  misc_feature (1)..(122): Homolog of NCBI NO: 18410730 NR Description: betaine aldehyde dehydrogenase, putative; protein At1g74920.1, supported by cDNA: 34926., supported by cDNA:
  misc_feature (1)..(122): Homolog of NCBI NO: 15131692 NR Description: putative aminoaldehyde dehydrogenase [Pisum
  misc_feature (1)..(122): Homolog of NCBI NO: 20135570 NR Description: betaine aldehyde dehydrogenase BADH2 [Atriplex
  misc_feature (1)..(122): Homolog of NCBI NO: 118490 NR Description: Betaine-aldehyde dehydrogenase, chloroplast
  misc_feature (1)..(122): Homolog of NCBI NO: 17936 NR Description: betaine aldehyd dehydrogenase [Beta vulgaris]
  misc_feature (1)..(122): Homolog of NCBI NO: 118492 NR Description: Betaine-aldehyde dehydrogenase, chloroplast
  misc_feature (1)..(122): Homolog of NCBI NO: 24429929 NR Description: betaine aldehyde dehydrogenase [Spinacia oleracea]
  misc_feature (1)..(122): Homolog of NCBI NO: 2811031 NR Description: Betaine-aldehyde dehydrogenase, chloroplast (BADH) >gi|2109299|gb|AAB58165.1| betaine aldehyde dehydrogenase
KGYILKEPIGVVGMITPWNYPLLMAVWKVAPSLAAGCTAILKPSELASLTCLELADICREVGLPPGVLNILTGLGTEAGAPLASHPHVDKIVFTGSTTTGSSIMTSAAKLVKQFPWSLGVKALSLSLMMSILIKLWNGLCLVVSGRMGRFVVPHLDFLCMKGLLTSFWTSW

SEQ ID NO: 74560 - protein, 158 aa, Arabidopsis thaliana
  peptide (1)..(158): Ceres Seq. ID no. 5678317
  misc_feature: Pfam Name: Aldedh Pfam Description: Aldehyde dehydrogenase family
  misc_feature (1)..(109): Homolog of NCBI NO: 15228346 NR Description: betaine aldehyde dehydrogenase-like protein; id: At3g48170.1, supported by cDNA: gi_13878140, supported by gi_17104544 [Arabidopsis thaliana] >gi|7431494|pir||T13006
  misc_feature (1)..(109): Homolog of NCBI NO: 11251896 NR Description: betaine-aldehyde dehydrogenase (EC 1.2.1.8) - Amaranthus hypochondriacus >gi|2388710|gb|AAB70010.1| betaine
  misc_feature (1)..(109): Homolog of NCBI NO: 18410730 NR Description: betaine aldehyde dehydrogenase, putative; protein At1g74920.1, supported by cDNA: 34926., supported by cDNA:
  misc_feature (1)..(109): Homolog of NCBI NO: 15131692 NR Description: putative aminoaldehyde dehydrogenase [Pisum
  misc_feature (1)..(109): Homolog of NCBI NO: 20135570 NR Description: betaine aldehyde dehydrogenase BADH2 [Atriplex
  misc_feature (1)..(109): Homolog of NCBI NO: 118490 NR Description: Betaine-aldehyde dehydrogenase, chloroplast
  misc_feature (1)..(109): Homolog of NCBI NO: 17936 NR Description: betaine aldehyd dehydrogenase [Beta vulgaris]
  misc_feature (1)..(109): Homolog of NCBI NO: 118492 NR Description: Betaine-aldehyde dehydrogenase, chloroplast
  misc_feature (1)..(109): Homolog of NCBI NO: 24429929 NR Description: betaine aldehyde dehydrogenase [Spinacia oleracea]
  misc_feature (1)..(109): Homolog of NCBI NO: 2811031 NR Description: Betaine-aldehyde dehydrogenase, chloroplast (BADH) >gi|2109299|gb|AAB58165.1| betaine aldehyde dehydrogenase
MITPWNYPLLMAVWKVAPSLAAGCTAILKPSELASLTCLELADICREVGLPPGVLNILTGLGTEAGAPLASHPHVDKIVFTGSTTTGSSIMTSAAKLVKQFPWSLGVKALSLSLMMSILIKLWNGLCLVVSGRMGRFVVPHLDFLCMKGLLTSFWTSW

SEQ ID NO: 74561 - DNA, 1354 bp, Arabidopsis thaliana
  misc_feature (1)..(1354): Ceres Seq. ID no. 5678329
  misc_feature: MA Experiment ID: 108595 Result: Down-regulated in Transcription
  misc_feature: MA Experiment 108595 PARAMETER Experiment Name: At_Ler-pi_Ovule_cDNA_P Parameter: Plant Line Value: null
  misc_feature: MA Experiment ID: 20000111 Result: Down-regulated in Transcription
  misc_feature: MA Experiment 20000111 PARAMETER Experiment Name: At_42deg_Heat_cDNA_P Parameter: Temperature (deg C) Value: 42 vs. 22
  misc_feature: MA Experiment 20000111 PARAMETER Experiment Name: At_42deg_Heat_cDNA_P Parameter: Timepoint (hr) Value: 6
  misc_feature: MA Experiment 20000111 PARAMETER Experiment Name: At_42deg_Heat_cDNA_P Parameter: Tissue Value: Aerial
  misc_feature: MA Experiment ID: 20000113 Result: Down-regulated in Transcription
  misc_feature: MA Experiment 20000113 PARAMETER Experiment Name: At_42deg_Heat_cDNA_P Parameter: Temperature (deg C) Value: 42 vs. 22
  misc_feature: MA Experiment 20000113 PARAMETER Experiment Name: At_42deg_Heat_cDNA_P Parameter: Timepoint (hr) Value: 8
  misc_feature: MA Experiment 20000113 PARAMETER Experiment Name: At_42deg_Heat_cDNA_P Parameter: Tissue Value: Aerial
  misc_feature: MA Experiment ID: 20000224 Result: Down-regulated in Transcription
  misc_feature: MA Experiment ID: 20000286 Result: Down-regulated in Transcription
  misc_feature: MA Experiment 20000286 PARAMETER Experiment Name: At_Open_Flower_P Parameter: Age (day) Value: 21
  misc_feature: MA Experiment 20000286 PARAMETER Experiment Name: At_Open_Flower_P Parameter: Plant Line Value: WS
  misc_feature: MA Experiment 20000286 PARAMETER Experiment Name: At_Open_Flower_P Parameter: Tissue Value: Half Open vs. Whole Plant
  misc_feature: MA Experiment ID: 20000439 Result: Down-regulated in Transcription
  misc_feature: MA Experiment 20000439 PARAMETER Experiment Name: At_Roots__P Parameter: Age (day) Value: 14 vs. 21
  misc_feature: MA Experiment 20000439 PARAMETER Experiment Name: At_Roots__P Parameter: Organism Value: A. thaliana
  misc_feature: MA Experiment 20000439 PARAMETER Experiment Name: At_Roots__P Parameter: Tissue Value: Roots vs. Whole Plant
  misc_feature: MA Experiment ID: 20000451 Result: Down-regulated in Transcription
  misc_feature: MA Experiment 20000451 PARAMETER Experiment Name: At_CS6879_Shoots-Roots_P Parameter: Age (day) Value: 14
  misc_feature: MA Experiment 20000451 PARAMETER Experiment Name: At_CS6879_Shoots-Roots_P Parameter: Organism Value: A. thaliana
  misc_feature: MA Experiment 20000451 PARAMETER Experiment Name: At_CS6879_Shoots-Roots_P Parameter: Plant Line Value: CS6879 vs. WS
  misc_feature: MA Experiment 20000451 PARAMETER Experiment Name: At_CS6879_Shoots-Roots_P Parameter: Tissue Value: Roots
actagtgatcagtgataatctattaatcatctaggtggcagaagcagcatcgttgagaacgaagaagcttgaaaaagttgcgagctcagagaatctggaagtagcaaaatttggcggctttaactcagcaatttgttctgtacatgaagagagcattcagctcacagttacgctctgcctatccagcttctaaatctactcactttggtcgagtcatggcttcttctggatctgaggcaaaagctaattacgcacccatatctaccaatgaacctgttgtgtctgttgattggctccactctaatcttggagatgctgatataaaggttttggatgcctcatggtacatggcacatgagcaaagaaatccaatccaagagtatcaagttgctcatattccaggtgctctcttctttgatttgaatggaatagcagatcgaaaaacaaatttacgacacatgctaccatctgaggaagcttttgctgctggttgttctgctcttggaatcgagaacaacgatggagtggttgtgtatgatggaatggggctctttagtgcagctcgtgtatggtggatgtttagagtctttggacatgacaaagtatgggtacttgatggaggcttgccgaaatggcgtgcttcaggctatgacgttgaatccagtgtttcaaatgatgccattttgaaagccagtgcagcaactgaggctatagagaagatctatcaaggacaaacaattagcccaataacttttcagacgaagttccggccacatcttgtattggcacttgatcaggtgaaggaaaacatcgaggataagacttatcagcacatcgatgcgcgttcaaaggctagatttgacggtattgctccagaaccttggaagggtttaccgagtggtcatatacccggtagcaagtgtgtcccttttcccctaatgtttgattcctctcaaacactgttaccagcagaggagctgaagaagcagtttgaacaggaagacatatctctggacagtccgattgcggcctcatgtggaaccggtgtaacagcttgtattttggcattgggactttatcgtctgggaaaaactaatgtggcaatctatgatgggtcttggactgaatgggcaactgcaccaaacttgcccatagtgggttcttcttcataagaaagtccaagaaaaagctacaagatcacaagccagtggatatatatttataagcttagcttggttcaatccatttctgtgttaaactttaacaaattgctgggagggttgtattagtattatacatcagtattcaggattcttgagtttggtctcatctttgtggagattgattaaaagtc

SEQ ID NO: 74562 - protein, 342 aa, Arabidopsis thaliana; identical to SEQ ID NO: 39980
  peptide (1)..(342): Ceres Seq. ID no. 5678330
  misc_feature (47)..(167): Pfam Name: Rhodanese-like domain Pfam Description: Rhodanese-like domain
  misc_feature (1)..(342): Homolog of NCBI NO: 25456716 NR Description: thiosulfate sulfurtransferase (EC 2.8.1.1)
  misc_feature (1)..(342): Homolog of NCBI NO: 30684873 NR Description: mercaptopyruvate sulfurtransferase (Mst2/Rdh2)
  misc_feature (25)..(342): Homolog of NCBI NO: 18394364 NR Description: mercaptopyruvate sulfurtransferase (Mst2/Rdh2); id: At1g16460.2, supported by cDNA: gi_6009982 [Arabidopsis >gi|25288790|pir||T52663 thiosulfate sulfurtransferase (EC
  misc_feature (25)..(342): Homolog of NCBI NO: 25288797 NR Description: hypothetical protein F3O9.26 [imported] - thaliana >gi|4966366|gb|AAD34697.1|AC006341_25 Similar to thiosulfate sulfurtransferase (TST) from Datisca glomerata and
  misc_feature (1)..(342): Homolog of NCBI NO: 18412307 NR Description: mercaptopyruvate sulfurtransferase (Mst1/Rdh1); id: At1g79230.1, supported by cDNA: 32130., supported by cDNA:
  misc_feature (1)..(342): Homolog of NCBI NO: 25288794 NR Description: thiosulfate sulfurtransferase (EC 2.8.1.1) Mst1
  misc_feature (1)..(337): Homolog of NCBI NO: 4406372 NR Description: thiosulfate sulfurtransferase [Datisca glomerata]
  misc_feature (39)..(341): Homolog of NCBI NO: 14571545 NR Description: thiosulfate transferase [Triticum aestivum]
  misc_feature (41)..(195): Homolog of NCBI NO: 27381801 NR Description: thiosulfate sulfurtransferase [Bradyrhizobium >gi|27354970|dbj|BAC51955.1| thiosulfate sulfurtransferase
  misc_feature (201)..(337): Homolog of NCBI NO: 27381801 NR Description: thiosulfate sulfurtransferase [Bradyrhizobium >gi|27354970|dbj|BAC51955.1| thiosulfate sulfurtransferase

SEQ ID NO: 74563 - protein, 318 aa, Arabidopsis thaliana; identical to SEQ ID NO: 24974
  peptide (1)..(318): Ceres Seq. ID no. 5678331
  misc_feature (23)..(143): Pfam Name: Rhodanese-like domain Pfam Description: Rhodanese-like domain
  misc_feature (1)..(318): Homolog of NCBI NO: 25456716 NR Description: thiosulfate sulfurtransferase (EC 2.8.1.1)
  misc_feature (1)..(318): Homolog of NCBI NO: 30684873 NR Description: mercaptopyruvate sulfurtransferase (Mst2/Rdh2)
  misc_feature (1)..(318): Homolog of NCBI NO: 18394364 NR Description: mercaptopyruvate sulfurtransferase (Mst2/Rdh2); id: At1g16460.2, supported by cDNA: gi_6009982 [Arabidopsis >gi|25288790|pir||T52663 thiosulfate sulfurtransferase (EC
  misc_feature (1)..(318): Homolog of NCBI NO: 25288797 NR Description: hypothetical protein F3O9.26 [imported] - thaliana >gi|4966366|gb|AAD34697.1|AC006341_25 Similar to thiosulfate sulfurtransferase (TST) from Datisca glomerata and
  misc_feature (1)..(318): Homolog of NCBI NO: 18412307 NR Description: mercaptopyruvate sulfurtransferase (Mst1/Rdh1); id: At1g79230.1, supported by cDNA: 32130., supported by cDNA:
  misc_feature (1)..(318): Homolog of NCBI NO: 25288794 NR Description: thiosulfate sulfurtransferase (EC 2.8.1.1) Mst1
  misc_feature (1)..(313): Homolog of NCBI NO: 4406372 NR Description: thiosulfate sulfurtransferase [Datisca glomerata]
  misc_feature (15)..(317): Homolog of NCBI NO: 14571545 NR Description: thiosulfate transferase [Triticum aestivum]
  misc_feature (17)..(171): Homolog of NCBI NO: 27381801 NR Description: thiosulfate sulfurtransferase [Bradyrhizobium >gi|27354970|dbj|BAC51955.1| thiosulfate sulfurtransferase
  misc_feature (177)..(313): Homolog of NCBI NO: 27381801 NR Description: thiosulfate sulfurtransferase [Bradyrhizobium >gi|27354970|dbj|BAC51955.1| thiosulfate sulfurtransferase

SEQ ID NO: 74564 - protein, 274 aa, Arabidopsis thaliana; identical to SEQ ID NO: 24975
  peptide (1)..(274): Ceres Seq. ID no. 5678332
  misc_feature (1)..(99): Pfam Name: Rhodanese-like domain Pfam Description: Rhodanese-like domain
  misc_feature (1)..(274): Homolog of NCBI NO: 25456716 NR Description: thiosulfate sulfurtransferase (EC 2.8.1.1)
  misc_feature (1)..(274): Homolog of NCBI NO: 30684873 NR Description: mercaptopyruvate sulfurtransferase (Mst2/Rdh2)
  misc_feature (1)..(274): Homolog of NCBI NO: 18394364 NR Description: mercaptopyruvate sulfurtransferase (Mst2/Rdh2); id: At1g16460.2, supported by cDNA: gi_6009982 [Arabidopsis >gi|25288790|pir||T52663 thiosulfate sulfurtransferase (EC
  misc_feature (1)..(274): Homolog of NCBI NO: 25288797 NR Description: hypothetical protein F3O9.26 [imported] - thaliana >gi|4966366|gb|AAD34697.1|AC006341_25 Similar to thiosulfate sulfurtransferase (TST) from Datisca glomerata and
  misc_feature (1)..(274): Homolog of NCBI NO: 18412307 NR Description: mercaptopyruvate sulfurtransferase (Mst1/Rdh1); id: At1g79230.1, supported by cDNA: 32130., supported by cDNA:
  misc_feature (1)..(274): Homolog of NCBI NO: 25288794 NR Description: thiosulfate sulfurtransferase (EC 2.8.1.1) Mst1
  misc_feature (1)..(269): Homolog of NCBI NO: 4406372 NR Description: thiosulfate sulfurtransferase [Datisca glomerata]
  misc_feature (1)..(273): Homolog of NCBI NO: 14571545 NR Description: thiosulfate transferase [Triticum aestivum]
  misc_feature (1)..(127): Homolog of NCBI NO: 27381801 NR Description: thiosulfate sulfurtransferase [Bradyrhizobium >gi|27354970|dbj|BAC51955.1| thiosulfate sulfurtransferase
  misc_feature (133)..(269): Homolog of NCBI NO: 27381801 NR Description: thiosulfate sulfurtransferase [Bradyrhizobium >gi|27354970|dbj|BAC51955.1| thiosulfate sulfurtransferase

SEQ ID NO: 74565 - DNA, 560 bp, Arabidopsis thaliana
  misc_feature (1)..(560): Ceres Seq. ID no. 5678357
  misc_feature: MA Experiment ID: 108434 Result: Up-regulated in Transcription
  misc_feature: MA Experiment 108434 PARAMETER Experiment Name: At_Root_Tips_cDNA_P Parameter: Tissue Value: Root Tips
  misc_feature: MA Experiment ID: 108435 Result: Up-regulated in Transcription
  misc_feature: MA Experiment 108435 PARAMETER Experiment Name: At_stm_Mutants_cDNA_P Parameter: Plant Line Value: wt Landsburg vs stm
  misc_feature: MA Experiment 108435 PARAMETER Experiment Name: At_stm_Mutants_cDNA_P Parameter: Tissue Value: Shoot Apical Meristem Region
  misc_feature: MA Experiment ID: 108462 Result: Down-regulated in Transcription
  misc_feature: MA Experiment 108462 PARAMETER Experiment Name: At_Germinating_Seeds_cDNA_P Parameter: Age (day) Value: 2 vs. 0
  misc_feature: MA Experiment 108462 PARAMETER Experiment Name: At_Germinating_Seeds_cDNA_P Parameter: Tissue Value: Germinating Seeds
  misc_feature: MA Experiment ID: 108463 Result: Down-regulated in Transcription
  misc_feature: MA Experiment 108463 PARAMETER Experiment Name: At_Germinating_Seeds_cDNA_P Parameter: Age (day) Value: 3 vs. 0
  misc_feature: MA Experiment 108463 PARAMETER Experiment Name: At_Germinating_Seeds_cDNA_P Parameter: Tissue Value: Germinating Seeds
  misc_feature: MA Experiment ID: 108464 Result: Down-regulated in Transcription
  misc_feature: MA Experiment 108464 PARAMETER Experiment Name: At_Germinating_Seeds_cDNA_P Parameter: Age (day) Value: 4 vs. 0
  misc_feature: MA Experiment 108464 PARAMETER Experiment Name: At_Germinating_Seeds_cDNA_P Parameter: Tissue Value: Germinating Seeds
  misc_feature: MA Experiment ID: 20000224 Result: Down-regulated in Transcription
atttgatccgtttatacttgttattggcatttcatcatcgtctgggataaaaaaatgtcgacagttggagagcttgcttgcagctacgctgttatgatcctcgaggacgagggtatcgctatcacggctgacaaaatcgcgaccttggtgaaagctgctggtgttagtattgagtcatactggccaatgctattcgccaagatggctgagaaacgtaacgtgactgatctcatcatgaacgttggtgctggtggtggaggtggtgctccggttgcagctgctgctccagctgctggcggtggtgcggcagctgctcctgctgctgaggagaagaagaaggatgagccagcagaagagagtgacggagatttgggtttcggtttgtttgactaaacgcagtcacttgtctttcttctttgtagttggatattggagactatattttgtcgtatgagttattattacttgtttgatctggctaaaggactattagttggtttatgatgcgtatgttgtataactcaagtttcctagcaaaccaatcggctcgggcttttgtt

SEQ ID NO: 74566 - protein, 112 aa, Arabidopsis thaliana; identical to SEQ ID NO: 29961
  peptide (1)..(112): Ceres Seq. ID no. 5678358
  misc_feature (22)..(111): Pfam Name: 60s Acidic ribosomal protein Pfam Description: 60s Acidic ribosomal protein
  misc_feature (1)..(112): Homolog of NCBI NO: 15223303 NR Description: acidic ribosomal protein, putative; protein id: supported by cDNA: 24367., supported by cDNA: gi_15293082, by cDNA: gi_20258886 [Arabidopsis thaliana]
  misc_feature (1)..(112): Homolog of NCBI NO: 21592477 NR Description: acidic ribosomal protein, putative [Arabidopsis
  misc_feature (1)..(112): Homolog of NCBI NO: 15238170 NR Description: 60S acidic ribosomal protein P1-like protein; id: At5g47700.1, supported by cDNA: 14401., supported by cDNA: supported by cDNA: gi_20465332 [Arabidopsis thaliana] 60S acidic
  misc_feature (1)..(112): Homolog of NCBI NO: 21553441 NR Description: 60S acidic ribosomal protein P1-like protein
  misc_feature (1)..(112): Homolog of NCBI NO: 18411448 NR Description: acidic ribosomal protein p1; protein id: supported by cDNA: 26442., supported by cDNA: gi_13605596, by cDNA: gi_15777870 [Arabidopsis thaliana]
  misc_feature (1)..(112): Homolog of NCBI NO: 6094103 NR Description: 60S acidic ribosomal protein P1
  misc_feature (5)..(112): Homolog of NCBI NO: 7440759 NR Description: acidic ribosomal protein P1a - maize
  misc_feature (5)..(112): Homolog of NCBI NO: 1710590 NR Description: 60S ACIDIC RIBOSOMAL PROTEIN P1 (L12)
  misc_feature (1)..(112): Homolog of NCBI NO: 25150244 NR Description: 60S Ribosomal Protein, Acidic 1; Ribosomal
  misc_feature (1)..(112): Homolog of NCBI NO: 18253043 NR Description: 60S acidic ribosomal protein P1 [Spodoptera

SEQ ID NO: 74567 - protein, 99 aa, Arabidopsis thaliana; identical to SEQ ID NO: 29962
  peptide (1)..(99): Ceres Seq. ID no. 5678359
  misc_feature (9)..(98): Pfam Name: 60s Acidic ribosomal protein Pfam Description: 60s Acidic ribosomal protein
  misc_feature (1)..(99): Homolog of NCBI NO: 15223303 NR Description: acidic ribosomal protein, putative; protein id: supported by cDNA: 24367., supported by cDNA: gi_15293082, by cDNA: gi_20258886 [Arabidopsis thaliana]
  misc_feature (1)..(99): Homolog of NCBI NO: 21592477 NR Description: acidic ribosomal protein, putative [Arabidopsis
  misc_feature (1)..(99): Homolog of NCBI NO: 15238170 NR Description: 60S acidic ribosomal protein P1-like protein; id: At5g47700.1, supported by cDNA: 14401., supported by cDNA: supported by cDNA: gi_20465332 [Arabidopsis thaliana] 60S acidic
  misc_feature (1)..(99): Homolog of NCBI NO: 21553441 NR Description: 60S acidic ribosomal protein P1-like protein
  misc_feature (1)..(99): Homolog of NCBI NO: 18411448 NR Description: acidic ribosomal protein p1; protein id: supported by cDNA: 26442., supported by cDNA: gi_13605596, by cDNA: gi_15777870 [Arabidopsis thaliana]
  misc_feature (1)..(99): Homolog of NCBI NO: 6094103 NR Description: 60S acidic ribosomal protein P1
  misc_feature (1)..(99): Homolog of NCBI NO: 7440759 NR Description: acidic ribosomal protein P1a - maize
  misc_feature (1)..(99): Homolog of NCBI NO: 1710590 NR Description: 60S ACIDIC RIBOSOMAL PROTEIN P1 (L12)
  misc_feature (1)..(99): Homolog of NCBI NO: 25150244 NR Description: 60S Ribosomal Protein, Acidic 1; Ribosomal
  misc_feature (1)..(99): Homolog of NCBI NO: 18253043 NR Description: 60S acidic ribosomal protein P1 [Spodoptera

SEQ ID NO: 74568 - protein, 68 aa, Arabidopsis thaliana; identical to SEQ ID NO: 29963
  peptide (1)..(68): Ceres Seq. ID no. 5678360
  misc_feature (1)..(67): Pfam Name: 60s Acidic ribosomal protein Pfam Description: 60s Acidic ribosomal protein
  misc_feature (1)..(68): Homolog of NCBI NO: 15223303 NR Description: acidic ribosomal protein, putative; protein id: supported by cDNA: 24367., supported by cDNA: gi_15293082, by cDNA: gi_20258886 [Arabidopsis thaliana]
  misc_feature (1)..(68): Homolog of NCBI NO: 21592477 NR Description: acidic ribosomal protein, putative [Arabidopsis
  misc_feature (1)..(68): Homolog of NCBI NO: 15238170 NR Description: 60S acidic ribosomal protein P1-like protein; id: At5g47700.1, supported by cDNA: 14401., supported by cDNA: supported by cDNA: gi_20465332 [Arabidopsis thaliana] 60S acidic
  misc_feature (1)..(68): Homolog of NCBI NO: 21553441 NR Description: 60S acidic ribosomal protein P1-like protein
  misc_feature (1)..(68): Homolog of NCBI NO: 18411448 NR Description: acidic ribosomal protein p1; protein id: supported by cDNA: 26442., supported by cDNA: gi_13605596, by cDNA: gi_15777870 [Arabidopsis thaliana]
  misc_feature (1)..(68): Homolog of NCBI NO: 6094103 NR Description: 60S acidic ribosomal protein P1
  misc_feature (1)..(68): Homolog of NCBI NO: 7440759 NR Description: acidic ribosomal protein P1a - maize
  misc_feature (1)..(68): Homolog of NCBI NO: 1710590 NR Description: 60S ACIDIC RIBOSOMAL PROTEIN P1 (L12)
  misc_feature (1)..(68): Homolog of NCBI NO: 25150244 NR Description: 60S Ribosomal Protein, Acidic 1; Ribosomal
  misc_feature (1)..(68): Homolog of NCBI NO: 18253043 NR Description: 60S acidic ribosomal protein P1 [Spodoptera

SEQ ID NO: 74569 - DNA, 1389 bp, Arabidopsis thaliana
  misc_feature (1)..(1389): Ceres Seq. ID no. 5678361
  misc_feature: MA Experiment ID: 108569 Result: Up-regulated in Transcription
  misc_feature: MA Experiment 108569 PARAMETER Experiment Name: At_0.001%_MeJA__cDNA_P Parameter: Timepoint (hr) Value: 6
  misc_feature: MA Experiment 108569 PARAMETER Experiment Name: At_0.001%_MeJA__cDNA_P Parameter: Tissue Value: Aerial
  misc_feature: MA Experiment 108569 PARAMETER Experiment Name: At_0.001%_MeJA__cDNA_P Parameter: Treatment Value: 0.001% MeJA vs. No Treatment
  misc_feature: MA Experiment ID: 108577 Result: Up-regulated in Transcription
  misc_feature: MA Experiment 108577 PARAMETER Experiment Name: At_42deg_Heat_cDNA_P Parameter: Temperature (deg C) Value: 42 vs. 22
  misc_feature: MA Experiment 108577 PARAMETER Experiment Name: At_42deg_Heat_cDNA_P Parameter: Timepoint (hr) Value: 6
  misc_feature: MA Experiment 108577 PARAMETER Experiment Name: At_42deg_Heat_cDNA_P Parameter: Tissue Value: Aerial
  misc_feature: MA Experiment ID: 108579 Result: Down-regulated in Transcription
  misc_feature: MA Experiment 108579 PARAMETER Experiment Name: At_4deg_Cold_cDNA_P Parameter: Temperature (deg C) Value: 4 vs. 22
  misc_feature: MA Experiment 108579 PARAMETER Experiment Name: At_4deg_Cold_cDNA_P Parameter: Timepoint (hr) Value: 6
  misc_feature: MA Experiment 108579 PARAMETER Experiment Name: At_4deg_Cold_cDNA_P Parameter: Tissue Value: Aerial
  misc_feature: MA Experiment ID: 108595 Result: Down-regulated in Transcription
  misc_feature: MA Experiment 108595 PARAMETER Experiment Name: At_Ler-pi_Ovule_cDNA_P Parameter: Plant Line Value: null
  misc_feature: MA Experiment ID: 20000093 Result: Up-regulated in Transcription
  misc_feature: MA Experiment 20000093 PARAMETER Experiment Name: At_42deg_Heat_cDNA_P Parameter: Temperature (deg C) Value: 42 vs. 22
  misc_feature: MA Experiment 20000093 PARAMETER Experiment Name: At_42deg_Heat_cDNA_P Parameter: Timepoint (hr) Value: 0.5
  misc_feature: MA Experiment 20000093 PARAMETER Experiment Name: At_42deg_Heat_cDNA_P Parameter: Tissue Value: Aerial
  misc_feature: MA Experiment ID: 20000111 Result: Up-regulated in Transcription
  misc_feature: MA Experiment 20000111 PARAMETER Experiment Name: At_42deg_Heat_cDNA_P Parameter: Temperature (deg C) Value: 42 vs. 22
  misc_feature: MA Experiment 20000111 PARAMETER Experiment Name: At_42deg_Heat_cDNA_P Parameter: Timepoint (hr) Value: 6
  misc_feature: MA Experiment 20000111 PARAMETER Experiment Name: At_42deg_Heat_cDNA_P Parameter: Tissue Value: Aerial
  misc_feature: MA Experiment ID: 20000144 Result: Up-regulated in Transcription
  misc_feature: MA Experiment 20000144 PARAMETER Experiment Name: At_42deg_Heat_cDNA_P Parameter: Temperature (deg C) Value: 42 vs. 22
  misc_feature: MA Experiment 20000144 PARAMETER Experiment Name: At_42deg_Heat_cDNA_P Parameter: Timepoint (hr) Value: 1
  misc_feature: MA Experiment 20000144 PARAMETER Experiment Name: At_42deg_Heat_cDNA_P Parameter: Tissue Value: Aerial
  misc_feature: MA Experiment ID: 20000171 Result: Up-regulated in Transcription
  misc_feature: MA Experiment 20000171 PARAMETER Experiment Name: At_42deg_Heat_P Parameter: Age (day) Value: 14
  misc_feature: MA Experiment 20000171 PARAMETER Experiment Name: At_42deg_Heat_P Parameter: Organism Value: A. thaliana
  misc_feature: MA Experiment 20000171 PARAMETER Experiment Name: At_42deg_Heat_P Parameter: Plant Line Value: WS
  misc_feature: MA Experiment 20000171 PARAMETER Experiment Name: At_42deg_Heat_P Parameter: Temperature (deg C) Value: 42 vs. 22
  misc_feature: MA Experiment 20000171 PARAMETER Experiment Name: At_42deg_Heat_P Parameter: Timepoint (hr) Value: 1
  misc_feature: MA Experiment 20000171 PARAMETER Experiment Name: At_42deg_Heat_P Parameter: Tissue Value: Aerial
  misc_feature: MA Experiment ID: 20000173 Result: Up-regulated in Transcription
  misc_feature: MA Experiment 20000173 PARAMETER Experiment Name: At_42deg_Heat_P Parameter: Age (day) Value: 14
  misc_feature: MA Experiment 20000173 PARAMETER Experiment Name: At_42deg_Heat_P Parameter: Organism Value: A. thaliana
  misc_feature: MA Experiment 20000173 PARAMETER Experiment Name: At_42deg_Heat_P Parameter: Plant Line Value: WS
  misc_feature: MA Experiment 20000173 PARAMETER Experiment Name: At_42deg_Heat_P Parameter: Temperature (deg C) Value: 42 vs. 22
  misc_feature: MA Experiment 20000173 PARAMETER Experiment Name: At_42deg_Heat_P Parameter: Timepoint (hr) Value: 6
  misc_feature: MA Experiment 20000173 PARAMETER Experiment Name: At_42deg_Heat_P Parameter: Tissue Value: Aerial
  misc_feature: MA Experiment ID: 20000224 Result: Down-regulated in Transcription
  misc_feature: MA Experiment ID: 20000227 Result: Down-regulated in Transcription
  misc_feature: MA Experiment 20000227 PARAMETER Experiment Name: At_Root-Tips-vs-Tops_P Parameter: Tissue Value: Root Tips vs. Root Tops
  misc_feature: MA Experiment ID: 20000234 Result: Down-regulated in Transcription
  misc_feature: MA Experiment 20000234 PARAMETER Experiment Name: At_Siliques_P Parameter: Age (day) Value: 21
  misc_feature: MA Experiment 20000234 PARAMETER Experiment Name: At_Siliques_P Parameter: Organism Value: A. thaliana
  misc_feature: MA Experiment 20000234 PARAMETER Experiment Name: At_Siliques_P Parameter: Plant Line Value: WS
  misc_feature: MA Experiment 20000234 PARAMETER Experiment Name: At_Siliques_P Parameter: Tissue Value: Less Than 5mm Siliques vs. Whole Plant
  misc_feature: MA Experiment ID: 20000264 Result: Down-regulated in Transcription
  misc_feature: MA Experiment 20000264 PARAMETER Experiment Name: At_Open_Flower_P Parameter: Age (day) Value: 21
  misc_feature: MA Experiment 20000264 PARAMETER Experiment Name: At_Open_Flower_P Parameter: Plant Line Value: WS
  misc_feature: MA Experiment 20000264 PARAMETER Experiment Name: At_Open_Flower_P Parameter: Tissue Value: Open Flower vs. Whole Plant
  misc_feature: MA Experiment ID: 20000265 Result: Down-regulated in Transcription
  misc_feature: MA Experiment 20000265 PARAMETER Experiment Name: At_Open_Flower_P Parameter: Age (day) Value: 21
  misc_feature: MA Experiment 20000265 PARAMETER Experiment Name: At_Open_Flower_P Parameter: Plant Line Value: WS
  misc_feature: MA Experiment 20000265 PARAMETER Experiment Name: At_Open_Flower_P Parameter: Tissue Value: Closed Flower vs. Whole Plant
aacgtagaagaagctgatttaaatcccaaattcatttcaacgtagaagcttctacagattcgatttgggtgtttttggttttggatttggtaaagcttctcggtcacttgctcggtgattgaaactgaatcgattgtgattgtgattgtgattgtgattgtgattgtgagggaattatggctcaagccgtagaagagtggtacaagcagatgccgattataacccggtcgtatctcacggcggctgtagtcaccaccgtcgggtgttcgctcgaggtttgaagttctctgactcatgaaagcctttagctttgctctgattgatctgattagtttttccttgaaaaattgaatctttgtgtttctgttatgtatgtggatggttttgtttttttgatgtaaaaggtaactctttattggaattggggtggctaacgaatggttaagtttagagctaagtgttgtggtgttatggcttatgatgtaacattttgtggaacatttttttgttttgcagattatatctccttataatctctacctaaatcctacccttgtggtgaagcaataccagttctggcgtcttgtcacaaatttcctttatttccgaaagatggatttggactttttgttccatatgttttttctagctcgatactgcaaactgctcgaagaaaactccttcaggggaaagaccacggatttcctttacatgctcttattcggggcaactgttctaactggtattgttctcattggcggaatgataccttatttgtctgtttcattctccaaaatcatcttcctcagcaattcattgactttcatgatggtctatgtatggagtaaacaaaatccttacatccacatgagtttccttggcctcttcactttcacagcagcttatttaccatgggtacttcttggattctctatccttgttggtgcaagtgcatggggggattttctgggaatgatagcgggccacgcatactacttcttggcatttgtgtatccccgaatgacggatcgacgtcccttgaaaactccatctttcctcaaggccctatttgctgatgagccagtcgtgattgcaaggccagaagatgtgagatttgctcatgcgccttttgatgaaatccaccaagactgaatcttgatcctccacaaaacaccagccacaacgcacagttcaagtgtactcagataatgttattgactcttgacctttatagttgtggataatgtggaagtgagatagtgttggctctgatttttttccctagttttctgtctgcttttcttgtccgatacaaatgtgtttcctccttgtgcatatgaactcaaattgtgtacaaagtcttcaaaagtgctagtttatagtttcgtc

SEQ ID NO: 74570 - protein, 179 aa, Arabidopsis thaliana
  peptide (1)..(179): Ceres Seq. ID no. 5678362
  misc_feature (1)..(147): Pfam Name: Der1-like family Pfam Description: Der1-like family
  misc_feature (1)..(179): Homolog of NCBI NO: 22328865 NR Description: putative protein; protein id: At4g21810.1,
  misc_feature (1)..(179): Homolog of NCBI NO: 17473759 NR Description: putative protein [Arabidopsis thaliana]
  misc_feature (1)..(179): Homolog of NCBI NO: 15234480 NR Description: unknown protein; protein id: At4g04860.1, by cDNA: gi_14488072, supported by cDNA: gi_20147126 [Arabidopsis >gi|25407297|pir||B85061 hypothetical protein AT4g04860
  misc_feature (1)..(179): Homolog of NCBI NO: 7487831 NR Description: hypothetical protein T8O5.20 - Arabidopsis >gi|2894559|emb|CAA17148.1| putative protein [Arabidopsis
  misc_feature (1)..(179): Homolog of NCBI NO: 25407582 NR Description: hypothetical protein AT4g21810 [imported] - thaliana >gi|7268978|emb|CAB81288.1| putative protein
  misc_feature (1)..(179): Homolog of NCBI NO: 27573354 NR Description: putative Der1-like protein [Oryza sativa
  misc_feature (74)..(179): Homolog of NCBI NO: 4455289 NR Description: putative protein [Arabidopsis thaliana]
  misc_feature (1)..(165): Homolog of NCBI NO: 31219425 NR Description: ENSANGP00000001887 [Anopheles gambiae]
  misc_feature (1)..(174): Homolog of NCBI NO: 40352706 NR Description: Unknown (protein for MGC:63991) [Danio rerio]
  misc_feature (1)..(153): Homolog of NCBI NO: 21355437 NR Description: CG14899-PA [Drosophila melanogaster]
MDLDFLFHMFFLARYCKLLEENSFRGKTTDFLYMLLFGATVLTGIVLIGGMIPYLSVSFSKIIFLSNSLTFMMVYVWSKQNPYIHMSFLGLFTFTAAYLPWVLLGFSILVGASAWGDFLGMIAGHAYYFLAFVYPRMTDRRPLKTPSFLKALFADEPVVIARPEDVRFAHAPFDEIHQD

SEQ ID NO: 74571 - protein, 171 aa, Arabidopsis thaliana
  peptide (1)..(171): Ceres Seq. ID no. 5678363
  misc_feature (1)..(139): Pfam Name: Der1-like family Pfam Description: Der1-like family
  misc_feature (1)..(171): Homolog of NCBI NO: 22328865 NR Description: putative protein; protein id: At4g21810.1,
  misc_feature (1)..(171): Homolog of NCBI NO: 17473759 NR Description: putative protein [Arabidopsis thaliana]
  misc_feature (1)..(171): Homolog of NCBI NO: 15234480 NR Description: unknown protein; protein id: At4g04860.1, by cDNA: gi_14488072, supported by cDNA: gi_20147126 [Arabidopsis >gi|25407297|pir||B85061 hypothetical protein AT4g04860
  misc_feature (1)..(171): Homolog of NCBI NO: 7487831 NR Description: hypothetical protein T8O5.20 - Arabidopsis >gi|2894559|emb|CAA17148.1| putative protein [Arabidopsis
  misc_feature (1)..(171): Homolog of NCBI NO: 25407582 NR Description: hypothetical protein AT4g21810 [imported] - thaliana >gi|7268978|emb|CAB81288.1| putative protein
  misc_feature (1)..(171): Homolog of NCBI NO: 27573354 NR Description: putative Der1-like protein [Oryza sativa
  misc_feature (66)..(171): Homolog of NCBI NO: 4455289 NR Description: putative protein [Arabidopsis thaliana]
  misc_feature (1)..(157): Homolog of NCBI NO: 31219425 NR Description: ENSANGP00000001887 [Anopheles gambiae]
  misc_feature (1)..(166): Homolog of NCBI NO: 40352706 NR Description: Unknown (protein for MGC:63991) [Danio rerio]
  misc_feature (1)..(145): Homolog of NCBI NO: 21355437 NR Description: CG14899-PA [Drosophila melanogaster]
MFFLARYCKLLEENSFRGKTTDFLYMLLFGATVLTGIVLIGGMIPYLSVSFSKIIFLSNSLTFMMVYVWSKQNPYIHMSFLGLFTFTAAYLPWVLLGFSILVGASAWGDFLGMIAGHAYYFLAFVYPRMTDRRPLKTPSFLKALFADEPVVIARPEDVRFAHAPFDEIHQD

SEQ ID NO: 74572 - protein, 146 aa, Arabidopsis thaliana; identical to SEQ ID NO: 38825
  peptide (1)..(146): Ceres Seq. ID no. 5678364
  misc_feature (1)..(114): Pfam Name: Der1-like family Pfam Description: Der1-like family
  misc_feature (1)..(146): Homolog of NCBI NO: 22328865 NR Description: putative protein; protein id: At4g21810.1,
  misc_feature (1)..(146): Homolog of NCBI NO: 17473759 NR Description: putative protein [Arabidopsis thaliana]
  misc_feature (1)..(146): Homolog of NCBI NO: 15234480 NR Description: unknown protein; protein id: At4g04860.1, by cDNA: gi_14488072, supported by cDNA: gi_20147126 [Arabidopsis >gi|25407297|pir||B85061 hypothetical protein AT4g04860
  misc_feature (1)..(146): Homolog of NCBI NO: 7487831 NR Description: hypothetical protein T8O5.20 - Arabidopsis >gi|2894559|emb|CAA17148.1| putative protein [Arabidopsis
  misc_feature (1)..(146): Homolog of NCBI NO: 25407582 NR Description: hypothetical protein AT4g21810 [imported] - thaliana >gi|7268978|emb|CAB81288.1| putative protein
  misc_feature (1)..(146): Homolog of NCBI NO: 27573354 NR Description: putative Der1-like protein [Oryza sativa
  misc_feature (41)..(146): Homolog of NCBI NO: 4455289 NR Description: putative protein [Arabidopsis thaliana]
  misc_feature (1)..(132): Homolog of NCBI NO: 31219425 NR Description: ENSANGP00000001887 [Anopheles gambiae]
  misc_feature (1)..(141): Homolog of NCBI NO: 40352706 NR Description: Unknown (protein for MGC:63991) [Danio rerio]
  misc_feature (1)..(120): Homolog of NCBI NO: 21355437 NR Description: CG14899-PA [Drosophila melanogaster]

SEQ ID NO: 74573 - DNA, 1458 bp, Arabidopsis thaliana
  misc_feature (1)..(1458): Ceres Seq. ID no. 5678372
  misc_feature: MA Experiment ID: 108434 Result: Down-regulated in Transcription
  misc_feature: MA Experiment 108434 PARAMETER Experiment Name: At_Root_Tips_cDNA_P Parameter: Tissue Value: Root Tips
  misc_feature: MA Experiment ID: 108577 Result: Down-regulated in Transcription
  misc_feature: MA Experiment 108577 PARAMETER Experiment Name: At_42deg_Heat_cDNA_P Parameter: Temperature (deg C) Value: 42 vs. 22
  misc_feature: MA Experiment 108577 PARAMETER Experiment Name: At_42deg_Heat_cDNA_P Parameter: Timepoint (hr) Value: 6
  misc_feature: MA Experiment 108577 PARAMETER Experiment Name: At_42deg_Heat_cDNA_P Parameter: Tissue Value: Aerial
  misc_feature: MA Experiment ID: 20000069 Result: Up-regulated in Transcription
  misc_feature: MA Experiment 20000069 PARAMETER Experiment Name: At_100uM_ABA_Mutants_cDNA_P Parameter: Plant Line Value: CS23
  misc_feature: MA Experiment 20000069 PARAMETER Experiment Name: At_100uM_ABA_Mutants_cDNA_P Parameter: Timepoint (hr) Value: 6
  misc_feature: MA Experiment 20000069 PARAMETER Experiment Name: At_100uM_ABA_Mutants_cDNA_P Parameter: Tissue Value: Aerial
  misc_feature: MA Experiment 20000069 PARAMETER Experiment Name: At_100uM_ABA_Mutants_cDNA_P Parameter: Treatment Value: 100uM ABA vs. No Treatment
  misc_feature: MA Experiment ID: 20000070 Result: Up-regulated in Transcription
  misc_feature: MA Experiment 20000070 PARAMETER Experiment Name: At_100uM_ABA_Mutants_cDNA_P Parameter: Plant Line Value: CS24
  misc_feature: MA Experiment 20000070 PARAMETER Experiment Name: At_100uM_ABA_Mutants_cDNA_P Parameter: Timepoint (hr) Value: 6
  misc_feature: MA Experiment 20000070 PARAMETER Experiment Name: At_100uM_ABA_Mutants_cDNA_P Parameter: Tissue Value: Aerial
  misc_feature: MA Experiment 20000070 PARAMETER Experiment Name: At_100uM_ABA_Mutants_cDNA_P Parameter: Treatment Value: 100uM ABA vs. No Treatment
  misc_feature: MA Experiment ID: 20000071 Result: Up-regulated in Transcription
  misc_feature: MA Experiment 20000071 PARAMETER Experiment Name: At_100uM_ABA_Mutants_cDNA_P Parameter: Plant Line Value: CS8104
  misc_feature: MA Experiment 20000071 PARAMETER Experiment Name: At_100uM_ABA_Mutants_cDNA_P Parameter: Timepoint (hr) Value: 6
  misc_feature: MA Experiment 20000071 PARAMETER Experiment Name: At_100uM_ABA_Mutants_cDNA_P Parameter: Tissue Value: Aerial
  misc_feature: MA Experiment 20000071 PARAMETER Experiment Name: At_100uM_ABA_Mutants_cDNA_P Parameter: Treatment Value: 100uM ABA vs. No Treatment
  misc_feature: MA Experiment ID: 20000072 Result: Up-regulated in Transcription
  misc_feature: MA Experiment 20000072 PARAMETER Experiment Name: At_100uM_ABA_Mutants_cDNA_P Parameter: Plant Line Value: CS8105
  misc_feature: MA Experiment 20000072 PARAMETER Experiment Name: At_100uM_ABA_Mutants_cDNA_P Parameter: Timepoint (hr) Value: 6
  misc_feature: MA Experiment 20000072 PARAMETER Experiment Name: At_100uM_ABA_Mutants_cDNA_P Parameter: Tissue Value: Aerial
  misc_feature: MA Experiment 20000072 PARAMETER Experiment Name: At_100uM_ABA_Mutants_cDNA_P Parameter: Treatment Value: 100uM ABA vs. No Treatment
  misc_feature: MA Experiment ID: 20000086 Result: Up-regulated in Transcription
  misc_feature: MA Experiment 20000086 PARAMETER Experiment Name: At_100uM_ABA_Mutants_cDNA_P Parameter: Plant Line Value: CS22
  misc_feature: MA Experiment 20000086 PARAMETER Experiment Name: At_100uM_ABA_Mutants_cDNA_P Parameter: Timepoint (hr) Value: 6
  misc_feature: MA Experiment 20000086 PARAMETER Experiment Name: At_100uM_ABA_Mutants_cDNA_P Parameter: Tissue Value: Aerial
  misc_feature: MA Experiment 20000086 PARAMETER Experiment Name: At_100uM_ABA_Mutants_cDNA_P Parameter: Treatment Value: 100uM ABA vs. No Treatment
  misc_feature: MA Experiment ID: 20000087 Result: Up-regulated in Transcription
  misc_feature: MA Experiment 20000087 PARAMETER Experiment Name: At_100uM_ABA_Mutants_cDNA_P Parameter: Plant Line Value: WS
  misc_feature: MA Experiment 20000087 PARAMETER Experiment Name: At_100uM_ABA_Mutants_cDNA_P Parameter: Timepoint (hr) Value: 6
  misc_feature: MA Experiment 20000087 PARAMETER Experiment Name: At_100uM_ABA_Mutants_cDNA_P Parameter: Tissue Value: Aerial
  misc_feature: MA Experiment 20000087 PARAMETER Experiment Name: At_100uM_ABA_Mutants_cDNA_P Parameter: Treatment Value: 100uM ABA vs. No Treatment
  misc_feature: MA Experiment ID: 20000088 Result: Up-regulated in Transcription
  misc_feature: MA Experiment 20000088 PARAMETER Experiment Name: At_100uM_ABA_Mutants_cDNA_P Parameter: Plant Line Value: Landsberg
  misc_feature: MA Experiment 20000088 PARAMETER Experiment Name: At_100uM_ABA_Mutants_cDNA_P Parameter: Timepoint (hr) Value: 6
  misc_feature: MA Experiment 20000088 PARAMETER Experiment Name: At_100uM_ABA_Mutants_cDNA_P Parameter: Tissue Value: Aerial
  misc_feature: MA Experiment 20000088 PARAMETER Experiment Name: At_100uM_ABA_Mutants_cDNA_P Parameter: Treatment Value: 100uM ABA vs. No Treatment
  misc_feature: MA Experiment ID: 20000090 Result: Up-regulated in Transcription
  misc_feature: MA Experiment ID: 20000111 Result: Down-regulated in Transcription
  misc_feature: MA Experiment 20000111 PARAMETER Experiment Name: At_42deg_Heat_cDNA_P Parameter: Temperature (deg C) Value: 42 vs. 22
  misc_feature: MA Experiment 20000111 PARAMETER Experiment Name: At_42deg_Heat_cDNA_P Parameter: Timepoint (hr) Value: 6
  misc_feature: MA Experiment 20000111 PARAMETER Experiment Name: At_42deg_Heat_cDNA_P Parameter: Tissue Value: Aerial
  misc_feature: MA Experiment ID: 20000113 Result: Down-regulated in Transcription
  misc_feature: MA Experiment 20000113 PARAMETER Experiment Name: At_42deg_Heat_cDNA_P Parameter: Temperature (deg C) Value: 42 vs. 22
  misc_feature: MA Experiment 20000113 PARAMETER Experiment Name: At_42deg_Heat_cDNA_P Parameter: Timepoint (hr) Value: 8
  misc_feature: MA Experiment 20000113 PARAMETER Experiment Name: At_42deg_Heat_cDNA_P Parameter: Tissue Value: Aerial
  misc_feature: MA Experiment ID: 20000117 Result: Up-regulated in Transcription
  misc_feature: MA Experiment 20000117 PARAMETER Experiment Name: At_100uM_ABA_Mutants_cDNA_P Parameter: Plant Line Value: Columbia
  misc_feature: MA Experiment 20000117 PARAMETER Experiment Name: At_100uM_ABA_Mutants_cDNA_P Parameter: Timepoint (hr) Value: 6
  misc_feature: MA Experiment 20000117 PARAMETER Experiment Name: At_100uM_ABA_Mutants_cDNA_P Parameter: Tissue Value: Aerial
  misc_feature: MA Experiment 20000117 PARAMETER Experiment Name: At_100uM_ABA_Mutants_cDNA_P Parameter: Treatment Value: 100uM ABA vs. No Treatment
ctctttcttctttgaacctctccaccacgatgaagcacaaagtctccaaacgagtaatatctctgaaatgggttccatttctctgcatctctttcttcgctctcggagcaatcttcacctccaggtcatgggagccgtcgtcagattccggaagtcagctaatttcacagcatcatcgtgatcatgaacttcagattgtatctgacgattgtgctcataataaaaaagctacacaagaaaaagatgtaactggcgaagttttgagaactcatgaagctatacagtcgttggataagtcagtttctacactttcttctacaaggagctctcaagagatggttgatggctcggaaacaaacccgaggaagaaagtgtttatggtaatgggaatcaataccgcatttagcagtagaaaacggcgtgattcagttagagaaacatggatgcctcaaggtgagaagcttgaaagactggaacaggagaaggggattgtgatcaagttcatgattggacacagtgcgacgtcaaatagtatattggatagagctattgattcagaagatgctcaacacaaagacttccttaggctggagcatgttgaaggatatcacgaactctcagcaaaaaccaagatattcttttccactgcagtagccaaatgggatgcagagttctatatcaaggtagatgatgatgttcacgtcaatctcggtatgcttgcttccacacttgcccgtcaccgctcaaagccgagggtttatattggttgtatgaagtcagggcctgttcttgctcagaagacagtaaagtaccatgaacctgagtattggaaatttggagaggatggtaacaaatactttcgacatgctacaggacagatctatgccatctccaaggatcttgctaattacatatccatcaaccagccaattttgcataagtatgccaatgaagatgtgtctttagggtcatggtttatcggtcttgaggttgaacatattgatgaccgcaacttctgttgtgggactcctccagattgtagatggaaggcagaggcgggcgatgtttgtgtggcctcattcgaatggagctgtagtgggatttgcaagtccgtagagagaatgaagatagtgcatgaagtttgtagtgaaggagaaggagctgtttggaatacgcttctgtaaaagatcatttcagttcccaatcagccaagtggttccaatactaaacataactttgatagactgctacaagaaagggaaagagagagcaagagaggagaaggcaaattttgtaaagaagaaccaaaggtatacaaatcatatacttgagaatatatttgcttagttgttgttgtgtgattggctttgttgtttcttctacttgagttagatcatgttagtataatcttggacaaaagggcaaatgagctaaaaaatgcataactaaagaattttc

SEQ ID NO: 74574 - protein, 384 aa, Arabidopsis thaliana
  peptide (1)..(384): Ceres Seq. ID no. 5678373
  misc_feature (129)..(327): Pfam Name: Galactosyltransferase Pfam Description: Galactosyltransferase
  misc_feature (1)..(384): Homolog of NCBI NO: 30699558 NR Description: Avr9 elicitor response protein -related
  misc_feature (1)..(384): Homolog of NCBI NO: 12323294 NR Description: putative (Avr9) elicitor response protein;
  misc_feature (1)..(384): Homolog of NCBI NO: 34365705 NR Description: At1g77810 [Arabidopsis thaliana]
  misc_feature (1)..(383): Homolog of NCBI NO: 4138265 NR Description: Avr9 elicitor response protein [Nicotiana tabacum]
  misc_feature (1)..(384): Homolog of NCBI NO: 18395060 NR Description: Expressed protein; protein id: At1g22015.1, by cDNA: 115483. [Arabidopsis thaliana] >gi|25370622|pir||B86353
  misc_feature (228)..(384): Homolog of NCBI NO: 25370617 NR Description: protein F28K19.2 [imported] - Arabidopsis >gi|6573782|gb|AAF17702.1|AC009243_29 F28K19.2 [Arabidopsis
  misc_feature (158)..(228): Homolog of NCBI NO: 25370617 NR Description: protein F28K19.2 [imported] - Arabidopsis >gi|6573782|gb|AAF17702.1|AC009243_29 F28K19.2 [Arabidopsis
  misc_feature (103)..(142): Homolog of NCBI NO: 25370617 NR Description: protein F28K19.2 [imported] - Arabidopsis >gi|6573782|gb|AAF17702.1|AC009243_29 F28K19.2 [Arabidopsis
  misc_feature (1)..(381): Homolog of NCBI NO: 15220440 NR Description: putative AVR9 elicitor response protein; protein At1g05170.1, supported by cDNA: gi_14488077 [Arabidopsis
  misc_feature (8)..(381): Homolog of NCBI NO: 15217544 NR Description: elicitor response protein, putative; protein id: [Arabidopsis thaliana] >gi|25370623|pir||A86458 probasble
MKHKVSKRVISLKWVPFLCISFFALGAIFTSRSWEPSSDSGSQLISQHHRDHELQIVSDDCAHNKKATQEKDVTGEVLRTHEAIQSLDKSVSTLSSTRSSQEMVDGSETNPRKKVFMVMGINTAFSSRKRRDSVRETWMPQGEKLERLEQEKGIVIKFMIGHSATSNSILDRAIDSEDAQHKDFLRLEHVEGYHELSAKTKIFFSTAVAKWDAEFYIKVDDDVHVNLGMLASTLARHRSKPRVYIGCMKSGPVLAQKTVKYHEPEYWKFGEDGNKYFRHATGQIYAISKDLANYISINQPILHKYANEDVSLGSWFIGLEVEHIDDRNFCCGTPPDCRWKAEAGDVCVASFEWSCSGICKSVERMKIVHEVCSEGEGAVWNTLL

SEQ ID NO: 74575 - protein, 282 aa, Arabidopsis thaliana
  peptide (1)..(282): Ceres Seq. ID no. 5678374
  misc_feature (27)..(225): Pfam Name: Galactosyltransferase Pfam Description: Galactosyltransferase
  misc_feature (1)..(282): Homolog of NCBI NO: 30699558 NR Description: Avr9 elicitor response protein -related
  misc_feature (1)..(282): Homolog of NCBI NO: 12323294 NR Description: putative (Avr9) elicitor response protein;
  misc_feature (1)..(282): Homolog of NCBI NO: 34365705 NR Description: At1g77810 [Arabidopsis thaliana]
  misc_feature (1)..(281): Homolog of NCBI NO: 4138265 NR Description: Avr9 elicitor response protein [Nicotiana tabacum]
  misc_feature (1)..(282): Homolog of NCBI NO: 18395060 NR Description: Expressed protein; protein id: At1g22015.1, by cDNA: 115483. [Arabidopsis thaliana] >gi|25370622|pir||B86353
  misc_feature (126)..(282): Homolog of NCBI NO: 25370617 NR Description: protein F28K19.2 [imported] - Arabidopsis >gi|6573782|gb|AAF17702.1|AC009243_29 F28K19.2 [Arabidopsis
  misc_feature (56)..(126): Homolog of NCBI NO: 25370617 NR Description: protein F28K19.2 [imported] - Arabidopsis >gi|6573782|gb|AAF17702.1|AC009243_29 F28K19.2 [Arabidopsis
  misc_feature (1)..(40): Homolog of NCBI NO: 25370617 NR Description: protein F28K19.2 [imported] - Arabidopsis >gi|6573782|gb|AAF17702.1|AC009243_29 F28K19.2 [Arabidopsis
  misc_feature (1)..(279): Homolog of NCBI NO: 15220440 NR Description: putative AVR9 elicitor response protein; protein At1g05170.1, supported by cDNA: gi_14488077 [Arabidopsis
  misc_feature (1)..(279): Homolog of NCBI NO: 15217544 NR Description: elicitor response protein, putative; protein id: [Arabidopsis thaliana] >gi|25370623|pir||A86458 probasble
MVDGSETNPRKKVFMVMGINTAFSSRKRRDSVRETWMPQGEKLERLEQEKGIVIKFMIGHSATSNSILDRAIDSEDAQHKDFLRLEHVEGYHELSAKTKIFFSTAVAKWDAEFYIKVDDDVHVNLGMLASTLARHRSKPRVYIGCMKSGPVLAQKTVKYHEPEYWKFGEDGNKYFRHATGQIYAISKDLANYISINQPILHKYANEDVSLGSWFIGLEVEHIDDRNFCCGTPPDCRWKAEAGDVCVASFEWSCSGICKSVERMKIVHEVCSEGEGAVWNTLL

SEQ ID NO: 74576 - protein, 393 aa, Arabidopsis thaliana
  peptide (1)..(393): Ceres Seq. ID no. 5678375
  misc_feature (138)..(336): Pfam Name: Galactosyltransferase Pfam Description: Galactosyltransferase
  misc_feature (10)..(393): Homolog of NCBI NO: 30699558 NR Description: Avr9 elicitor response protein -related
  misc_feature (10)..(393): Homolog of NCBI NO: 12323294 NR Description: putative (Avr9) elicitor response protein;
  misc_feature (10)..(393): Homolog of NCBI NO: 34365705 NR Description: At1g77810 [Arabidopsis thaliana]
  misc_feature (10)..(392): Homolog of NCBI NO: 4138265 NR Description: Avr9 elicitor response protein [Nicotiana tabacum]
  misc_feature (10)..(393): Homolog of NCBI NO: 18395060 NR Description: Expressed protein; protein id: At1g22015.1, by cDNA: 115483. [Arabidopsis thaliana] >gi|25370622|pir||B86353
  misc_feature (237)..(393): Homolog of NCBI NO: 25370617 NR Description: protein F28K19.2 [imported] - Arabidopsis >gi|6573782|gb|AAF17702.1|AC009243_29 F28K19.2 [Arabidopsis
  misc_feature (167)..(237): Homolog of NCBI NO: 25370617 NR Description: protein F28K19.2 [imported] - Arabidopsis >gi|6573782|gb|AAF17702.1|AC009243_29 F28K19.2 [Arabidopsis
  misc_feature (112)..(151): Homolog of NCBI NO: 25370617 NR Description: protein F28K19.2 [imported] - Arabidopsis >gi|6573782|gb|AAF17702.1|AC009243_29 F28K19.2 [Arabidopsis
  misc_feature (6)..(390): Homolog of NCBI NO: 15220440 NR Description: putative AVR9 elicitor response protein; protein At1g05170.1, supported by cDNA: gi_14488077 [Arabidopsis
  misc_feature (17)..(390): Homolog of NCBI NO: 15217544 NR Description: elicitor response protein, putative; protein id: [Arabidopsis thaliana] >gi|25370623|pir||A86458 probasble
LSSLNLSTTMKHKVSKRVISLKWVPFLCISFFALGAIFTSRSWEPSSDSGSQLISQHHRDHELQIVSDDCAHNKKATQEKDVTGEVLRTHEAIQSLDKSVSTLSSTRSSQEMVDGSETNPRKKVFMVMGINTAFSSRKRRDSVRETWMPQGEKLERLEQEKGIVIKFMIGHSATSNSILDRAIDSEDAQHKDFLRLEHVEGYHELSAKTKIFFSTAVAKWDAEFYIKVDDDVHVNLGMLASTLARHRSKPRVYIGCMKSGPVLAQKTVKYHEPEYWKFGEDGNKYFRHATGQIYAISKDLANYISINQPILHKYANEDVSLGSWFIGLEVEHIDDRNFCCGTPPDCRWKAEAGDVCVASFEWSCSGICKSVERMKIVHEVCSEGEGAVWNTLL

SEQ ID NO: 74577 - DNA, 1128 bp, Arabidopsis thaliana
  misc_feature (1)..(1128): Ceres Seq. ID no. 5678387
  misc_feature: MA Experiment ID: 108434 Result: Down-regulated in Transcription
  misc_feature: MA Experiment 108434 PARAMETER Experiment Name: At_Root_Tips_cDNA_P Parameter: Tissue Value: Root Tips
  misc_feature: MA Experiment ID: 108577 Result: Down-regulated in Transcription
  misc_feature: MA Experiment 108577 PARAMETER Experiment Name: At_42deg_Heat_cDNA_P Parameter: Temperature (deg C) Value: 42 vs. 22
  misc_feature: MA Experiment 108577 PARAMETER Experiment Name: At_42deg_Heat_cDNA_P Parameter: Timepoint (hr) Value: 6
  misc_feature: MA Experiment 108577 PARAMETER Experiment Name: At_42deg_Heat_cDNA_P Parameter: Tissue Value: Aerial
  misc_feature: MA Experiment ID: 108594 Result: Down-regulated in Transcription
  misc_feature: MA Experiment 108594 PARAMETER Experiment Name: At_Ler-rhl_Root_cDNA_P Parameter: Plant Line Value: null
  misc_feature: MA Experiment ID: 20000314 Result: Up-regulated in Transcription
  misc_feature: MA Experiment 20000314 PARAMETER Experiment Name: At_14day_Shoots-Roots_Sub_P Parameter: Age (day) Value: 14
  misc_feature: MA Experiment 20000314 PARAMETER Experiment Name: At_14day_Shoots-Roots_Sub_P Parameter: Organism Value: A. thaliana
  misc_feature: MA Experiment 20000314 PARAMETER Experiment Name: At_14day_Shoots-Roots_Sub_P Parameter: Plant Line Value: WS
  misc_feature: MA Experiment 20000314 PARAMETER Experiment Name: At_14day_Shoots-Roots_Sub_P Parameter: Tissue Value: Roots vs. Whole Plant
  misc_feature: MA Experiment ID: 20000315 Result: Down-regulated in Transcription
  misc_feature: MA Experiment 20000315 PARAMETER Experiment Name: At_14day_Shoots-Roots_Sub_P Parameter: Age (day) Value: 14
  misc_feature: MA Experiment 20000315 PARAMETER Experiment Name: At_14day_Shoots-Roots_Sub_P Parameter: Organism Value: A. thaliana
  misc_feature: MA Experiment 20000315 PARAMETER Experiment Name: At_14day_Shoots-Roots_Sub_P Parameter: Plant Line Value: WS
  misc_feature: MA Experiment 20000315 PARAMETER Experiment Name: At_14day_Shoots-Roots_Sub_P Parameter: Tissue Value: Shoots vs. Whole Plant
atcagaaacacaattccttcttcttcttcttcttcttcttgtctccgatgtcagccatggatgttatgattcactcttcaagctttctcctcccttgcgacgaaactagtacagggacgagatacgctctcgttgttctgaaccagagtttgccacgattcactcctcttctctgggaacatgagcagcaaaacttcgtctctgtgctgatggaggcgctaatcgcatctacgacgaattgcctctcttcttccctaatgaagacgctttggccattcgaaacaggtataagccggatgttatcaaaggagatatggattctatacgtcgtgacgtcctcgacttttatataaacttgggaactaaggttatagatgaatctcatgatcaagacaccacagatcttgataaatgcattttgtatatccgtcactctactttgaatcaagagacttccggactccagattcttgccactggagcacttggaggaagatttgatcatgaagccggtaatctcaacgtcttatatcgatatccagatacaaggatagtccttttatctgacgattgcctcatccaactccttccaaagactcatcgacatgaaatacatattcagtcttctctagaagggcctcactgtggactcatacccattggaactccatctgctaaaaccacaacctcagggcttcaatgggatctcagcaacactgagatgagatttggtgggttgataagtacatccaacttggttaaagaagagaaaatcacagtcgaatcggattcggatcttctctggactatatccatcaagaaaacaggactttccatacaagaccatacaccttaggcccggtaacaaaacacactttagtatattatacgctactatgatgttcctgatgcaacgaactagttcaacattattgtgttgatttgttgttcactgtactagctaataatacttgtaccattactgtcgttatacattaagatgcttttttctttggttctgtcattgtttatgtggggctttgttgatttgtcgtactcaaaattgtgactggatgttggttagatattggaatctacttgtgcggtatatgagaaaagacaaaattc

SEQ ID NO: 74578 - protein, 180 aa, Arabidopsis thaliana; identical to SEQ ID NO: 43324
  peptide (1)..(180): Ceres Seq. ID no. 5678388
  misc_feature (1)..(85): Pfam Name: Thiamin pyrophosphokinase, catalytic domain Pfam Description: Thiamin pyrophosphokinase, catalytic domain
  misc_feature (1)..(180): Homolog of NCBI NO: 30678415 NR Description: thiamin pyrophosphokinase -related [Arabidopsis
  misc_feature (1)..(180): Homolog of NCBI NO: 18379026 NR Description: thiamin pyrophosphokinase, putative; protein id:
  misc_feature (1)..(180): Homolog of NCBI NO: 30689827 NR Description: thiamin pyrophosphokinase -related [Arabidopsis
  misc_feature (1)..(180): Homolog of NCBI NO: 7488367 NR Description: probable thiamin pyrophosphokinase At2g44750
  misc_feature (1)..(180): Homolog of NCBI NO: 18406621 NR Description: putative thiamin pyrophosphokinase; protein id: supported by cDNA: gi_14596220, supported by cDNA: gi_20148328 thaliana] >gi|14596221|gb|AAK68838.1| putative thiamin
  misc_feature (1)..(180): Homolog of NCBI NO: 30678410 NR Description: thiamin pyrophosphokinase -related [Arabidopsis >gi|16648736|gb|AAL25560.1| At1g02880/F22D16_33 [Arabidopsis >gi|20856331|gb|AAM26660.1| At1g02880/F22D16_33 [Arabidopsis
  misc_feature (16)..(169): Homolog of NCBI NO: 34915046 NR Description: putative thiamin pyrophosphokinase [Oryza sativa
  misc_feature (1)..(169): Homolog of NCBI NO: 34907130 NR Description: putative thiamine pyrophosphokinase [Oryza sativa
  misc_feature (1)..(169): Homolog of NCBI NO: 7305589 NR Description: thiamin pyrophosphokinase [Mus musculus] thiamin pyrophosphokinase [Mus musculus] Unknown (protein for MGC:18314) [Mus musculus]
  misc_feature (1)..(169): Homolog of NCBI NO: 14278354 NR Description: Chain A, Mouse Thiamin Pyrophosphokinase With Thiamin >gi|14278355|pdb|1IG3|B Chain B, Mouse Thiamin

SEQ ID NO: 74579 - protein, 116 aa, Arabidopsis thaliana; identical to SEQ ID NO: 22881
  peptide (1)..(116): Ceres Seq. ID no. 5678389
  misc_feature (16)..(60): Homolog of NCBI NO: 30678415 NR Description: thiamin pyrophosphokinase -related [Arabidopsis
  misc_feature (19)..(60): Homolog of NCBI NO: 18379026 NR Description: thiamin pyrophosphokinase, putative; protein id:
  misc_feature (16)..(60): Homolog of NCBI NO: 30689827 NR Description: thiamin pyrophosphokinase -related [Arabidopsis
  misc_feature (19)..(60): Homolog of NCBI NO: 7488367 NR Description: probable thiamin pyrophosphokinase At2g44750
  misc_feature (16)..(60): Homolog of NCBI NO: 18406621 NR Description: putative thiamin pyrophosphokinase; protein id: supported by cDNA: gi_14596220, supported by cDNA: gi_20148328 thaliana] >gi|14596221|gb|AAK68838.1| putative thiamin
  misc_feature (19)..(60): Homolog of NCBI NO: 34915046 NR Description: putative thiamin pyrophosphokinase [Oryza sativa
  misc_feature (22)..(59): Homolog of NCBI NO: 34907130 NR Description: putative thiamine pyrophosphokinase [Oryza sativa

SEQ ID NO: 74580 - protein, 101 aa, Arabidopsis thaliana; identical to SEQ ID NO: 22882
  peptide (1)..(101): Ceres Seq. ID no. 5678390
  misc_feature (1)..(45): Homolog of NCBI NO: 30678415 NR Description: thiamin pyrophosphokinase -related [Arabidopsis
  misc_feature (4)..(45): Homolog of NCBI NO: 18379026 NR Description: thiamin pyrophosphokinase, putative; protein id:
  misc_feature (1)..(45): Homolog of NCBI NO: 30689827 NR Description: thiamin pyrophosphokinase -related [Arabidopsis
  misc_feature (4)..(45): Homolog of NCBI NO: 7488367 NR Description: probable thiamin pyrophosphokinase At2g44750
  misc_feature (1)..(45): Homolog of NCBI NO: 18406621 NR Description: putative thiamin pyrophosphokinase; protein id: supported by cDNA: gi_14596220, supported by cDNA: gi_20148328 thaliana] >gi|14596221|gb|AAK68838.1| putative thiamin
  misc_feature (4)..(45): Homolog of NCBI NO: 34915046 NR Description: putative thiamin pyrophosphokinase [Oryza sativa
  misc_feature (7)..(44): Homolog of NCBI NO: 34907130 NR Description: putative thiamine pyrophosphokinase [Oryza sativa

SEQ ID NO: 74581 - DNA, 823 bp, Arabidopsis thaliana
  misc_feature (1)..(823): Ceres Seq. ID no. 5678391
  misc_feature: MA Experiment ID: 108434 Result: Down-regulated in Transcription
  misc_feature: MA Experiment 108434 PARAMETER Experiment Name: At_Root_Tips_cDNA_P Parameter: Tissue Value: Root Tips
  misc_feature: MA Experiment ID: 108462 Result: Down-regulated in Transcription
  misc_feature: MA Experiment 108462 PARAMETER Experiment Name: At_Germinating_Seeds_cDNA_P Parameter: Age (day) Value: 2 vs. 0
  misc_feature: MA Experiment 108462 PARAMETER Experiment Name: At_Germinating_Seeds_cDNA_P Parameter: Tissue Value: Germinating Seeds
  misc_feature: MA Experiment ID: 108463 Result: Down-regulated in Transcription
  misc_feature: MA Experiment 108463 PARAMETER Experiment Name: At_Germinating_Seeds_cDNA_P Parameter: Age (day) Value: 3 vs. 0
  misc_feature: MA Experiment 108463 PARAMETER Experiment Name: At_Germinating_Seeds_cDNA_P Parameter: Tissue Value: Germinating Seeds
  misc_feature: MA Experiment ID: 108501 Result: Up-regulated in Transcription
  misc_feature: MA Experiment 108501 PARAMETER Experiment Name: At_ap2_floral_buds_cDNA_P Parameter: Plant Line Value: ap2 (Ler.)
  misc_feature: MA Experiment 108501 PARAMETER Experiment Name: At_ap2_floral_buds_cDNA_P Parameter: Tissue Value: Closed Flower
  misc_feature: MA Experiment ID: 108576 Result: Up-regulated in Transcription
  misc_feature: MA Experiment 108576 PARAMETER Experiment Name: At_42deg_Heat_cDNA_P Parameter: Temperature (deg C) Value: 42 vs. 22
  misc_feature: MA Experiment 108576 PARAMETER Experiment Name: At_42deg_Heat_cDNA_P Parameter: Timepoint (hr) Value: 1
  misc_feature: MA Experiment 108576 PARAMETER Experiment Name: At_42deg_Heat_cDNA_P Parameter: Tissue Value: Aerial
  misc_feature: MA Experiment ID: 108595 Result: Up-regulated in Transcription
  misc_feature: MA Experiment 108595 PARAMETER Experiment Name: At_Ler-pi_Ovule_cDNA_P Parameter: Plant Line Value: null
  misc_feature: MA Experiment ID: 20000179 Result: Up-regulated in Transcription
  misc_feature: MA Experiment 20000179 PARAMETER Experiment Name: At_Germinating_Seeds_P Parameter: Age (hr) Value: 6 vs. 0
  misc_feature: MA Experiment 20000179 PARAMETER Experiment Name: At_Germinating_Seeds_P Parameter: Tissue Value: Germinating Seeds
  misc_feature: MA Experiment ID: 20000184 Result: Down-regulated in Transcription
  misc_feature: MA Experiment 20000184 PARAMETER Experiment Name: At_Shoots__P Parameter: Age (day) Value: 7
  misc_feature: MA Experiment 20000184 PARAMETER Experiment Name: At_Shoots__P Parameter: Tissue Value: Shoots vs. Whole Plant
  misc_feature: MA Experiment ID: 20000227 Result: Down-regulated in Transcription
  misc_feature: MA Experiment 20000227 PARAMETER Experiment Name: At_Root-Tips-vs-Tops_P Parameter: Tissue Value: Root Tips vs. Root Tops
  misc_feature: MA Experiment ID: 20000234 Result: Up-regulated in Transcription
  misc_feature: MA Experiment 20000234 PARAMETER Experiment Name: At_Siliques_P Parameter: Age (day) Value: 21
  misc_feature: MA Experiment 20000234 PARAMETER Experiment Name: At_Siliques_P Parameter: Organism Value: A. thaliana
  misc_feature: MA Experiment 20000234 PARAMETER Experiment Name: At_Siliques_P Parameter: Plant Line Value: WS
  misc_feature: MA Experiment 20000234 PARAMETER Experiment Name: At_Siliques_P Parameter: Tissue Value: Less Than 5mm Siliques vs. Whole Plant
  misc_feature: MA Experiment ID: 20000235 Result: Up-regulated in Transcription
  misc_feature: MA Experiment 20000235 PARAMETER Experiment Name: At_Siliques_P Parameter: Age (day) Value: 21
  misc_feature: MA Experiment 20000235 PARAMETER Experiment Name: At_Siliques_P Parameter: Organism Value: A. thaliana
  misc_feature: MA Experiment 20000235 PARAMETER Experiment Name: At_Siliques_P Parameter: Plant Line Value: WS
  misc_feature: MA Experiment 20000235 PARAMETER Experiment Name: At_Siliques_P Parameter: Tissue Value: 5-10mm Siliques vs. Whole Plant
  misc_feature: MA Experiment ID: 20000264 Result: Up-regulated in Transcription
  misc_feature: MA Experiment 20000264 PARAMETER Experiment Name: At_Open_Flower_P Parameter: Age (day) Value: 21
  misc_feature: MA Experiment 20000264 PARAMETER Experiment Name: At_Open_Flower_P Parameter: Plant Line Value: WS
  misc_feature: MA Experiment 20000264 PARAMETER Experiment Name: At_Open_Flower_P Parameter: Tissue Value: Open Flower vs. Whole Plant
  misc_feature: MA Experiment ID: 20000286 Result: Up-regulated in Transcription
  misc_feature: MA Experiment 20000286 PARAMETER Experiment Name: At_Open_Flower_P Parameter: Age (day) Value: 21
  misc_feature: MA Experiment 20000286 PARAMETER Experiment Name: At_Open_Flower_P Parameter: Plant Line Value: WS
  misc_feature: MA Experiment 20000286 PARAMETER Experiment Name: At_Open_Flower_P Parameter: Tissue Value: Half Open vs. Whole Plant
  misc_feature: MA Experiment ID: 20000438 Result: Down-regulated in Transcription
  misc_feature: MA Experiment 20000438 PARAMETER Experiment Name: At_Shoots__P Parameter: Age (day) Value: 14
  misc_feature: MA Experiment 20000438 PARAMETER Experiment Name: At_Shoots__P Parameter: Tissue Value: Shoots vs. Whole Plant
  misc_feature: MA Experiment ID: 20000495 Result: Up-regulated in Transcription
  misc_feature: MA Experiment 20000495 PARAMETER Experiment Name: At_Guard_Cells_P Parameter: Harvest Date Value: 8/2/2002
  misc_feature: MA Experiment 20000495 PARAMETER Experiment Name: At_Guard_Cells_P Parameter: Organism Value: A. thaliana
  misc_feature: MA Experiment 20000495 PARAMETER Experiment Name: At_Guard_Cells_P Parameter: Tissue Value: Guard Cells vs. Leaves
  misc_feature: MA Experiment ID: 20000794 Result: Up-regulated in Transcription
  misc_feature: MA Experiment 20000794 PARAMETER Experiment Name: At_Petals_P Parameter: Age (day) Value: 23-25 days
  misc_feature: MA Experiment 20000794 PARAMETER Experiment Name: At_Petals_P Parameter: Plant Line Value: WS
  misc_feature: MA Experiment 20000794 PARAMETER Experiment Name: At_Petals_P Parameter: Tissue Value: Petals vs. Whole plant
  misc_feature: MA Experiment ID: 20001555 Result: Up-regulated in Transcription
  misc_feature: MA Experiment 20001555 PARAMETER Experiment Name: At_Drought_Soil_Dry_P Parameter: Age (day) Value: 24
  misc_feature: MA Experiment 20001555 PARAMETER Experiment Name: At_Drought_Soil_Dry_P Parameter: Organism Value: A. thaliana
  misc_feature: MA Experiment 20001555 PARAMETER Experiment Name: At_Drought_Soil_Dry_P Parameter: Plant Line Value: WS
  misc_feature: MA Experiment 20001555 PARAMETER Experiment Name: At_Drought_Soil_Dry_P Parameter: Post Timepoint (hr) Value: None
  misc_feature: MA Experiment 20001555 PARAMETER Experiment Name: At_Drought_Soil_Dry_P Parameter: Post-Treatment Value: None
  misc_feature: MA Experiment 20001555 PARAMETER Experiment Name: At_Drought_Soil_Dry_P Parameter: Timepoint (day) Value: 10
  misc_feature: MA Experiment 20001555 PARAMETER Experiment Name: At_Drought_Soil_Dry_P Parameter: Treatment Value: Drought vs. No Drought
  misc_feature: Pfam Name: SnoaL Pfam Description: SnoaL-like polyketide cyclase
attaaaaagctaatatggctactagggaagagagagataagtatagatcagtccttgaagatgcaggacaggttcaatggaggtatgataaccctccagacttcaatagtgtgaaccagctctttgaagaaggccagactaaggtgtggccagaaggttcgttagaagagacagtgcaaaacgcgatcaagtcatgggagatggagttctcacataagatccgtttacaggacttcaagactataaaccctgagaagtttaagctctttgtcaatggtttatcagctgaagagacgcttaggcttgggagttacaatgctttgctcaagaactctttgcctgaagagtttcagtactataagcccgaggaagagagctttgagtcatcacatgacgcctttagatctgctttaccacgcgggtttgcgtgggaaatactctctgtgtactcggggcctcctgttatagccttcaaatttagacactggggatactttgaaggaactttcaaaggtcatgctcctactggggaaatggttcaattcctgggtctaggagttctaaaggttgacgaatcacttagagcagaggagattgagatttactatgatccaggagagctgttcgggggactactcaagggacctcctatatcagagaccaaaaccacagacagtggagacaacactgcagagaaacaaagctgcccattcacacactaagataataagaaaagtagaagtgtatttgaccctttaaagaatatattgtaacagtctcttggttattgatgcatggaataaattataagttatgttaggcg

SEQ ID NO: 74582 - protein, 235 aa, Arabidopsis thaliana
  peptide (1)..(235): Ceres Seq. ID no. 5678392
  misc_feature: Pfam Name: SnoaL Pfam Description: SnoaL-like polyketide cyclase
  misc_feature (1)..(235): Homolog of NCBI NO: 18412106 NR Description: expressed protein; protein id: At1g78780.1,
  misc_feature (15)..(235): Homolog of NCBI NO: 25372796 NR Description: hypothetical protein F9K20.18 [imported] - thaliana >gi|3834316|gb|AAC83032.1| Similar to gb|X16648 related protein from Hordeum vulgare. EST gb|Z18206 comes from
  misc_feature (63)..(235): Homolog of NCBI NO: 30699354 NR Description: expressed protein [Arabidopsis thaliana]
  misc_feature (8)..(228): Homolog of NCBI NO: 34910864 NR Description: putative pathogenesis related protein [Oryza
  misc_feature (8)..(211): Homolog of NCBI NO: 34910862 NR Description: putative pathogenesis related protein [Oryza
  misc_feature (7)..(222): Homolog of NCBI NO: 34904656 NR Description: putative pathogenesis related protein [Oryza
  misc_feature (8)..(216): Homolog of NCBI NO: 34904652 NR Description: putative pathogenesis related protein [Oryza
  misc_feature (1)..(214): Homolog of NCBI NO: 1346809 NR Description: Pathogen-related protein >gi|7489402|pir||T06168
  misc_feature (5)..(235): Homolog of NCBI NO: 23129762 NR Description: hypothetical protein [Nostoc punctiforme]
  misc_feature (13)..(210): Homolog of NCBI NO: 17227713 NR Description: similar to pathogenesis related protein [Nostoc
MATREERDKYRSVLEDAGQVQWRYDNPPDFNSVNQLFEEGQTKVWPEGSLEETVQNAIKSWEMEFSHKIRLQDFKTINPEKFKLFVNGLSAEETLRLGSYNALLKNSLPEEFQYYKPEEESFESSHDAFRSALPRGFAWEILSVYSGPPVIAFKFRHWGYFEGTFKGHAPTGEMVQFLGLGVLKVDESLRAEEIEIYYDPGELFGGLLKGPPISETKTTDSGDNTAEKQSCPFTH

SEQ ID NO: 74583 - protein, 173 aa, Arabidopsis thaliana; identical to SEQ ID NO: 37006
  peptide (1)..(173): Ceres Seq. ID no. 5678393
  misc_feature: Pfam Name: SnoaL Pfam Description: SnoaL-like polyketide cyclase
  misc_feature (1)..(173): Homolog of NCBI NO: 18412106 NR Description: expressed protein; protein id: At1g78780.1,
  misc_feature (1)..(173): Homolog of NCBI NO: 25372796 NR Description: hypothetical protein F9K20.18 [imported] - thaliana >gi|3834316|gb|AAC83032.1| Similar to gb|X16648 related protein from Hordeum vulgare. EST gb|Z18206 comes from
  misc_feature (1)..(173): Homolog of NCBI NO: 30699354 NR Description: expressed protein [Arabidopsis thaliana]
  misc_feature (1)..(166): Homolog of NCBI NO: 34910864 NR Description: putative pathogenesis related protein [Oryza
  misc_feature (1)..(149): Homolog of NCBI NO: 34910862 NR Description: putative pathogenesis related protein [Oryza
  misc_feature (1)..(160): Homolog of NCBI NO: 34904656 NR Description: putative pathogenesis related protein [Oryza
  misc_feature (1)..(154): Homolog of NCBI NO: 34904652 NR Description: putative pathogenesis related protein [Oryza
  misc_feature (1)..(152): Homolog of NCBI NO: 1346809 NR Description: Pathogen-related protein >gi|7489402|pir||T06168
  misc_feature (1)..(173): Homolog of NCBI NO: 23129762 NR Description: hypothetical protein [Nostoc punctiforme]
  misc_feature (1)..(148): Homolog of NCBI NO: 17227713 NR Description: similar to pathogenesis related protein [Nostoc

SEQ ID NO: 74584 - DNA, 1043 bp, Arabidopsis thaliana
  misc_feature (1)..(1043): Ceres Seq. ID no. 5678394
  misc_feature: MA Experiment ID: 108435 Result: Down-regulated in Transcription
  misc_feature: MA Experiment 108435 PARAMETER Experiment Name: At_stm_Mutants_cDNA_P Parameter: Plant Line Value: wt Landsburg vs stm
  misc_feature: MA Experiment 108435 PARAMETER Experiment Name: At_stm_Mutants_cDNA_P Parameter: Tissue Value: Shoot Apical Meristem Region
  misc_feature: MA Experiment ID: 108462 Result: Up-regulated in Transcription
  misc_feature: MA Experiment 108462 PARAMETER Experiment Name: At_Germinating_Seeds_cDNA_P Parameter: Age (day) Value: 2 vs. 0
  misc_feature: MA Experiment 108462 PARAMETER Experiment Name: At_Germinating_Seeds_cDNA_P Parameter: Tissue Value: Germinating Seeds
  misc_feature: MA Experiment ID: 108488 Result: Down-regulated in Transcription
  misc_feature: MA Experiment ID: 108489 Result: Up-regulated in Transcription
  misc_feature: MA Experiment ID: 108595 Result: Down-regulated in Transcription
  misc_feature: MA Experiment 108595 PARAMETER Experiment Name: At_Ler-pi_Ovule_cDNA_P Parameter: Plant Line Value: null
  misc_feature: MA Experiment ID: 20000071 Result: Up-regulated in Transcription
  misc_feature: MA Experiment 20000071 PARAMETER Experiment Name: At_100uM_ABA_Mutants_cDNA_P Parameter: Plant Line Value: CS8104
  misc_feature: MA Experiment 20000071 PARAMETER Experiment Name: At_100uM_ABA_Mutants_cDNA_P Parameter: Timepoint (hr) Value: 6
  misc_feature: MA Experiment 20000071 PARAMETER Experiment Name: At_100uM_ABA_Mutants_cDNA_P Parameter: Tissue Value: Aerial
  misc_feature: MA Experiment 20000071 PARAMETER Experiment Name: At_100uM_ABA_Mutants_cDNA_P Parameter: Treatment Value: 100uM ABA vs. No Treatment
  misc_feature: MA Experiment ID: 20000117 Result: Up-regulated in Transcription
  misc_feature: MA Experiment 20000117 PARAMETER Experiment Name: At_100uM_ABA_Mutants_cDNA_P Parameter: Plant Line Value: Columbia
  misc_feature: MA Experiment 20000117 PARAMETER Experiment Name: At_100uM_ABA_Mutants_cDNA_P Parameter: Timepoint (hr) Value: 6
  misc_feature: MA Experiment 20000117 PARAMETER Experiment Name: At_100uM_ABA_Mutants_cDNA_P Parameter: Tissue Value: Aerial
  misc_feature: MA Experiment 20000117 PARAMETER Experiment Name: At_100uM_ABA_Mutants_cDNA_P Parameter: Treatment Value: 100uM ABA vs. No Treatment
  misc_feature: MA Experiment ID: 20000185 Result: Down-regulated in Transcription
  misc_feature: MA Experiment 20000185 PARAMETER Experiment Name: At_Roots__P Parameter: Age (day) Value: 7 vs. 21
  misc_feature: MA Experiment 20000185 PARAMETER Experiment Name: At_Roots__P Parameter: Organism Value: A. thaliana
  misc_feature: MA Experiment 20000185 PARAMETER Experiment Name: At_Roots__P Parameter: Tissue Value: Roots vs. Whole Plant
  misc_feature: MA Experiment ID: 20000794 Result: Up-regulated in Transcription
  misc_feature: MA Experiment 20000794 PARAMETER Experiment Name: At_Petals_P Parameter: Age (day) Value: 23-25 days
  misc_feature: MA Experiment 20000794 PARAMETER Experiment Name: At_Petals_P Parameter: Plant Line Value: WS
  misc_feature: MA Experiment 20000794 PARAMETER Experiment Name: At_Petals_P Parameter: Tissue Value: Petals vs. Whole plant
  misc_feature: MA Experiment ID: 20001905 Result: Up-regulated in Transcription
  misc_feature: MA Experiment 20001905 PARAMETER Experiment Name: At_Drought_Reproduction_P Parameter: Age (day) Value: 40
  misc_feature: MA Experiment 20001905 PARAMETER Experiment Name: At_Drought_Reproduction_P Parameter: Organism Value: A. thaliana
  misc_feature: MA Experiment 20001905 PARAMETER Experiment Name: At_Drought_Reproduction_P Parameter: Plant Line Value: WS
  misc_feature: MA Experiment 20001905 PARAMETER Experiment Name: At_Drought_Reproduction_P Parameter: Timepoint (day) Value: 10
  misc_feature: MA Experiment 20001905 PARAMETER Experiment Name: At_Drought_Reproduction_P Parameter: Tissue Value: Rosettes
  misc_feature: MA Experiment 20001905 PARAMETER Experiment Name: At_Drought_Reproduction_P Parameter: Treatment Value: Drought vs. No Drought
cactgatatgtgtgatatctctttgtcccccatctattaatctcctcctccgcatcgtcgccgtgcacttccccacctcttccggcggatatgatgagcattgtatcaagtcatcatcactgtcaacaatctgttatacacgaacgtagcggtataggaacaatatctaaggtttcttgttcgagatattgcggtccgtgtttctctggacgactggctttctctcatagcctctgcttgaagactacttatgggaaaactgataggagaaagttttcaagaatttgcagtattgtggatgatgaggggaatctagataattcggatgacgaggaaaaggaatcactcgatgataaaactaaaaggcaagcgaatgatatgaatcgggctaatcttgaaagaatggttgggtcagatgattctgcatttaacggcttagatcttgcaaccctcatcagacagaagtatggaaaatcttatgatgttcaactcatcaagaaggagttcatggggaagaatcttcttgcaatgaatgtcatgtggaagtacagagaacagaggtcttttcctctaaccgaagaagaatatatacttagacttgacgatgtagccaacatgttgaaatgctggggagcagtctcacatatccgtagcagcctagcaaagtcgaaggagcgacctcggatagggaaggctgtcagcattttcatagacatggattcgacagggggaagagcaaatgaatggatttacaagtaaaaatcgaccggtttgcagctgctaaaccaagaaatcaaaaggttttgtctctacgtttatcgtcatcaattcattttgaaggctcttcagtgatggttgcctgcagaaaccgaggtttttgctatatttgatgtccaaatcaggtagtatatatgtacatgtgtgtattaagtagacacaaatctttacttgaactctctgtgtaaaatatctccatgtgttgaaattcaatcatctttgtgaatcttcctctctttgtgatctgtaaaagtattagttttggc

SEQ ID NO: 74585 - protein, 222 aa, Arabidopsis thaliana; identical to SEQ ID NO: 31110
  peptide (1)..(222): Ceres Seq. ID no. 5678395
  misc_feature (1)..(222): Homolog of NCBI NO: 11994202 NR Description: dbj|BAA18864.1~gene_id:MPN9.15~similar to unknown
  misc_feature (1)..(222): Homolog of NCBI NO: 18402409 NR Description: expressed protein; protein id: At3g19900.1, by cDNA: 20558. [Arabidopsis thaliana] unknown [Arabidopsis thaliana] >gi|24030263|gb|AAN41306.1|
  misc_feature (115)..(220): Homolog of NCBI NO: 23041855 NR Description: hypothetical protein [Trichodesmium erythraeum
  misc_feature (115)..(220): Homolog of NCBI NO: 17229946 NR Description: hypothetical protein [Nostoc sp. PCC 7120]
  misc_feature (115)..(220): Homolog of NCBI NO: 23130142 NR Description: hypothetical protein [Nostoc punctiforme]
  misc_feature (115)..(219): Homolog of NCBI NO: 16332324 NR Description: unknown protein [Synechocystis sp. PCC 6803]
  misc_feature (115)..(220): Homolog of NCBI NO: 22298501 NR Description: ORF_ID:tll0958~hypothetical protein
  misc_feature (115)..(205): Homolog of NCBI NO: 37521175 NR Description: hypothetical protein gsr1606 [Gloeobacter
  misc_feature (117)..(205): Homolog of NCBI NO: 33866372 NR Description: conserved hypothetical protein [Synechococcus sp.

SEQ ID NO: 74586 - protein, 221 aa, Arabidopsis thaliana; identical to SEQ ID NO: 31111
  peptide (1)..(221): Ceres Seq. ID no. 5678396
  misc_feature (1)..(221): Homolog of NCBI NO: 11994202 NR Description: dbj|BAA18864.1~gene_id:MPN9.15~similar to unknown
  misc_feature (1)..(221): Homolog of NCBI NO: 18402409 NR Description: expressed protein; protein id: At3g19900.1, by cDNA: 20558. [Arabidopsis thaliana] unknown [Arabidopsis thaliana] >gi|24030263|gb|AAN41306.1|
  misc_feature (114)..(219): Homolog of NCBI NO: 23041855 NR Description: hypothetical protein [Trichodesmium erythraeum
  misc_feature (114)..(219): Homolog of NCBI NO: 17229946 NR Description: hypothetical protein [Nostoc sp. PCC 7120]
  misc_feature (114)..(219): Homolog of NCBI NO: 23130142 NR Description: hypothetical protein [Nostoc punctiforme]
  misc_feature (114)..(218): Homolog of NCBI NO: 16332324 NR Description: unknown protein [Synechocystis sp. PCC 6803]
  misc_feature (114)..(219): Homolog of NCBI NO: 22298501 NR Description: ORF_ID:tll0958~hypothetical protein
  misc_feature (114)..(204): Homolog of NCBI NO: 37521175 NR Description: hypothetical protein gsr1606 [Gloeobacter
  misc_feature (116)..(204): Homolog of NCBI NO: 33866372 NR Description: conserved hypothetical protein [Synechococcus sp.

SEQ ID NO: 74587 - protein, 126 aa, Arabidopsis thaliana; identical to SEQ ID NO: 31112
  peptide (1)..(126): Ceres Seq. ID no. 5678397
  misc_feature (1)..(126): Homolog of NCBI NO: 11994202 NR Description: dbj|BAA18864.1~gene_id:MPN9.15~similar to unknown
  misc_feature (1)..(126): Homolog of NCBI NO: 18402409 NR Description: expressed protein; protein id: At3g19900.1, by cDNA: 20558. [Arabidopsis thaliana] unknown [Arabidopsis thaliana] >gi|24030263|gb|AAN41306.1|
  misc_feature (19)..(124): Homolog of NCBI NO: 23041855 NR Description: hypothetical protein [Trichodesmium erythraeum
  misc_feature (19)..(124): Homolog of NCBI NO: 17229946 NR Description: hypothetical protein [Nostoc sp. PCC 7120]
  misc_feature (19)..(124): Homolog of NCBI NO: 23130142 NR Description: hypothetical protein [Nostoc punctiforme]
  misc_feature (19)..(123): Homolog of NCBI NO: 16332324 NR Description: unknown protein [Synechocystis sp. PCC 6803]
  misc_feature (19)..(124): Homolog of NCBI NO: 22298501 NR Description: ORF_ID:tll0958~hypothetical protein
  misc_feature (19)..(109): Homolog of NCBI NO: 37521175 NR Description: hypothetical protein gsr1606 [Gloeobacter
  misc_feature (21)..(109): Homolog of NCBI NO: 33866372 NR Description: conserved hypothetical protein [Synechococcus sp.

SEQ ID NO: 74588 - DNA, 1157 bp, Arabidopsis thaliana
  misc_feature (1)..(1157): Ceres Seq. ID no. 5678402
  misc_feature: MA Experiment ID: 108462 Result: Up-regulated in Transcription
  misc_feature: MA Experiment 108462 PARAMETER Experiment Name: At_Germinating_Seeds_cDNA_P Parameter: Age (day) Value: 2 vs. 0
  misc_feature: MA Experiment 108462 PARAMETER Experiment Name: At_Germinating_Seeds_cDNA_P Parameter: Tissue Value: Germinating Seeds
  misc_feature: MA Experiment ID: 108463 Result: Up-regulated in Transcription
  misc_feature: MA Experiment 108463 PARAMETER Experiment Name: At_Germinating_Seeds_cDNA_P Parameter: Age (day) Value: 3 vs. 0
  misc_feature: MA Experiment 108463 PARAMETER Experiment Name: At_Germinating_Seeds_cDNA_P Parameter: Tissue Value: Germinating Seeds
  misc_feature: MA Experiment ID: 108464 Result: Up-regulated in Transcription
  misc_feature: MA Experiment 108464 PARAMETER Experiment Name: At_Germinating_Seeds_cDNA_P Parameter: Age (day) Value: 4 vs. 0
  misc_feature: MA Experiment 108464 PARAMETER Experiment Name: At_Germinating_Seeds_cDNA_P Parameter: Tissue Value: Germinating Seeds
  misc_feature: MA Experiment ID: 108561 Result: Up-regulated in Transcription
  misc_feature: MA Experiment 108561 PARAMETER Experiment Name: At_100uM_ABA_cDNA_P Parameter: Timepoint (hr) Value: 6
  misc_feature: MA Experiment 108561 PARAMETER Experiment Name: At_100uM_ABA_cDNA_P Parameter: Tissue Value: Aerial
  misc_feature: MA Experiment 108561 PARAMETER Experiment Name: At_100uM_ABA_cDNA_P Parameter: Treatment Value: 100uM ABA vs. No Treatment
  misc_feature: MA Experiment ID: 108572 Result: Up-regulated in Transcription
  misc_feature: MA Experiment 108572 PARAMETER Experiment Name: At_Drought_cDNA_P Parameter: Timepoint (hr) Value: 1
  misc_feature: MA Experiment 108572 PARAMETER Experiment Name: At_Drought_cDNA_P Parameter: Tissue Value: Aerial
  misc_feature: MA Experiment 108572 PARAMETER Experiment Name: At_Drought_cDNA_P Parameter: Treatment Value: Drought vs. No Drought
  misc_feature: MA Experiment ID: 108573 Result: Up-regulated in Transcription
  misc_feature: MA Experiment 108573 PARAMETER Experiment Name: At_Drought_cDNA_P Parameter: Timepoint (hr) Value: 6
  misc_feature: MA Experiment 108573 PARAMETER Experiment Name: At_Drought_cDNA_P Parameter: Tissue Value: Aerial
  misc_feature: MA Experiment 108573 PARAMETER Experiment Name: At_Drought_cDNA_P Parameter: Treatment Value: Drought vs. No Drought
  misc_feature: MA Experiment ID: 108576 Result: Up-regulated in Transcription
  misc_feature: MA Experiment 108576 PARAMETER Experiment Name: At_42deg_Heat_cDNA_P Parameter: Temperature (deg C) Value: 42 vs. 22
  misc_feature: MA Experiment 108576 PARAMETER Experiment Name: At_42deg_Heat_cDNA_P Parameter: Timepoint (hr) Value: 1
  misc_feature: MA Experiment 108576 PARAMETER Experiment Name: At_42deg_Heat_cDNA_P Parameter: Tissue Value: Aerial
  misc_feature: MA Experiment ID: 108577 Result: Up-regulated in Transcription
  misc_feature: MA Experiment 108577 PARAMETER Experiment Name: At_42deg_Heat_cDNA_P Parameter: Temperature (deg C) Value: 42 vs. 22
  misc_feature: MA Experiment 108577 PARAMETER Experiment Name: At_42deg_Heat_cDNA_P Parameter: Timepoint (hr) Value: 6
  misc_feature: MA Experiment 108577 PARAMETER Experiment Name: At_42deg_Heat_cDNA_P Parameter: Tissue Value: Aerial
  misc_feature: MA Experiment ID: 108579 Result: Up-regulated in Transcription
  misc_feature: MA Experiment 108579 PARAMETER Experiment Name: At_4deg_Cold_cDNA_P Parameter: Temperature (deg C) Value: 4 vs. 22
  misc_feature: MA Experiment 108579 PARAMETER Experiment Name: At_4deg_Cold_cDNA_P Parameter: Timepoint (hr) Value: 6
  misc_feature: MA Experiment 108579 PARAMETER Experiment Name: At_4deg_Cold_cDNA_P Parameter: Tissue Value: Aerial
  misc_feature: MA Experiment ID: 108594 Result: Down-regulated in Transcription
  misc_feature: MA Experiment 108594 PARAMETER Experiment Name: At_Ler-rhl_Root_cDNA_P Parameter: Plant Line Value: null
  misc_feature: MA Experiment ID: 108605 Result: Up-regulated in Transcription
  misc_feature: MA Experiment 108605 PARAMETER Experiment Name: At_100uM_ABA_cDNA_P Parameter: Timepoint (hr) Value: 6
  misc_feature: MA Experiment 108605 PARAMETER Experiment Name: At_100uM_ABA_cDNA_P Parameter: Tissue Value: Aerial
  misc_feature: MA Experiment 108605 PARAMETER Experiment Name: At_100uM_ABA_cDNA_P Parameter: Treatment Value: 100uM ABA vs. No Treatment
  misc_feature: MA Experiment ID: 108607 Result: Up-regulated in Transcription
  misc_feature: MA Experiment 108607 PARAMETER Experiment Name: At_100uM_ABA_cDNA_P Parameter: Timepoint (hr) Value: 4
  misc_feature: MA Experiment 108607 PARAMETER Experiment Name: At_100uM_ABA_cDNA_P Parameter: Tissue Value: Aerial
  misc_feature: MA Experiment 108607 PARAMETER Experiment Name: At_100uM_ABA_cDNA_P Parameter: Treatment Value: 100uM ABA vs. No Treatment
  misc_feature: MA Experiment ID: 108609 Result: Up-regulated in Transcription
  misc_feature: MA Experiment 108609 PARAMETER Experiment Name: At_100uM_ABA_cDNA_P Parameter: Timepoint (hr) Value: 24
  misc_feature: MA Experiment 108609 PARAMETER Experiment Name: At_100uM_ABA_cDNA_P Parameter: Tissue Value: Aerial
  misc_feature: MA Experiment 108609 PARAMETER Experiment Name: At_100uM_ABA_cDNA_P Parameter: Treatment Value: 100uM ABA vs. No Treatment
  misc_feature: MA Experiment ID: 108668 Result: Up-regulated in Transcription
  misc_feature: MA Experiment 108668 PARAMETER Experiment Name: At_2mM_SA_cDNA_P Parameter: Plant Line Value: WS
  misc_feature: MA Experiment 108668 PARAMETER Experiment Name: At_2mM_SA_cDNA_P Parameter: Timepoint (hr) Value: 6
  misc_feature: MA Experiment 108668 PARAMETER Experiment Name: At_2mM_SA_cDNA_P Parameter: Treatment Value: 2mM SA vs. No Treatment
  misc_feature: MA Experiment ID: 20000069 Result: Up-regulated in Transcription
  misc_feature: MA Experiment 20000069 PARAMETER Experiment Name: At_100uM_ABA_Mutants_cDNA_P Parameter: Plant Line Value: CS23
  misc_feature: MA Experiment 20000069 PARAMETER Experiment Name: At_100uM_ABA_Mutants_cDNA_P Parameter: Timepoint (hr) Value: 6
  misc_feature: MA Experiment 20000069 PARAMETER Experiment Name: At_100uM_ABA_Mutants_cDNA_P Parameter: Tissue Value: Aerial
  misc_feature: MA Experiment 20000069 PARAMETER Experiment Name: At_100uM_ABA_Mutants_cDNA_P Parameter: Treatment Value: 100uM ABA vs. No Treatment
  misc_feature: MA Experiment ID: 20000070 Result: Up-regulated in Transcription
  misc_feature: MA Experiment 20000070 PARAMETER Experiment Name: At_100uM_ABA_Mutants_cDNA_P Parameter: Plant Line Value: CS24
  misc_feature: MA Experiment 20000070 PARAMETER Experiment Name: At_100uM_ABA_Mutants_cDNA_P Parameter: Timepoint (hr) Value: 6
  misc_feature: MA Experiment 20000070 PARAMETER Experiment Name: At_100uM_ABA_Mutants_cDNA_P Parameter: Tissue Value: Aerial
  misc_feature: MA Experiment 20000070 PARAMETER Experiment Name: At_100uM_ABA_Mutants_cDNA_P Parameter: Treatment Value: 100uM ABA vs. No Treatment
  misc_feature: MA Experiment ID: 20000072 Result: Up-regulated in Transcription
  misc_feature: MA Experiment 20000072 PARAMETER Experiment Name: At_100uM_ABA_Mutants_cDNA_P Parameter: Plant Line Value: CS8105
  misc_feature: MA Experiment 20000072 PARAMETER Experiment Name: At_100uM_ABA_Mutants_cDNA_P Parameter: Timepoint (hr) Value: 6
  misc_feature: MA Experiment 20000072 PARAMETER Experiment Name: At_100uM_ABA_Mutants_cDNA_P Parameter: Tissue Value: Aerial
  misc_feature: MA Experiment 20000072 PARAMETER Experiment Name: At_100uM_ABA_Mutants_cDNA_P Parameter: Treatment Value: 100uM ABA vs. No Treatment
  misc_feature: MA Experiment ID: 20000088 Result: Up-regulated in Transcription
  misc_feature: MA Experiment 20000088 PARAMETER Experiment Name: At_100uM_ABA_Mutants_cDNA_P Parameter: Plant Line Value: Landsberg
  misc_feature: MA Experiment 20000088 PARAMETER Experiment Name: At_100uM_ABA_Mutants_cDNA_P Parameter: Timepoint (hr) Value: 6
  misc_feature: MA Experiment 20000088 PARAMETER Experiment Name: At_100uM_ABA_Mutants_cDNA_P Parameter: Tissue Value: Aerial
  misc_feature: MA Experiment 20000088 PARAMETER Experiment Name: At_100uM_ABA_Mutants_cDNA_P Parameter: Treatment Value: 100uM ABA vs. No Treatment
  misc_feature: MA Experiment ID: 20000093 Result: Up-regulated in Transcription
  misc_feature: MA Experiment 20000093 PARAMETER Experiment Name: At_42deg_Heat_cDNA_P Parameter: Temperature (deg C) Value: 42 vs. 22
  misc_feature: MA Experiment 20000093 PARAMETER Experiment Name: At_42deg_Heat_cDNA_P Parameter: Timepoint (hr) Value: 0.5
  misc_feature: MA Experiment 20000093 PARAMETER Experiment Name: At_42deg_Heat_cDNA_P Parameter: Tissue Value: Aerial
  misc_feature: MA Experiment ID: 20000111 Result: Up-regulated in Transcription
  misc_feature: MA Experiment 20000111 PARAMETER Experiment Name: At_42deg_Heat_cDNA_P Parameter: Temperature (deg C) Value: 42 vs. 22
  misc_feature: MA Experiment 20000111 PARAMETER Experiment Name: At_42deg_Heat_cDNA_P Parameter: Timepoint (hr) Value: 6
  misc_feature: MA Experiment 20000111 PARAMETER Experiment Name: At_42deg_Heat_cDNA_P Parameter: Tissue Value: Aerial
  misc_feature: MA Experiment ID: 20000112 Result: Up-regulated in Transcription
  misc_feature: MA Experiment 20000112 PARAMETER Experiment Name: At_42deg_Heat_cDNA_P Parameter: Temperature (deg C) Value: 42 vs. 22
  misc_feature: MA Experiment 20000112 PARAMETER Experiment Name: At_42deg_Heat_cDNA_P Parameter: Timepoint (hr) Value: 2
  misc_feature: MA Experiment 20000112 PARAMETER Experiment Name: At_42deg_Heat_cDNA_P Parameter: Tissue Value: Aerial
  misc_feature: MA Experiment ID: 20000113 Result: Up-regulated in Transcription
  misc_feature: MA Experiment 20000113 PARAMETER Experiment Name: At_42deg_Heat_cDNA_P Parameter: Temperature (deg C) Value: 42 vs. 22
  misc_feature: MA Experiment 20000113 PARAMETER Experiment Name: At_42deg_Heat_cDNA_P Parameter: Timepoint (hr) Value: 8
  misc_feature: MA Experiment 20000113 PARAMETER Experiment Name: At_42deg_Heat_cDNA_P Parameter: Tissue Value: Aerial
  misc_feature: MA Experiment ID: 20000117 Result: Up-regulated in Transcription
  misc_feature: MA Experiment 20000117 PARAMETER Experiment Name: At_100uM_ABA_Mutants_cDNA_P Parameter: Plant Line Value: Columbia
  misc_feature: MA Experiment 20000117 PARAMETER Experiment Name: At_100uM_ABA_Mutants_cDNA_P Parameter: Timepoint (hr) Value: 6
  misc_feature: MA Experiment 20000117 PARAMETER Experiment Name: At_100uM_ABA_Mutants_cDNA_P Parameter: Tissue Value: Aerial
  misc_feature: MA Experiment 20000117 PARAMETER Experiment Name: At_100uM_ABA_Mutants_cDNA_P Parameter: Treatment Value: 100uM ABA vs. No Treatment
  misc_feature: MA Experiment ID: 20000144 Result: Up-regulated in Transcription
  misc_feature: MA Experiment 20000144 PARAMETER Experiment Name: At_42deg_Heat_cDNA_P Parameter: Temperature (deg C) Value: 42 vs. 22
  misc_feature: MA Experiment 20000144 PARAMETER Experiment Name: At_42deg_Heat_cDNA_P Parameter: Timepoint (hr) Value: 1
  misc_feature: MA Experiment 20000144 PARAMETER Experiment Name: At_42deg_Heat_cDNA_P Parameter: Tissue Value: Aerial
  misc_feature: MA Experiment ID: 20000169 Result: Up-regulated in Transcription
  misc_feature: MA Experiment 20000169 PARAMETER Experiment Name: At_100uM_ABA_P Parameter: Age (day) Value: 14
  misc_feature: MA Experiment 20000169 PARAMETER Experiment Name: At_100uM_ABA_P Parameter: Organism Value: A. thaliana
  misc_feature: MA Experiment 20000169 PARAMETER Experiment Name: At_100uM_ABA_P Parameter: Plant Line Value: WS
  misc_feature: MA Experiment 20000169 PARAMETER Experiment Name: At_100uM_ABA_P Parameter: Timepoint (hr) Value: 6
  misc_feature: MA Experiment 20000169 PARAMETER Experiment Name: At_100uM_ABA_P Parameter: Tissue Value: Aerial
  misc_feature: MA Experiment 20000169 PARAMETER Experiment Name: At_100uM_ABA_P Parameter: Treatment Value: 100uM ABA vs. No Treatment
  misc_feature: MA Experiment ID: 20000171 Result: Up-regulated in Transcription
  misc_feature: MA Experiment 20000171 PARAMETER Experiment Name: At_42deg_Heat_P Parameter: Age (day) Value: 14
  misc_feature: MA Experiment 20000171 PARAMETER Experiment Name: At_42deg_Heat_P Parameter: Organism Value: A. thaliana
  misc_feature: MA Experiment 20000171 PARAMETER Experiment Name: At_42deg_Heat_P Parameter: Plant Line Value: WS
  misc_feature: MA Experiment 20000171 PARAMETER Experiment Name: At_42deg_Heat_P Parameter: Temperature (deg C) Value: 42 vs. 22
  misc_feature: MA Experiment 20000171 PARAMETER Experiment Name: At_42deg_Heat_P Parameter: Timepoint (hr) Value: 1
  misc_feature: MA Experiment 20000171 PARAMETER Experiment Name: At_42deg_Heat_P Parameter: Tissue Value: Aerial
  misc_feature: MA Experiment ID: 20000173 Result: Up-regulated in Transcription
  misc_feature: MA Experiment 20000173 PARAMETER Experiment Name: At_42deg_Heat_P Parameter: Age (day) Value: 14
  misc_feature: MA Experiment 20000173 PARAMETER Experiment Name: At_42deg_Heat_P Parameter: Organism Value: A. thaliana
  misc_feature: MA Experiment 20000173 PARAMETER Experiment Name: At_42deg_Heat_P Parameter: Plant Line Value: WS
  misc_feature: MA Experiment 20000173 PARAMETER Experiment Name: At_42deg_Heat_P Parameter: Temperature (deg C) Value: 42 vs. 22
  misc_feature: MA Experiment 20000173 PARAMETER Experiment Name: At_42deg_Heat_P Parameter: Timepoint (hr) Value: 6
  misc_feature: MA Experiment 20000173 PARAMETER Experiment Name: At_42deg_Heat_P Parameter: Tissue Value: Aerial
  misc_feature: MA Experiment ID: 20000180 Result: Up-regulated in Transcription
  misc_feature: MA Experiment 20000180 PARAMETER Experiment Name: At_Germinating_Seeds_P Parameter: Age (hr) Value: 24 vs. 0
  misc_feature: MA Experiment 20000180 PARAMETER Experiment Name: At_Germinating_Seeds_P Parameter: Tissue Value: Germinating Seeds
  misc_feature: MA Experiment ID: 20000185 Result: Down-regulated in Transcription
  misc_feature: MA Experiment 20000185 PARAMETER Experiment Name: At_Roots__P Parameter: Age (day) Value: 7 vs. 21
  misc_feature: MA Experiment 20000185 PARAMETER Experiment Name: At_Roots__P Parameter: Organism Value: A. thaliana
  misc_feature: MA Experiment 20000185 PARAMETER Experiment Name: At_Roots__P Parameter: Tissue Value: Roots vs. Whole Plant
  misc_feature: MA Experiment ID: 20000234 Result: Down-regulated in Transcription
  misc_feature: MA Experiment 20000234 PARAMETER Experiment Name: At_Siliques_P Parameter: Age (day) Value: 21
  misc_feature: MA Experiment 20000234 PARAMETER Experiment Name: At_Siliques_P Parameter: Organism Value: A. thaliana
  misc_feature: MA Experiment 20000234 PARAMETER Experiment Name: At_Siliques_P Parameter: Plant Line Value: WS
  misc_feature: MA Experiment 20000234 PARAMETER Experiment Name: At_Siliques_P Parameter: Tissue Value: Less Than 5mm Siliques vs. Whole Plant
  misc_feature: MA Experiment ID: 20000235 Result: Down-regulated in Transcription
  misc_feature: MA Experiment 20000235 PARAMETER Experiment Name: At_Siliques_P Parameter: Age (day) Value: 21
  misc_feature: MA Experiment 20000235 PARAMETER Experiment Name: At_Siliques_P Parameter: Organism Value: A. thaliana
  misc_feature: MA Experiment 20000235 PARAMETER Experiment Name: At_Siliques_P Parameter: Plant Line Value: WS
  misc_feature: MA Experiment 20000235 PARAMETER Experiment Name: At_Siliques_P Parameter: Tissue Value: 5-10mm Siliques vs. Whole Plant
  misc_feature: MA Experiment ID: 20000264 Result: Up-regulated in Transcription
  misc_feature: MA Experiment 20000264 PARAMETER Experiment Name: At_Open_Flower_P Parameter: Age (day) Value: 21
  misc_feature: MA Experiment 20000264 PARAMETER Experiment Name: At_Open_Flower_P Parameter: Plant Line Value: WS
  misc_feature: MA Experiment 20000264 PARAMETER Experiment Name: At_Open_Flower_P Parameter: Tissue Value: Open Flower vs. Whole Plant
  misc_feature: MA Experiment ID: 20000268 Result: Up-regulated in Transcription
  misc_feature: MA Experiment 20000268 PARAMETER Experiment Name: At_100mM_NaCl__P Parameter: Age (day) Value: 14
  misc_feature: MA Experiment 20000268 PARAMETER Experiment Name: At_100mM_NaCl__P Parameter: Organism Value: A. thaliana
  misc_feature: MA Experiment 20000268 PARAMETER Experiment Name: At_100mM_NaCl__P Parameter: Plant Line Value: WS
  misc_feature: MA Experiment 20000268 PARAMETER Experiment Name: At_100mM_NaCl__P Parameter: Timepoint (hr) Value: 6
  misc_feature: MA Experiment 20000268 PARAMETER Experiment Name: At_100mM_NaCl__P Parameter: Tissue Value: Whole Plant
  misc_feature: MA Experiment 20000268 PARAMETER Experiment Name: At_100mM_NaCl__P Parameter: Treatment Value: 100mM NaCl vs. No Treatment
  misc_feature: MA Experiment ID: 20000436 Result: Up-regulated in Transcription
  misc_feature: MA Experiment 20000436 PARAMETER Experiment Name: At_Drought_P Parameter: Age (day) Value: 7
  misc_feature: MA Experiment 20000436 PARAMETER Experiment Name: At_Drought_P Parameter: Organism Value: A. thaliana
  misc_feature: MA Experiment 20000436 PARAMETER Experiment Name: At_Drought_P Parameter: Plant Line Value: WS
  misc_feature: MA Experiment 20000436 PARAMETER Experiment Name: At_Drought_P Parameter: Timepoint (hr) Value: 12
  misc_feature: MA Experiment 20000436 PARAMETER Experiment Name: At_Drought_P Parameter: Tissue Value: Whole Plant
  misc_feature: MA Experiment 20000436 PARAMETER Experiment Name: At_Drought_P Parameter: Treatment Value: Drought vs. No Drought
  misc_feature: MA Experiment ID: 20000439 Result: Down-regulated in Transcription
  misc_feature: MA Experiment 20000439 PARAMETER Experiment Name: At_Roots__P Parameter: Age (day) Value: 14 vs. 21
  misc_feature: MA Experiment 20000439 PARAMETER Experiment Name: At_Roots__P Parameter: Organism Value: A. thaliana
  misc_feature: MA Experiment 20000439 PARAMETER Experiment Name: At_Roots__P Parameter: Tissue Value: Roots vs. Whole Plant
  misc_feature: MA Experiment ID: 20000453 Result: Up-regulated in Transcription
  misc_feature: MA Experiment 20000453 PARAMETER Experiment Name: At_100uM_ABA_P Parameter: Age (day) Value: 15
  misc_feature: MA Experiment 20000453 PARAMETER Experiment Name: At_100uM_ABA_P Parameter: Organism Value: A. thaliana
  misc_feature: MA Experiment 20000453 PARAMETER Experiment Name: At_100uM_ABA_P Parameter: Plant Line Value: WS
  misc_feature: MA Experiment 20000453 PARAMETER Experiment Name: At_100uM_ABA_P Parameter: Timepoint (hr) Value: 24
  misc_feature: MA Experiment 20000453 PARAMETER Experiment Name: At_100uM_ABA_P Parameter: Tissue Value: Aerial
  misc_feature: MA Experiment 20000453 PARAMETER Experiment Name: At_100uM_ABA_P Parameter: Treatment Value: 100uM ABA vs. No Treatment
  misc_feature: MA Experiment ID: 20000794 Result: Up-regulated in Transcription
  misc_feature: MA Experiment 20000794 PARAMETER Experiment Name: At_Petals_P Parameter: Age (day) Value: 23-25 days
  misc_feature: MA Experiment 20000794 PARAMETER Experiment Name: At_Petals_P Parameter: Plant Line Value: WS
  misc_feature: MA Experiment 20000794 PARAMETER Experiment Name: At_Petals_P Parameter: Tissue Value: Petals vs. Whole plant
  misc_feature: MA Experiment ID: 20001248 Result: Down-regulated in Transcription
  misc_feature: MA Experiment 20001248 PARAMETER Experiment Name: At_Far-red-induction_P Parameter: Age (day) Value: 7
  misc_feature: MA Experiment 20001248 PARAMETER Experiment Name: At_Far-red-induction_P Parameter: Light Value: Far-red vs. White
  misc_feature: MA Experiment 20001248 PARAMETER Experiment Name: At_Far-red-induction_P Parameter: Organism Value: A. thaliana
  misc_feature: MA Experiment 20001248 PARAMETER Experiment Name: At_Far-red-induction_P Parameter: Plant Line Value: Columbia
  misc_feature: MA Experiment 20001248 PARAMETER Experiment Name: At_Far-red-induction_P Parameter: Timepoint (hr) Value: 4
  misc_feature: MA Experiment 20001248 PARAMETER Experiment Name: At_Far-red-induction_P Parameter: Tissue Value: Whole Plant
  misc_feature: MA Experiment ID: 20001451 Result: Down-regulated in Transcription
  misc_feature: MA Experiment 20001451 PARAMETER Experiment Name: At_Far-red-induction_P Parameter: Age (day) Value: 7
  misc_feature: MA Experiment 20001451 PARAMETER Experiment Name: At_Far-red-induction_P Parameter: Light Value: Far-red vs. White
  misc_feature: MA Experiment 20001451 PARAMETER Experiment Name: At_Far-red-induction_P Parameter: Organism Value: A. thaliana
  misc_feature: MA Experiment 20001451 PARAMETER Experiment Name: At_Far-red-induction_P Parameter: Plant Line Value: Columbia
  misc_feature: MA Experiment 20001451 PARAMETER Experiment Name: At_Far-red-induction_P Parameter: Timepoint (hr) Value: 24
  misc_feature: MA Experiment 20001451 PARAMETER Experiment Name: At_Far-red-induction_P Parameter: Tissue Value: Whole Plant
  misc_feature: MA Experiment ID: 20001555 Result: Up-regulated in Transcription
  misc_feature: MA Experiment 20001555 PARAMETER Experiment Name: At_Drought_Soil_Dry_P Parameter: Age (day) Value: 24
  misc_feature: MA Experiment 20001555 PARAMETER Experiment Name: At_Drought_Soil_Dry_P Parameter: Organism Value: A. thaliana
  misc_feature: MA Experiment 20001555 PARAMETER Experiment Name: At_Drought_Soil_Dry_P Parameter: Plant Line Value: WS
  misc_feature: MA Experiment 20001555 PARAMETER Experiment Name: At_Drought_Soil_Dry_P Parameter: Post Timepoint (hr) Value: None
  misc_feature: MA Experiment 20001555 PARAMETER Experiment Name: At_Drought_Soil_Dry_P Parameter: Post-Treatment Value: None
  misc_feature: MA Experiment 20001555 PARAMETER Experiment Name: At_Drought_Soil_Dry_P Parameter: Timepoint (day) Value: 10
  misc_feature: MA Experiment 20001555 PARAMETER Experiment Name: At_Drought_Soil_Dry_P Parameter: Treatment Value: Drought vs. No Drought
  misc_feature: MA Experiment ID: 20001559 Result: Up-regulated in Transcription
  misc_feature: MA Experiment 20001559 PARAMETER Experiment Name: At_Drought_Soil_Dry_P Parameter: Age (day) Value: 28
  misc_feature: MA Experiment 20001559 PARAMETER Experiment Name: At_Drought_Soil_Dry_P Parameter: Organism Value: A. thaliana
  misc_feature: MA Experiment 20001559 PARAMETER Experiment Name: At_Drought_Soil_Dry_P Parameter: Plant Line Value: WS
  misc_feature: MA Experiment 20001559 PARAMETER Experiment Name: At_Drought_Soil_Dry_P Parameter: Post Timepoint (hr) Value: 29
  misc_feature: MA Experiment 20001559 PARAMETER Experiment Name: At_Drought_Soil_Dry_P Parameter: Post-Treatment Value: Re-Water vs. No Drought
  misc_feature: MA Experiment 20001559 PARAMETER Experiment Name: At_Drought_Soil_Dry_P Parameter: Timepoint (day) Value: 14
  misc_feature: MA Experiment 20001559 PARAMETER Experiment Name: At_Drought_Soil_Dry_P Parameter: Treatment Value: Drought vs. No Drought
  misc_feature: MA Experiment ID: 20001904 Result: Up-regulated in Transcription
  misc_feature: MA Experiment 20001904 PARAMETER Experiment Name: At_Drought_Reproduction_P Parameter: Age (day) Value: 37
  misc_feature: MA Experiment 20001904 PARAMETER Experiment Name: At_Drought_Reproduction_P Parameter: Organism Value: A. thaliana
  misc_feature: MA Experiment 20001904 PARAMETER Experiment Name: At_Drought_Reproduction_P Parameter: Plant Line Value: WS
  misc_feature: MA Experiment 20001904 PARAMETER Experiment Name: At_Drought_Reproduction_P Parameter: Timepoint (day) Value: 7
  misc_feature: MA Experiment 20001904 PARAMETER Experiment Name: At_Drought_Reproduction_P Parameter: Tissue Value: Rosettes
  misc_feature: MA Experiment 20001904 PARAMETER Experiment Name: At_Drought_Reproduction_P Parameter: Treatment Value: Drought vs. No Drought
  misc_feature: MA Experiment ID: 20001905 Result: Up-regulated in Transcription
  misc_feature: MA Experiment 20001905 PARAMETER Experiment Name: At_Drought_Reproduction_P Parameter: Age (day) Value: 40
  misc_feature: MA Experiment 20001905 PARAMETER Experiment Name: At_Drought_Reproduction_P Parameter: Organism Value: A. thaliana
  misc_feature: MA Experiment 20001905 PARAMETER Experiment Name: At_Drought_Reproduction_P Parameter: Plant Line Value: WS
  misc_feature: MA Experiment 20001905 PARAMETER Experiment Name: At_Drought_Reproduction_P Parameter: Timepoint (day) Value: 10
  misc_feature: MA Experiment 20001905 PARAMETER Experiment Name: At_Drought_Reproduction_P Parameter: Tissue Value: Rosettes
  misc_feature: MA Experiment 20001905 PARAMETER Experiment Name: At_Drought_Reproduction_P Parameter: Treatment Value: Drought vs. No Drought
gatgaaagcaaaacatttacgtaacaatgtctataaaatcagtacaggtctattcttgttcactagcttcgaaattttagtcgaagaaacaaaaaaaaatggcgacggtacaattgtccacccaatttagctgccaaaccagagtttcaatctcaccgaactctaaatctatctccaagcctccgtttctggtaccggtgacctcaattattcaccgcccgatgatctccaccggaggaatcgctgtttccccccgtagagttttcaaagtccgagccacagatacgggagagataggatcagctctattggcggcggaggaagcaattgaagacgtggaagagacggagcggctaaagagatcgctcgtggattcgttgtacggaacagatcgaggtttaagcgcatcgagcgaaaccagagctgaaatcggagatctaatcacacagctcgagtctaagaaccctactccagctccgacggaagctcttttccttctcaacggcaaatggatcctcgcctacacatcgttcgtgaatttgttcccgttgctatcacgaggaatcgtaccgttaataaaagtcgatgagatctctcaaaccattgattcagataacttcaccgtccagaactctgttcgtttcgctggtcctttaggtacaaactcgattagcaccaacgctaaattcgaaatccgaagccctaaacgcgtccagattaagtttgagcaaggcgtaattgggacgcctcagctaacggattctattgagataccggaatatgtagaggttcttggtcaaaagattgatcttaacccgatcagagggttacttacctcggtgcaagacacagcctcgtctgtggctagaaccatatcaagccaaccaccgttgaaattctctttgccggcggacaatgcgcagtcttggctactcacgacttatctagacaaagacattcggatctctagaggagacggtggaagtgtctttgtgcttatcaaagaaggaagccctctcttgaatccttgaacttggtcaaaatatatgtctctctcttgtcgttgtgttaagtgagacaaatatatagtgtggttgtaggtttacttcttaatcgttgttattaactcgatgataaggaatataatgtttttaact

SEQ ID NO: 74589 - protein, 310 aa, Arabidopsis thaliana; identical to SEQ ID NO: 37403
  peptide (1)..(310): Ceres Seq. ID no. 5678403
  misc_feature (84)..(301): Pfam Name: PAP_fibrillin Pfam Description: PAP_fibrillin
  misc_feature (1)..(310): Homolog of NCBI NO: 15235575 NR Description: fibrillin precursor-like protein; protein id: supported by cDNA: 111376., supported by cDNA: gi_18377867
  misc_feature (1)..(310): Homolog of NCBI NO: 21618237 NR Description: fibrillin precursor-like protein [Arabidopsis
  misc_feature (1)..(310): Homolog of NCBI NO: 18377868 NR Description: AT4g22240/T10I14_70 [Arabidopsis thaliana]
  misc_feature (1)..(310): Homolog of NCBI NO: 14248556 NR Description: plastid-lipid associated protein PAP2 [Brassica
  misc_feature (1)..(310): Homolog of NCBI NO: 14248550 NR Description: plastid-lipid associated protein PAP2 [Brassica
  misc_feature (1)..(310): Homolog of NCBI NO: 15233357 NR Description: putative fibrillin; protein id: At4g04020.1, by cDNA: 1461. [Arabidopsis thaliana] >gi|7488105|pir||T01472
  misc_feature (3)..(310): Homolog of NCBI NO: 14248554 NR Description: plastid-lipid associated protein PAP1 [Brassica
  misc_feature (3)..(310): Homolog of NCBI NO: 14248548 NR Description: plastid-lipid associated protein PAP1 [Brassica
  misc_feature (74)..(310): Homolog of NCBI NO: 4139097 NR Description: fibrillin [Brassica napus]
  misc_feature (1)..(310): Homolog of NCBI NO: 3928760 NR Description: homolog to plastid-lipid-associated protein

SEQ ID NO: 74590 - protein, 269 aa, Arabidopsis thaliana; identical to SEQ ID NO: 37404
  peptide (1)..(269): Ceres Seq. ID no. 5678404
  misc_feature (43)..(260): Pfam Name: PAP_fibrillin Pfam Description: PAP_fibrillin
  misc_feature (1)..(269): Homolog of NCBI NO: 15235575 NR Description: fibrillin precursor-like protein; protein id: supported by cDNA: 111376., supported by cDNA: gi_18377867
  misc_feature (1)..(269): Homolog of NCBI NO: 21618237 NR Description: fibrillin precursor-like protein [Arabidopsis
  misc_feature (1)..(269): Homolog of NCBI NO: 18377868 NR Description: AT4g22240/T10I14_70 [Arabidopsis thaliana]
  misc_feature (1)..(269): Homolog of NCBI NO: 14248556 NR Description: plastid-lipid associated protein PAP2 [Brassica
  misc_feature (1)..(269): Homolog of NCBI NO: 14248550 NR Description: plastid-lipid associated protein PAP2 [Brassica
  misc_feature (1)..(269): Homolog of NCBI NO: 15233357 NR Description: putative fibrillin; protein id: At4g04020.1, by cDNA: 1461. [Arabidopsis thaliana] >gi|7488105|pir||T01472
  misc_feature (1)..(269): Homolog of NCBI NO: 14248554 NR Description: plastid-lipid associated protein PAP1 [Brassica
  misc_feature (1)..(269): Homolog of NCBI NO: 14248548 NR Description: plastid-lipid associated protein PAP1 [Brassica
  misc_feature (33)..(269): Homolog of NCBI NO: 4139097 NR Description: fibrillin [Brassica napus]
  misc_feature (1)..(269): Homolog of NCBI NO: 3928760 NR Description: homolog to plastid-lipid-associated protein

SEQ ID NO: 74591 - DNA, 626 bp, Arabidopsis thaliana
  misc_feature (1)..(626): Ceres Seq. ID no. 5678514
  misc_feature: MA Experiment ID: 108462 Result: Down-regulated in Transcription
  misc_feature: MA Experiment 108462 PARAMETER Experiment Name: At_Germinating_Seeds_cDNA_P Parameter: Age (day) Value: 2 vs. 0
  misc_feature: MA Experiment 108462 PARAMETER Experiment Name: At_Germinating_Seeds_cDNA_P Parameter: Tissue Value: Germinating Seeds
  misc_feature: MA Experiment ID: 108463 Result: Down-regulated in Transcription
  misc_feature: MA Experiment 108463 PARAMETER Experiment Name: At_Germinating_Seeds_cDNA_P Parameter: Age (day) Value: 3 vs. 0
  misc_feature: MA Experiment 108463 PARAMETER Experiment Name: At_Germinating_Seeds_cDNA_P Parameter: Tissue Value: Germinating Seeds
  misc_feature: MA Experiment ID: 108464 Result: Down-regulated in Transcription
  misc_feature: MA Experiment 108464 PARAMETER Experiment Name: At_Germinating_Seeds_cDNA_P Parameter: Age (day) Value: 4 vs. 0
  misc_feature: MA Experiment 108464 PARAMETER Experiment Name: At_Germinating_Seeds_cDNA_P Parameter: Tissue Value: Germinating Seeds
  misc_feature: MA Experiment ID: 20000794 Result: Up-regulated in Transcription
  misc_feature: MA Experiment 20000794 PARAMETER Experiment Name: At_Petals_P Parameter: Age (day) Value: 23-25 days
  misc_feature: MA Experiment 20000794 PARAMETER Experiment Name: At_Petals_P Parameter: Plant Line Value: WS
  misc_feature: MA Experiment 20000794 PARAMETER Experiment Name: At_Petals_P Parameter: Tissue Value: Petals vs. Whole plant
tttacgcattctccgtcattcggttaagttgcatcgatcgttagggttttatcgagagagcaaggagagcgatttctcaaatcgactttaatggctgacgacgattacaatgaagtcgatgacttgggatatgaagatgagccagcagagcctgagatcgaagaaggagtagaggaagatgctgatatcaaggagaacgatgatgttaatgttgaccctttggaaacagaagataaggttgaaacagaacctgtgcaacgcccacgtaaaacctctaagtttatgactaagtatgaacgtgcacgtatcctcggcactcgtgctttgcagattagcatgaatgctcctgttatggttgagttggagggtgagactgatccacttgagattgcgatgaaagagcttaggcaaaggaagattccatttaccattagacgttatctacctgatatgagttacgaggaatggggagttgatgaactgatcgtcgaagactcgtggaaacgtcaagtcggtggtgattgataaaatctggcctatgtgttttgcaaagctttctgctcttgtatggattatgaacttacgatatagtcgcatgtagaacttcttcatttgtcctattctcc

SEQ ID NO: 74592 - protein, 144 aa, Arabidopsis thaliana; identical to SEQ ID NO: 26666
  peptide (1)..(144): Ceres Seq. ID no. 5678515
  misc_feature (63)..(116): Pfam Name: RNA polymerase Rpb6 Pfam Description: RNA polymerase Rpb6
  misc_feature (1)..(144): Homolog of NCBI NO: 15224039 NR Description: putative DNA-directed RNA polymerase II subunit;
  misc_feature (1)..(144): Homolog of NCBI NO: 15242235 NR Description: DNA-directed RNA polymerase II subunit-like protein id: At5g51940.1, supported by cDNA: 8268., supported by
  misc_feature (1)..(143): Homolog of NCBI NO: 22093730 NR Description: putative DNA-directed RNA polymerase Iib [Oryza
  misc_feature (1)..(143): Homolog of NCBI NO: 4960150 NR Description: DNA-directed RNA polymerase IIa [Nicotiana
  misc_feature (1)..(137): Homolog of NCBI NO: 17531543 NR Description: Dna-directed RNA polymerase Iib [Caenorhabditis
  misc_feature (3)..(137): Homolog of NCBI NO: 39597419 NR Description: Hypothetical protein CBG03063 [Caenorhabditis
  misc_feature (1)..(135): Homolog of NCBI NO: 31214787 NR Description: ENSANGP00000017467 [Anopheles gambiae]
  misc_feature (1)..(136): Homolog of NCBI NO: 17864588 NR Description: RNA polymerase II 18kD subunit CG1163-PA
  misc_feature (1)..(135): Homolog of NCBI NO: 6522686 NR Description: RNA polymerase common subunit RPB6 [Gallus gallus]
  misc_feature (1)..(135): Homolog of NCBI NO: 13786166 NR Description: polymerase II [Rattus norvegicus]

SEQ ID NO: 74593 - protein, 80 aa, Arabidopsis thaliana; identical to SEQ ID NO: 26667
  peptide (1)..(80): Ceres Seq. ID no. 5678516
  misc_feature (1)..(52): Pfam Name: RNA polymerase Rpb6 Pfam Description: RNA polymerase Rpb6
  misc_feature (1)..(80): Homolog of NCBI NO: 15224039 NR Description: putative DNA-directed RNA polymerase II subunit;
  misc_feature (1)..(80): Homolog of NCBI NO: 15242235 NR Description: DNA-directed RNA polymerase II subunit-like protein id: At5g51940.1, supported by cDNA: 8268., supported by
  misc_feature (1)..(79): Homolog of NCBI NO: 22093730 NR Description: putative DNA-directed RNA polymerase Iib [Oryza
  misc_feature (1)..(79): Homolog of NCBI NO: 4960150 NR Description: DNA-directed RNA polymerase IIa [Nicotiana
  misc_feature (1)..(73): Homolog of NCBI NO: 17531543 NR Description: Dna-directed RNA polymerase Iib [Caenorhabditis
  misc_feature (1)..(73): Homolog of NCBI NO: 39597419 NR Description: Hypothetical protein CBG03063 [Caenorhabditis
  misc_feature (1)..(71): Homolog of NCBI NO: 31214787 NR Description: ENSANGP00000017467 [Anopheles gambiae]
  misc_feature (1)..(72): Homolog of NCBI NO: 17864588 NR Description: RNA polymerase II 18kD subunit CG1163-PA
  misc_feature (1)..(71): Homolog of NCBI NO: 6522686 NR Description: RNA polymerase common subunit RPB6 [Gallus gallus]
  misc_feature (1)..(71): Homolog of NCBI NO: 13786166 NR Description: polymerase II [Rattus norvegicus]

SEQ ID NO: 74594 - DNA, 785 bp, Arabidopsis thaliana
  misc_feature (1)..(785): Ceres Seq. ID no. 5678517
  misc_feature: MA Experiment ID: 108434 Result: Up-regulated in Transcription
  misc_feature: MA Experiment 108434 PARAMETER Experiment Name: At_Root_Tips_cDNA_P Parameter: Tissue Value: Root Tips
  misc_feature: MA Experiment ID: 108463 Result: Down-regulated in Transcription
  misc_feature: MA Experiment 108463 PARAMETER Experiment Name: At_Germinating_Seeds_cDNA_P Parameter: Age (day) Value: 3 vs. 0
  misc_feature: MA Experiment 108463 PARAMETER Experiment Name: At_Germinating_Seeds_cDNA_P Parameter: Tissue Value: Germinating Seeds
  misc_feature: MA Experiment ID: 108573 Result: Down-regulated in Transcription
  misc_feature: MA Experiment 108573 PARAMETER Experiment Name: At_Drought_cDNA_P Parameter: Timepoint (hr) Value: 6
  misc_feature: MA Experiment 108573 PARAMETER Experiment Name: At_Drought_cDNA_P Parameter: Tissue Value: Aerial
  misc_feature: MA Experiment 108573 PARAMETER Experiment Name: At_Drought_cDNA_P Parameter: Treatment Value: Drought vs. No Drought
  misc_feature: MA Experiment ID: 108577 Result: Down-regulated in Transcription
  misc_feature: MA Experiment 108577 PARAMETER Experiment Name: At_42deg_Heat_cDNA_P Parameter: Temperature (deg C) Value: 42 vs. 22
  misc_feature: MA Experiment 108577 PARAMETER Experiment Name: At_42deg_Heat_cDNA_P Parameter: Timepoint (hr) Value: 6
  misc_feature: MA Experiment 108577 PARAMETER Experiment Name: At_42deg_Heat_cDNA_P Parameter: Tissue Value: Aerial
gagaagaagaatggtgacaagaatggcgacgaaggtgagtttggaagggaagagagtggttttggtaccgtacatggcggaacatgtaccaaagtaccatcaatggatgcaagattcggctcttcttgaagctacgggatctgagccgttgagtcttgagcaagagtatgagatgcagctttcttggactcaagatcccaataagcggactttcattgtcttggacaaggatttcgttaagggagacctggctcatggccaacctcatgtagaagcaatgacaggtgatgtgaacatttacatgaatgatgtggatgatccaaaggttgcagaagttgaaataatgatagctgagcccagaagccgtggtaaaggactaggaaaggaatctgtgttgataatgatggcttatggtgtcaagaacttggagattcacaagtttacagccaaaattggggaatcaaacacagcttccctcagcttattccgcaaactaggtttcgaggagtcttcttacagcggtatcttcaaagaggttacactcgagtatccggtgactaatctccgtcgagaagagctcttgaagttattggatgaagtcattaggcacactcattcatcgaacaacccatcagactcactgctatcaggagaagctactgcataaagcattttcttcagtgtttattgttatttttctcttcaacttgggaaagaatttgaaatcattgtagcatgtatgagtttataaattatgattactaatatacatggtccattgtttc

SEQ ID NO: 74595 - protein, 221 aa, Arabidopsis thaliana; identical to SEQ ID NO: 35217
  peptide (1)..(221): Ceres Seq. ID no. 5678518
  misc_feature (89)..(168): Pfam Name: Acetyltransferase (GNAT) family Pfam Description: Acetyltransferase (GNAT) family
  misc_feature (4)..(221): Homolog of NCBI NO: 18395874 NR Description: Expressed protein; protein id: At2g04845.1, by cDNA: 21909. [Arabidopsis thaliana]
  misc_feature (8)..(221): Homolog of NCBI NO: 21554294 NR Description: unknown [Arabidopsis thaliana]
  misc_feature (16)..(178): Homolog of NCBI NO: 24414273 NR Description: Unknown protein [Oryza sativa (japonica
  misc_feature (7)..(200): Homolog of NCBI NO: 13278945 NR Description: DKFZP564C103 protein [Homo sapiens]
  misc_feature (7)..(200): Homolog of NCBI NO: 7512719 NR Description: hypothetical protein DKFZp564C103.1 - human
  misc_feature (7)..(200): Homolog of NCBI NO: 31542521 NR Description: DKFZP564C103 protein [Homo sapiens]
  misc_feature (14)..(195): Homolog of NCBI NO: 13384782 NR Description: RIKEN cDNA 1110028N05 [Mus musculus] unnamed protein product [Mus musculus] RIKEN cDNA 1110028N05 gene [Mus musculus]
  misc_feature (14)..(195): Homolog of NCBI NO: 34875069 NR Description: similar to RIKEN cDNA 1110028N05 [Rattus
  misc_feature (7)..(184): Homolog of NCBI NO: 39584036 NR Description: Hypothetical protein CBG11716 [Caenorhabditis
  misc_feature (16)..(186): Homolog of NCBI NO: 24651688 NR Description: CG11539-PA [Drosophila melanogaster]

SEQ ID NO: 74596 - protein, 218 aa, Arabidopsis thaliana; identical to SEQ ID NO: 35218
  peptide (1)..(218): Ceres Seq. ID no. 5678519
  misc_feature (86)..(165): Pfam Name: Acetyltransferase (GNAT) family Pfam Description: Acetyltransferase (GNAT) family
  misc_feature (1)..(218): Homolog of NCBI NO: 18395874 NR Description: Expressed protein; protein id: At2g04845.1, by cDNA: 21909. [Arabidopsis thaliana]
  misc_feature (5)..(218): Homolog of NCBI NO: 21554294 NR Description: unknown [Arabidopsis thaliana]
  misc_feature (13)..(175): Homolog of NCBI NO: 24414273 NR Description: Unknown protein [Oryza sativa (japonica
  misc_feature (4)..(197): Homolog of NCBI NO: 13278945 NR Description: DKFZP564C103 protein [Homo sapiens]
  misc_feature (4)..(197): Homolog of NCBI NO: 7512719 NR Description: hypothetical protein DKFZp564C103.1 - human
  misc_feature (4)..(197): Homolog of NCBI NO: 31542521 NR Description: DKFZP564C103 protein [Homo sapiens]
  misc_feature (11)..(192): Homolog of NCBI NO: 13384782 NR Description: RIKEN cDNA 1110028N05 [Mus musculus] unnamed protein product [Mus musculus] RIKEN cDNA 1110028N05 gene [Mus musculus]
  misc_feature (11)..(192): Homolog of NCBI NO: 34875069 NR Description: similar to RIKEN cDNA 1110028N05 [Rattus
  misc_feature (4)..(181): Homolog of NCBI NO: 39584036 NR Description: Hypothetical protein CBG11716 [Caenorhabditis
  misc_feature (13)..(183): Homolog of NCBI NO: 24651688 NR Description: CG11539-PA [Drosophila melanogaster]

SEQ ID NO: 74597 - protein, 214 aa, Arabidopsis thaliana; identical to SEQ ID NO: 35219
  peptide (1)..(214): Ceres Seq. ID no. 5678520
  misc_feature (82)..(161): Pfam Name: Acetyltransferase (GNAT) family Pfam Description: Acetyltransferase (GNAT) family
  misc_feature (1)..(214): Homolog of NCBI NO: 18395874 NR Description: Expressed protein; protein id: At2g04845.1, by cDNA: 21909. [Arabidopsis thaliana]
  misc_feature (1)..(214): Homolog of NCBI NO: 21554294 NR Description: unknown [Arabidopsis thaliana]
  misc_feature (9)..(171): Homolog of NCBI NO: 24414273 NR Description: Unknown protein [Oryza sativa (japonica
  misc_feature (1)..(193): Homolog of NCBI NO: 13278945 NR Description: DKFZP564C103 protein [Homo sapiens]
  misc_feature (1)..(193): Homolog of NCBI NO: 7512719 NR Description: hypothetical protein DKFZp564C103.1 - human
  misc_feature (1)..(193): Homolog of NCBI NO: 31542521 NR Description: DKFZP564C103 protein [Homo sapiens]
  misc_feature (7)..(188): Homolog of NCBI NO: 13384782 NR Description: RIKEN cDNA 1110028N05 [Mus musculus] unnamed protein product [Mus musculus] RIKEN cDNA 1110028N05 gene [Mus musculus]
  misc_feature (7)..(188): Homolog of NCBI NO: 34875069 NR Description: similar to RIKEN cDNA 1110028N05 [Rattus
  misc_feature (1)..(177): Homolog of NCBI NO: 39584036 NR Description: Hypothetical protein CBG11716 [Caenorhabditis
  misc_feature (9)..(179): Homolog of NCBI NO: 24651688 NR Description: CG11539-PA [Drosophila melanogaster]

SEQ ID NO: 74598 - DNA, 1509 bp, Arabidopsis thaliana
  misc_feature (1)..(1509): Ceres Seq. ID no. 5678521
  misc_feature: MA Experiment ID: 108435 Result: Down-regulated in Transcription
  misc_feature: MA Experiment 108435 PARAMETER Experiment Name: At_stm_Mutants_cDNA_P Parameter: Plant Line Value: wt Landsburg vs stm
  misc_feature: MA Experiment 108435 PARAMETER Experiment Name: At_stm_Mutants_cDNA_P Parameter: Tissue Value: Shoot Apical Meristem Region
  misc_feature: MA Experiment ID: 108463 Result: Up-regulated in Transcription
  misc_feature: MA Experiment 108463 PARAMETER Experiment Name: At_Germinating_Seeds_cDNA_P Parameter: Age (day) Value: 3 vs. 0
  misc_feature: MA Experiment 108463 PARAMETER Experiment Name: At_Germinating_Seeds_cDNA_P Parameter: Tissue Value: Germinating Seeds
  misc_feature: MA Experiment ID: 108464 Result: Up-regulated in Transcription
  misc_feature: MA Experiment 108464 PARAMETER Experiment Name: At_Germinating_Seeds_cDNA_P Parameter: Age (day) Value: 4 vs. 0
  misc_feature: MA Experiment 108464 PARAMETER Experiment Name: At_Germinating_Seeds_cDNA_P Parameter: Tissue Value: Germinating Seeds
  misc_feature: MA Experiment ID: 108488 Result: Down-regulated in Transcription
  misc_feature: MA Experiment ID: 108501 Result: Down-regulated in Transcription
  misc_feature: MA Experiment 108501 PARAMETER Experiment Name: At_ap2_floral_buds_cDNA_P Parameter: Plant Line Value: ap2 (Ler.)
  misc_feature: MA Experiment 108501 PARAMETER Experiment Name: At_ap2_floral_buds_cDNA_P Parameter: Tissue Value: Closed Flower
  misc_feature: MA Experiment ID: 108561 Result: Up-regulated in Transcription
  misc_feature: MA Experiment 108561 PARAMETER Experiment Name: At_100uM_ABA_cDNA_P Parameter: Timepoint (hr) Value: 6
  misc_feature: MA Experiment 108561 PARAMETER Experiment Name: At_100uM_ABA_cDNA_P Parameter: Tissue Value: Aerial
  misc_feature: MA Experiment 108561 PARAMETER Experiment Name: At_100uM_ABA_cDNA_P Parameter: Treatment Value: 100uM ABA vs. No Treatment
  misc_feature: MA Experiment ID: 108572 Result: Up-regulated in Transcription
  misc_feature: MA Experiment 108572 PARAMETER Experiment Name: At_Drought_cDNA_P Parameter: Timepoint (hr) Value: 1
  misc_feature: MA Experiment 108572 PARAMETER Experiment Name: At_Drought_cDNA_P Parameter: Tissue Value: Aerial
  misc_feature: MA Experiment 108572 PARAMETER Experiment Name: At_Drought_cDNA_P Parameter: Treatment Value: Drought vs. No Drought
  misc_feature: MA Experiment ID: 108573 Result: Up-regulated in Transcription
  misc_feature: MA Experiment 108573 PARAMETER Experiment Name: At_Drought_cDNA_P Parameter: Timepoint (hr) Value: 6
  misc_feature: MA Experiment 108573 PARAMETER Experiment Name: At_Drought_cDNA_P Parameter: Tissue Value: Aerial
  misc_feature: MA Experiment 108573 PARAMETER Experiment Name: At_Drought_cDNA_P Parameter: Treatment Value: Drought vs. No Drought
  misc_feature: MA Experiment ID: 108574 Result: Down-regulated in Transcription
  misc_feature: MA Experiment 108574 PARAMETER Experiment Name: At_Wounding__cDNA_P Parameter: Timepoint (hr) Value: 1
  misc_feature: MA Experiment 108574 PARAMETER Experiment Name: At_Wounding__cDNA_P Parameter: Tissue Value: Aerial
  misc_feature: MA Experiment 108574 PARAMETER Experiment Name: At_Wounding__cDNA_P Parameter: Treatment Value: Wounding vs. No Wounding
  misc_feature: MA Experiment ID: 108579 Result: Down-regulated in Transcription
  misc_feature: MA Experiment 108579 PARAMETER Experiment Name: At_4deg_Cold_cDNA_P Parameter: Temperature (deg C) Value: 4 vs. 22
  misc_feature: MA Experiment 108579 PARAMETER Experiment Name: At_4deg_Cold_cDNA_P Parameter: Timepoint (hr) Value: 6
  misc_feature: MA Experiment 108579 PARAMETER Experiment Name: At_4deg_Cold_cDNA_P Parameter: Tissue Value: Aerial
  misc_feature: MA Experiment ID: 108585 Result: Up-regulated in Transcription
  misc_feature: MA Experiment 108585 PARAMETER Experiment Name: At_5mM_NaNP_cDNA_P Parameter: Timepoint (hr) Value: 6
  misc_feature: MA Experiment 108585 PARAMETER Experiment Name: At_5mM_NaNP_cDNA_P Parameter: Tissue Value: Aerial
  misc_feature: MA Experiment 108585 PARAMETER Experiment Name: At_5mM_NaNP_cDNA_P Parameter: Treatment Value: null
  misc_feature: MA Experiment ID: 108595 Result: Up-regulated in Transcription
  misc_feature: MA Experiment 108595 PARAMETER Experiment Name: At_Ler-pi_Ovule_cDNA_P Parameter: Plant Line Value: null
  misc_feature: MA Experiment ID: 108605 Result: Up-regulated in Transcription
  misc_feature: MA Experiment 108605 PARAMETER Experiment Name: At_100uM_ABA_cDNA_P Parameter: Timepoint (hr) Value: 6
  misc_feature: MA Experiment 108605 PARAMETER Experiment Name: At_100uM_ABA_cDNA_P Parameter: Tissue Value: Aerial
  misc_feature: MA Experiment 108605 PARAMETER Experiment Name: At_100uM_ABA_cDNA_P Parameter: Treatment Value: 100uM ABA vs. No Treatment
  misc_feature: MA Experiment ID: 108607 Result: Up-regulated in Transcription
  misc_feature: MA Experiment 108607 PARAMETER Experiment Name: At_100uM_ABA_cDNA_P Parameter: Timepoint (hr) Value: 4
  misc_feature: MA Experiment 108607 PARAMETER Experiment Name: At_100uM_ABA_cDNA_P Parameter: Tissue Value: Aerial
  misc_feature: MA Experiment 108607 PARAMETER Experiment Name: At_100uM_ABA_cDNA_P Parameter: Treatment Value: 100uM ABA vs. No Treatment
  misc_feature: MA Experiment ID: 20000069 Result: Up-regulated in Transcription
  misc_feature: MA Experiment 20000069 PARAMETER Experiment Name: At_100uM_ABA_Mutants_cDNA_P Parameter: Plant Line Value: CS23
  misc_feature: MA Experiment 20000069 PARAMETER Experiment Name: At_100uM_ABA_Mutants_cDNA_P Parameter: Timepoint (hr) Value: 6
  misc_feature: MA Experiment 20000069 PARAMETER Experiment Name: At_100uM_ABA_Mutants_cDNA_P Parameter: Tissue Value: Aerial
  misc_feature: MA Experiment 20000069 PARAMETER Experiment Name: At_100uM_ABA_Mutants_cDNA_P Parameter: Treatment Value: 100uM ABA vs. No Treatment
  misc_feature: MA Experiment ID: 20000070 Result: Up-regulated in Transcription
  misc_feature: MA Experiment 20000070 PARAMETER Experiment Name: At_100uM_ABA_Mutants_cDNA_P Parameter: Plant Line Value: CS24
  misc_feature: MA Experiment 20000070 PARAMETER Experiment Name: At_100uM_ABA_Mutants_cDNA_P Parameter: Timepoint (hr) Value: 6
  misc_feature: MA Experiment 20000070 PARAMETER Experiment Name: At_100uM_ABA_Mutants_cDNA_P Parameter: Tissue Value: Aerial
  misc_feature: MA Experiment 20000070 PARAMETER Experiment Name: At_100uM_ABA_Mutants_cDNA_P Parameter: Treatment Value: 100uM ABA vs. No Treatment
  misc_feature: MA Experiment ID: 20000071 Result: Up-regulated in Transcription
  misc_feature: MA Experiment 20000071 PARAMETER Experiment Name: At_100uM_ABA_Mutants_cDNA_P Parameter: Plant Line Value: CS8104
  misc_feature: MA Experiment 20000071 PARAMETER Experiment Name: At_100uM_ABA_Mutants_cDNA_P Parameter: Timepoint (hr) Value: 6
  misc_feature: MA Experiment 20000071 PARAMETER Experiment Name: At_100uM_ABA_Mutants_cDNA_P Parameter: Tissue Value: Aerial
  misc_feature: MA Experiment 20000071 PARAMETER Experiment Name: At_100uM_ABA_Mutants_cDNA_P Parameter: Treatment Value: 100uM ABA vs. No Treatment
  misc_feature: MA Experiment ID: 20000072 Result: Up-regulated in Transcription
  misc_feature: MA Experiment 20000072 PARAMETER Experiment Name: At_100uM_ABA_Mutants_cDNA_P Parameter: Plant Line Value: CS8105
  misc_feature: MA Experiment 20000072 PARAMETER Experiment Name: At_100uM_ABA_Mutants_cDNA_P Parameter: Timepoint (hr) Value: 6
  misc_feature: MA Experiment 20000072 PARAMETER Experiment Name: At_100uM_ABA_Mutants_cDNA_P Parameter: Tissue Value: Aerial
  misc_feature: MA Experiment 20000072 PARAMETER Experiment Name: At_100uM_ABA_Mutants_cDNA_P Parameter: Treatment Value: 100uM ABA vs. No Treatment
  misc_feature: MA Experiment ID: 20000086 Result: Up-regulated in Transcription
  misc_feature: MA Experiment 20000086 PARAMETER Experiment Name: At_100uM_ABA_Mutants_cDNA_P Parameter: Plant Line Value: CS22
  misc_feature: MA Experiment 20000086 PARAMETER Experiment Name: At_100uM_ABA_Mutants_cDNA_P Parameter: Timepoint (hr) Value: 6
  misc_feature: MA Experiment 20000086 PARAMETER Experiment Name: At_100uM_ABA_Mutants_cDNA_P Parameter: Tissue Value: Aerial
  misc_feature: MA Experiment 20000086 PARAMETER Experiment Name: At_100uM_ABA_Mutants_cDNA_P Parameter: Treatment Value: 100uM ABA vs. No Treatment
  misc_feature: MA Experiment ID: 20000087 Result: Up-regulated in Transcription
  misc_feature: MA Experiment 20000087 PARAMETER Experiment Name: At_100uM_ABA_Mutants_cDNA_P Parameter: Plant Line Value: WS
  misc_feature: MA Experiment 20000087 PARAMETER Experiment Name: At_100uM_ABA_Mutants_cDNA_P Parameter: Timepoint (hr) Value: 6
  misc_feature: MA Experiment 20000087 PARAMETER Experiment Name: At_100uM_ABA_Mutants_cDNA_P Parameter: Tissue Value: Aerial
  misc_feature: MA Experiment 20000087 PARAMETER Experiment Name: At_100uM_ABA_Mutants_cDNA_P Parameter: Treatment Value: 100uM ABA vs. No Treatment
  misc_feature: MA Experiment ID: 20000088 Result: Up-regulated in Transcription
  misc_feature: MA Experiment 20000088 PARAMETER Experiment Name: At_100uM_ABA_Mutants_cDNA_P Parameter: Plant Line Value: Landsberg
  misc_feature: MA Experiment 20000088 PARAMETER Experiment Name: At_100uM_ABA_Mutants_cDNA_P Parameter: Timepoint (hr) Value: 6
  misc_feature: MA Experiment 20000088 PARAMETER Experiment Name: At_100uM_ABA_Mutants_cDNA_P Parameter: Tissue Value: Aerial
  misc_feature: MA Experiment 20000088 PARAMETER Experiment Name: At_100uM_ABA_Mutants_cDNA_P Parameter: Treatment Value: 100uM ABA vs. No Treatment
  misc_feature: MA Experiment ID: 20000089 Result: Up-regulated in Transcription
  misc_feature: MA Experiment ID: 20000111 Result: Down-regulated in Transcription
  misc_feature: MA Experiment 20000111 PARAMETER Experiment Name: At_42deg_Heat_cDNA_P Parameter: Temperature (deg C) Value: 42 vs. 22
  misc_feature: MA Experiment 20000111 PARAMETER Experiment Name: At_42deg_Heat_cDNA_P Parameter: Timepoint (hr) Value: 6
  misc_feature: MA Experiment 20000111 PARAMETER Experiment Name: At_42deg_Heat_cDNA_P Parameter: Tissue Value: Aerial
  misc_feature: MA Experiment ID: 20000117 Result: Up-regulated in Transcription
  misc_feature: MA Experiment 20000117 PARAMETER Experiment Name: At_100uM_ABA_Mutants_cDNA_P Parameter: Plant Line Value: Columbia
  misc_feature: MA Experiment 20000117 PARAMETER Experiment Name: At_100uM_ABA_Mutants_cDNA_P Parameter: Timepoint (hr) Value: 6
  misc_feature: MA Experiment 20000117 PARAMETER Experiment Name: At_100uM_ABA_Mutants_cDNA_P Parameter: Tissue Value: Aerial
  misc_feature: MA Experiment 20000117 PARAMETER Experiment Name: At_100uM_ABA_Mutants_cDNA_P Parameter: Treatment Value: 100uM ABA vs. No Treatment
  misc_feature: MA Experiment ID: 20000169 Result: Up-regulated in Transcription
  misc_feature: MA Experiment 20000169 PARAMETER Experiment Name: At_100uM_ABA_P Parameter: Age (day) Value: 14
  misc_feature: MA Experiment 20000169 PARAMETER Experiment Name: At_100uM_ABA_P Parameter: Organism Value: A. thaliana
  misc_feature: MA Experiment 20000169 PARAMETER Experiment Name: At_100uM_ABA_P Parameter: Plant Line Value: WS
  misc_feature: MA Experiment 20000169 PARAMETER Experiment Name: At_100uM_ABA_P Parameter: Timepoint (hr) Value: 6
  misc_feature: MA Experiment 20000169 PARAMETER Experiment Name: At_100uM_ABA_P Parameter: Tissue Value: Aerial
  misc_feature: MA Experiment 20000169 PARAMETER Experiment Name: At_100uM_ABA_P Parameter: Treatment Value: 100uM ABA vs. No Treatment
  misc_feature: MA Experiment ID: 20000173 Result: Down-regulated in Transcription
  misc_feature: MA Experiment 20000173 PARAMETER Experiment Name: At_42deg_Heat_P Parameter: Age (day) Value: 14
  misc_feature: MA Experiment 20000173 PARAMETER Experiment Name: At_42deg_Heat_P Parameter: Organism Value: A. thaliana
  misc_feature: MA Experiment 20000173 PARAMETER Experiment Name: At_42deg_Heat_P Parameter: Plant Line Value: WS
  misc_feature: MA Experiment 20000173 PARAMETER Experiment Name: At_42deg_Heat_P Parameter: Temperature (deg C) Value: 42 vs. 22
  misc_feature: MA Experiment 20000173 PARAMETER Experiment Name: At_42deg_Heat_P Parameter: Timepoint (hr) Value: 6
  misc_feature: MA Experiment 20000173 PARAMETER Experiment Name: At_42deg_Heat_P Parameter: Tissue Value: Aerial
  misc_feature: MA Experiment ID: 20000180 Result: Up-regulated in Transcription
  misc_feature: MA Experiment 20000180 PARAMETER Experiment Name: At_Germinating_Seeds_P Parameter: Age (hr) Value: 24 vs. 0
  misc_feature: MA Experiment 20000180 PARAMETER Experiment Name: At_Germinating_Seeds_P Parameter: Tissue Value: Germinating Seeds
  misc_feature: MA Experiment ID: 20000184 Result: Down-regulated in Transcription
  misc_feature: MA Experiment 20000184 PARAMETER Experiment Name: At_Shoots__P Parameter: Age (day) Value: 7
  misc_feature: MA Experiment 20000184 PARAMETER Experiment Name: At_Shoots__P Parameter: Tissue Value: Shoots vs. Whole Plant
  misc_feature: MA Experiment ID: 20000185 Result: Down-regulated in Transcription
  misc_feature: MA Experiment 20000185 PARAMETER Experiment Name: At_Roots__P Parameter: Age (day) Value: 7 vs. 21
  misc_feature: MA Experiment 20000185 PARAMETER Experiment Name: At_Roots__P Parameter: Organism Value: A. thaliana
  misc_feature: MA Experiment 20000185 PARAMETER Experiment Name: At_Roots__P Parameter: Tissue Value: Roots vs. Whole Plant
  misc_feature: MA Experiment ID: 20000214 Result: Down-regulated in Transcription
  misc_feature: MA Experiment 20000214 PARAMETER Experiment Name: At_4deg_Cold_P Parameter: Timepoint (hr) Value: 6
  misc_feature: MA Experiment ID: 20000224 Result: Down-regulated in Transcription
  misc_feature: MA Experiment ID: 20000234 Result: Down-regulated in Transcription
  misc_feature: MA Experiment 20000234 PARAMETER Experiment Name: At_Siliques_P Parameter: Age (day) Value: 21
  misc_feature: MA Experiment 20000234 PARAMETER Experiment Name: At_Siliques_P Parameter: Organism Value: A. thaliana
  misc_feature: MA Experiment 20000234 PARAMETER Experiment Name: At_Siliques_P Parameter: Plant Line Value: WS
  misc_feature: MA Experiment 20000234 PARAMETER Experiment Name: At_Siliques_P Parameter: Tissue Value: Less Than 5mm Siliques vs. Whole Plant
  misc_feature: MA Experiment ID: 20000436 Result: Up-regulated in Transcription
  misc_feature: MA Experiment 20000436 PARAMETER Experiment Name: At_Drought_P Parameter: Age (day) Value: 7
  misc_feature: MA Experiment 20000436 PARAMETER Experiment Name: At_Drought_P Parameter: Organism Value: A. thaliana
  misc_feature: MA Experiment 20000436 PARAMETER Experiment Name: At_Drought_P Parameter: Plant Line Value: WS
  misc_feature: MA Experiment 20000436 PARAMETER Experiment Name: At_Drought_P Parameter: Timepoint (hr) Value: 12
  misc_feature: MA Experiment 20000436 PARAMETER Experiment Name: At_Drought_P Parameter: Tissue Value: Whole Plant
  misc_feature: MA Experiment 20000436 PARAMETER Experiment Name: At_Drought_P Parameter: Treatment Value: Drought vs. No Drought
  misc_feature: MA Experiment ID: 20000437 Result: Up-regulated in Transcription
  misc_feature: MA Experiment 20000437 PARAMETER Experiment Name: At_Drought_P Parameter: Age (day) Value: 8
  misc_feature: MA Experiment 20000437 PARAMETER Experiment Name: At_Drought_P Parameter: Organism Value: A. thaliana
  misc_feature: MA Experiment 20000437 PARAMETER Experiment Name: At_Drought_P Parameter: Plant Line Value: WS
  misc_feature: MA Experiment 20000437 PARAMETER Experiment Name: At_Drought_P Parameter: Timepoint (hr) Value: 24
  misc_feature: MA Experiment 20000437 PARAMETER Experiment Name: At_Drought_P Parameter: Tissue Value: Whole Plant
  misc_feature: MA Experiment 20000437 PARAMETER Experiment Name: At_Drought_P Parameter: Treatment Value: Drought vs. No Drought
  misc_feature: MA Experiment ID: 20000438 Result: Down-regulated in Transcription
  misc_feature: MA Experiment 20000438 PARAMETER Experiment Name: At_Shoots__P Parameter: Age (day) Value: 14
  misc_feature: MA Experiment 20000438 PARAMETER Experiment Name: At_Shoots__P Parameter: Tissue Value: Shoots vs. Whole Plant
  misc_feature: MA Experiment ID: 20000439 Result: Down-regulated in Transcription
  misc_feature: MA Experiment 20000439 PARAMETER Experiment Name: At_Roots__P Parameter: Age (day) Value: 14 vs. 21
  misc_feature: MA Experiment 20000439 PARAMETER Experiment Name: At_Roots__P Parameter: Organism Value: A. thaliana
  misc_feature: MA Experiment 20000439 PARAMETER Experiment Name: At_Roots__P Parameter: Tissue Value: Roots vs. Whole Plant
  misc_feature: MA Experiment ID: 20000453 Result: Up-regulated in Transcription
  misc_feature: MA Experiment 20000453 PARAMETER Experiment Name: At_100uM_ABA_P Parameter: Age (day) Value: 15
  misc_feature: MA Experiment 20000453 PARAMETER Experiment Name: At_100uM_ABA_P Parameter: Organism Value: A. thaliana
  misc_feature: MA Experiment 20000453 PARAMETER Experiment Name: At_100uM_ABA_P Parameter: Plant Line Value: WS
  misc_feature: MA Experiment 20000453 PARAMETER Experiment Name: At_100uM_ABA_P Parameter: Timepoint (hr) Value: 24
  misc_feature: MA Experiment 20000453 PARAMETER Experiment Name: At_100uM_ABA_P Parameter: Tissue Value: Aerial
  misc_feature: MA Experiment 20000453 PARAMETER Experiment Name: At_100uM_ABA_P Parameter: Treatment Value: 100uM ABA vs. No Treatment
  misc_feature: MA Experiment ID: 20000573 Result: Up-regulated in Transcription
  misc_feature: MA Experiment 20000573 PARAMETER Experiment Name: At_100uM_ABA_Mutants__P Parameter: Organism Value: A. thaliana
  misc_feature: MA Experiment 20000573 PARAMETER Experiment Name: At_100uM_ABA_Mutants__P Parameter: Plant Line Value: CS22 vs. Ler wt
  misc_feature: MA Experiment 20000573 PARAMETER Experiment Name: At_100uM_ABA_Mutants__P Parameter: Timepoint (hr) Value: N/A
  misc_feature: MA Experiment 20000573 PARAMETER Experiment Name: At_100uM_ABA_Mutants__P Parameter: Tissue Value: Whole Plant
  misc_feature: MA Experiment 20000573 PARAMETER Experiment Name: At_100uM_ABA_Mutants__P Parameter: Treatment Value: None
  misc_feature: MA Experiment ID: 20000794 Result: Up-regulated in Transcription
  misc_feature: MA Experiment 20000794 PARAMETER Experiment Name: At_Petals_P Parameter: Age (day) Value: 23-25 days
  misc_feature: MA Experiment 20000794 PARAMETER Experiment Name: At_Petals_P Parameter: Plant Line Value: WS
  misc_feature: MA Experiment 20000794 PARAMETER Experiment Name: At_Petals_P Parameter: Tissue Value: Petals vs. Whole plant
  misc_feature: MA Experiment ID: 20001248 Result: Up-regulated in Transcription
  misc_feature: MA Experiment 20001248 PARAMETER Experiment Name: At_Far-red-induction_P Parameter: Age (day) Value: 7
  misc_feature: MA Experiment 20001248 PARAMETER Experiment Name: At_Far-red-induction_P Parameter: Light Value: Far-red vs. White
  misc_feature: MA Experiment 20001248 PARAMETER Experiment Name: At_Far-red-induction_P Parameter: Organism Value: A. thaliana
  misc_feature: MA Experiment 20001248 PARAMETER Experiment Name: At_Far-red-induction_P Parameter: Plant Line Value: Columbia
  misc_feature: MA Experiment 20001248 PARAMETER Experiment Name: At_Far-red-induction_P Parameter: Timepoint (hr) Value: 4
  misc_feature: MA Experiment 20001248 PARAMETER Experiment Name: At_Far-red-induction_P Parameter: Tissue Value: Whole Plant
  misc_feature: MA Experiment ID: 20001450 Result: Up-regulated in Transcription
  misc_feature: MA Experiment 20001450 PARAMETER Experiment Name: At_Far-red-induction_P Parameter: Age (day) Value: 7
  misc_feature: MA Experiment 20001450 PARAMETER Experiment Name: At_Far-red-induction_P Parameter: Light Value: Far-red vs. White
  misc_feature: MA Experiment 20001450 PARAMETER Experiment Name: At_Far-red-induction_P Parameter: Organism Value: A. thaliana
  misc_feature: MA Experiment 20001450 PARAMETER Experiment Name: At_Far-red-induction_P Parameter: Plant Line Value: Columbia
  misc_feature: MA Experiment 20001450 PARAMETER Experiment Name: At_Far-red-induction_P Parameter: Timepoint (hr) Value: 8
  misc_feature: MA Experiment 20001450 PARAMETER Experiment Name: At_Far-red-induction_P Parameter: Tissue Value: Whole Plant
  misc_feature: MA Experiment ID: 20001451 Result: Up-regulated in Transcription
  misc_feature: MA Experiment 20001451 PARAMETER Experiment Name: At_Far-red-induction_P Parameter: Age (day) Value: 7
  misc_feature: MA Experiment 20001451 PARAMETER Experiment Name: At_Far-red-induction_P Parameter: Light Value: Far-red vs. White
  misc_feature: MA Experiment 20001451 PARAMETER Experiment Name: At_Far-red-induction_P Parameter: Organism Value: A. thaliana
  misc_feature: MA Experiment 20001451 PARAMETER Experiment Name: At_Far-red-induction_P Parameter: Plant Line Value: Columbia
  misc_feature: MA Experiment 20001451 PARAMETER Experiment Name: At_Far-red-induction_P Parameter: Timepoint (hr) Value: 24
  misc_feature: MA Experiment 20001451 PARAMETER Experiment Name: At_Far-red-induction_P Parameter: Tissue Value: Whole Plant
  misc_feature: MA Experiment ID: 20001558 Result: Down-regulated in Transcription
  misc_feature: MA Experiment 20001558 PARAMETER Experiment Name: At_Drought_Soil_Dry_P Parameter: Age (day) Value: 27
  misc_feature: MA Experiment 20001558 PARAMETER Experiment Name: At_Drought_Soil_Dry_P Parameter: Organism Value: A. thaliana
  misc_feature: MA Experiment 20001558 PARAMETER Experiment Name: At_Drought_Soil_Dry_P Parameter: Plant Line Value: WS
  misc_feature: MA Experiment 20001558 PARAMETER Experiment Name: At_Drought_Soil_Dry_P Parameter: Post Timepoint (hr) Value: 6
  misc_feature: MA Experiment 20001558 PARAMETER Experiment Name: At_Drought_Soil_Dry_P Parameter: Post-Treatment Value: Re-Water vs. No Drought
  misc_feature: MA Experiment 20001558 PARAMETER Experiment Name: At_Drought_Soil_Dry_P Parameter: Timepoint (day) Value: 13
  misc_feature: MA Experiment 20001558 PARAMETER Experiment Name: At_Drought_Soil_Dry_P Parameter: Treatment Value: Drought vs. No Drought
  misc_feature: MA Experiment ID: 20001911 Result: Up-regulated in Transcription
  misc_feature: MA Experiment 20001911 PARAMETER Experiment Name: At_Drought_Reproduction_P Parameter: Age (day) Value: 40
  misc_feature: MA Experiment 20001911 PARAMETER Experiment Name: At_Drought_Reproduction_P Parameter: Organism Value: A. thaliana
  misc_feature: MA Experiment 20001911 PARAMETER Experiment Name: At_Drought_Reproduction_P Parameter: Plant Line Value: WS
  misc_feature: MA Experiment 20001911 PARAMETER Experiment Name: At_Drought_Reproduction_P Parameter: Timepoint (day) Value: 10
  misc_feature: MA Experiment 20001911 PARAMETER Experiment Name: At_Drought_Reproduction_P Parameter: Tissue Value: Flowers
  misc_feature: MA Experiment 20001911 PARAMETER Experiment Name: At_Drought_Reproduction_P Parameter: Treatment Value: Drought vs. No Drought
acctgtagtttcttcttctgaaaatcagcaacaaactacaaatcatccaatgatagaatttcagctttaattatcaaacaaattaaagataaccccattgataatatcgccacgtctcatcggatgaaatagtactatctgacacgacacgaatctcttatgagagaaacagaagagcacggaatctccataaatcaaaatacatgatcggagctttctcactatcaaaagctttccggcgacaaaaccaaccatctcctccttatctccaccatgatctcactccactcatcagccattaaagcctctctctacggctctttcccttcttcgttacgatcaacactctctgtttccttctctgctggatctcttattcggcttccttccgtcggcaagcgcaatctctccgtcgtcgtttcctctggaagagactcctcgatgtcatcaaacaatgtttctcgcggatcgtcttcaaaggttgctgctgaatctttcttcaggagtgtcttagggcagatggaaactgtttacctaaatcgaaacccgacgcctaaatccgtcttggagcttgttcgatctgttgatgaccagcaactttgctatgatcatctcgctttcagaacgtttgggattggtggttatgggattgactcgcttgcaagctttttccttgactatggatatacaccgatggatgagctaaaatttccggccaaaaagcttagagctttgtggtttgcacctcctaatgcttctgctgttcctggtggcagcggcgttaacggtcctttaccgagagtttttatctcagagctcctggtggaccagatgagttcacagactcaggatgtaatcagaaaatacacggaagcatcacctaatgggaaaaagtatgctggactttctagtgctttgggtactttaacttgggaaaagcctctatcttctgagtttgagcaattggctagggaaagtgaatacgcagcatggacccttgtcaatggatatgcacttaaccacgtcacgatttctgttcatcggcttaaatctcatctaaacaaaatcaagaagctcaatcagttcctcgaagaaaaaggtatcaaattgaactcagaaggaggagtccttaaagttagccctgatggtggtttgcagcaaagctcaactgtagcagattcgatatctttcaagttcgctgatggtgttaccaaatctatcccttgttcatacattgagtttgctgaacgccttgtacttccgcagtaccaaaatatacccgaaagcgagatacaagagtctcatcgacgtgatggatttgaggtcggaaatgctgacaagatcttcgagagcacatttcaggagcagctttcccgacgaaccgggtgatagcaaatagtagccacggctttggatatatgtcaatcatgcctcgtacatgtgtaacgagtaaaaagctcaaaactgcttgtaatcttgatcagtaaagatgctaatccaagaactctt

SEQ ID NO: 74599 - protein, 371 aa, Arabidopsis thaliana; identical to SEQ ID NO: 23452
  peptide (1)..(371): Ceres Seq. ID no. 5678522
  misc_feature (1)..(371): Homolog of NCBI NO: 18390717 NR Description: expressed protein; protein id: At1g07040.1, by cDNA: 36434. [Arabidopsis thaliana] >gi|25406951|pir||B86205
  misc_feature (72)..(370): Homolog of NCBI NO: 37535166 NR Description: unknown protein [Oryza sativa (japonica
  misc_feature (57)..(361): Homolog of NCBI NO: 18396149 NR Description: expressed protein; protein id: At1g27030.1, by cDNA: gi_14517457 [Arabidopsis thaliana] T7N9.9 [Arabidopsis thaliana] >gi|14517458|gb|AAK62619.1|
  misc_feature (57)..(361): Homolog of NCBI NO: 15223410 NR Description: unknown protein; protein id: At1g27020.1
  misc_feature (146)..(370): Homolog of NCBI NO: 22973852 NR Description: hypothetical protein [Chloroflexus aurantiacus]
  misc_feature (87)..(361): Homolog of NCBI NO: 28899568 NR Description: conserved hypothetical protein [Vibrio RIMD 2210633] >gi|28807804|dbj|BAC61057.1| conserved hypothetical
  misc_feature (87)..(336): Homolog of NCBI NO: 15642610 NR Description: conserved hypothetical protein [Vibrio cholerae]
  misc_feature (87)..(326): Homolog of NCBI NO: 27364716 NR Description: Conserved hypothetical protein [Vibrio vulnificus >gi|27360861|gb|AAO09771.1|AE016801_90 Conserved hypothetical
  misc_feature (87)..(361): Homolog of NCBI NO: 24372211 NR Description: conserved hypothetical protein [Shewanella MR-1] >gi|24346126|gb|AAN53698.1|AE015509_3 conserved
  misc_feature (109)..(326): Homolog of NCBI NO: 37523419 NR Description: hypothetical protein glr3850 [Gloeobacter

SEQ ID NO: 74600 - protein, 315 aa, Arabidopsis thaliana; identical to SEQ ID NO: 23453
  peptide (1)..(315): Ceres Seq. ID no. 5678523
  misc_feature (1)..(315): Homolog of NCBI NO: 18390717 NR Description: expressed protein; protein id: At1g07040.1, by cDNA: 36434. [Arabidopsis thaliana] >gi|25406951|pir||B86205
  misc_feature (16)..(314): Homolog of NCBI NO: 37535166 NR Description: unknown protein [Oryza sativa (japonica
  misc_feature (1)..(305): Homolog of NCBI NO: 18396149 NR Description: expressed protein; protein id: At1g27030.1, by cDNA: gi_14517457 [Arabidopsis thaliana] T7N9.9 [Arabidopsis thaliana] >gi|14517458|gb|AAK62619.1|
  misc_feature (1)..(305): Homolog of NCBI NO: 15223410 NR Description: unknown protein; protein id: At1g27020.1
  misc_feature (90)..(314): Homolog of NCBI NO: 22973852 NR Description: hypothetical protein [Chloroflexus aurantiacus]
  misc_feature (31)..(305): Homolog of NCBI NO: 28899568 NR Description: conserved hypothetical protein [Vibrio RIMD 2210633] >gi|28807804|dbj|BAC61057.1| conserved hypothetical
  misc_feature (31)..(280): Homolog of NCBI NO: 15642610 NR Description: conserved hypothetical protein [Vibrio cholerae]
  misc_feature (31)..(270): Homolog of NCBI NO: 27364716 NR Description: Conserved hypothetical protein [Vibrio vulnificus >gi|27360861|gb|AAO09771.1|AE016801_90 Conserved hypothetical
  misc_feature (31)..(305): Homolog of NCBI NO: 24372211 NR Description: conserved hypothetical protein [Shewanella MR-1] >gi|24346126|gb|AAN53698.1|AE015509_3 conserved
  misc_feature (53)..(270): Homolog of NCBI NO: 37523419 NR Description: hypothetical protein glr3850 [Gloeobacter

SEQ ID NO: 74601 - protein, 289 aa, Arabidopsis thaliana; identical to SEQ ID NO: 23454
  peptide (1)..(289): Ceres Seq. ID no. 5678524
  misc_feature (1)..(289): Homolog of NCBI NO: 18390717 NR Description: expressed protein; protein id: At1g07040.1, by cDNA: 36434. [Arabidopsis thaliana] >gi|25406951|pir||B86205
  misc_feature (1)..(288): Homolog of NCBI NO: 37535166 NR Description: unknown protein [Oryza sativa (japonica
  misc_feature (1)..(279): Homolog of NCBI NO: 18396149 NR Description: expressed protein; protein id: At1g27030.1, by cDNA: gi_14517457 [Arabidopsis thaliana] T7N9.9 [Arabidopsis thaliana] >gi|14517458|gb|AAK62619.1|
  misc_feature (1)..(279): Homolog of NCBI NO: 15223410 NR Description: unknown protein; protein id: At1g27020.1
  misc_feature (64)..(288): Homolog of NCBI NO: 22973852 NR Description: hypothetical protein [Chloroflexus aurantiacus]
  misc_feature (5)..(279): Homolog of NCBI NO: 28899568 NR Description: conserved hypothetical protein [Vibrio RIMD 2210633] >gi|28807804|dbj|BAC61057.1| conserved hypothetical
  misc_feature (5)..(254): Homolog of NCBI NO: 15642610 NR Description: conserved hypothetical protein [Vibrio cholerae]
  misc_feature (5)..(244): Homolog of NCBI NO: 27364716 NR Description: Conserved hypothetical protein [Vibrio vulnificus >gi|27360861|gb|AAO09771.1|AE016801_90 Conserved hypothetical
  misc_feature (5)..(279): Homolog of NCBI NO: 24372211 NR Description: conserved hypothetical protein [Shewanella MR-1] >gi|24346126|gb|AAN53698.1|AE015509_3 conserved
  misc_feature (27)..(244): Homolog of NCBI NO: 37523419 NR Description: hypothetical protein glr3850 [Gloeobacter

SEQ ID NO: 74602 - DNA, 1664 bp, Arabidopsis thaliana
  misc_feature (1)..(1664): Ceres Seq. ID no. 5678525
  misc_feature: MA Experiment ID: 108433 Result: Down-regulated in Transcription
  misc_feature: MA Experiment 108433 PARAMETER Experiment Name: At_rhl_Mutant2_cDNA_P Parameter: Age (day) Value: 7
  misc_feature: MA Experiment 108433 PARAMETER Experiment Name: At_rhl_Mutant2_cDNA_P Parameter: Organism Value: A. thaliana
  misc_feature: MA Experiment 108433 PARAMETER Experiment Name: At_rhl_Mutant2_cDNA_P Parameter: Plant Line Value: rhl Mutant vs. wt landsburg
  misc_feature: MA Experiment 108433 PARAMETER Experiment Name: At_rhl_Mutant2_cDNA_P Parameter: Tissue Value: Roots
  misc_feature: MA Experiment ID: 108461 Result: Down-regulated in Transcription
  misc_feature: MA Experiment 108461 PARAMETER Experiment Name: At_Germinating_Seeds_cDNA_P Parameter: Age (day) Value: 1 vs. 0
  misc_feature: MA Experiment 108461 PARAMETER Experiment Name: At_Germinating_Seeds_cDNA_P Parameter: Tissue Value: Germinating Seeds
  misc_feature: MA Experiment ID: 108462 Result: Down-regulated in Transcription
  misc_feature: MA Experiment 108462 PARAMETER Experiment Name: At_Germinating_Seeds_cDNA_P Parameter: Age (day) Value: 2 vs. 0
  misc_feature: MA Experiment 108462 PARAMETER Experiment Name: At_Germinating_Seeds_cDNA_P Parameter: Tissue Value: Germinating Seeds
  misc_feature: MA Experiment ID: 108464 Result: Down-regulated in Transcription
  misc_feature: MA Experiment 108464 PARAMETER Experiment Name: At_Germinating_Seeds_cDNA_P Parameter: Age (day) Value: 4 vs. 0
  misc_feature: MA Experiment 108464 PARAMETER Experiment Name: At_Germinating_Seeds_cDNA_P Parameter: Tissue Value: Germinating Seeds
  misc_feature: MA Experiment ID: 108585 Result: Up-regulated in Transcription
  misc_feature: MA Experiment 108585 PARAMETER Experiment Name: At_5mM_NaNP_cDNA_P Parameter: Timepoint (hr) Value: 6
  misc_feature: MA Experiment 108585 PARAMETER Experiment Name: At_5mM_NaNP_cDNA_P Parameter: Tissue Value: Aerial
  misc_feature: MA Experiment 108585 PARAMETER Experiment Name: At_5mM_NaNP_cDNA_P Parameter: Treatment Value: null
  misc_feature: MA Experiment ID: 108668 Result: Up-regulated in Transcription
  misc_feature: MA Experiment 108668 PARAMETER Experiment Name: At_2mM_SA_cDNA_P Parameter: Plant Line Value: WS
  misc_feature: MA Experiment 108668 PARAMETER Experiment Name: At_2mM_SA_cDNA_P Parameter: Timepoint (hr) Value: 6
  misc_feature: MA Experiment 108668 PARAMETER Experiment Name: At_2mM_SA_cDNA_P Parameter: Treatment Value: 2mM SA vs. No Treatment
  misc_feature: MA Experiment ID: 20000182 Result: Up-regulated in Transcription
  misc_feature: MA Experiment 20000182 PARAMETER Experiment Name: At_2mM_SA_P Parameter: Age (day) Value: 14
  misc_feature: MA Experiment 20000182 PARAMETER Experiment Name: At_2mM_SA_P Parameter: Organism Value: A. thaliana
  misc_feature: MA Experiment 20000182 PARAMETER Experiment Name: At_2mM_SA_P Parameter: Plant Line Value: WS
  misc_feature: MA Experiment 20000182 PARAMETER Experiment Name: At_2mM_SA_P Parameter: Timepoint (hr) Value: 6
  misc_feature: MA Experiment 20000182 PARAMETER Experiment Name: At_2mM_SA_P Parameter: Tissue Value: Aerial
  misc_feature: MA Experiment 20000182 PARAMETER Experiment Name: At_2mM_SA_P Parameter: Treatment Value: 2mM SA vs. No Treatment
  misc_feature: MA Experiment ID: 20000184 Result: Down-regulated in Transcription
  misc_feature: MA Experiment 20000184 PARAMETER Experiment Name: At_Shoots__P Parameter: Age (day) Value: 7
  misc_feature: MA Experiment 20000184 PARAMETER Experiment Name: At_Shoots__P Parameter: Tissue Value: Shoots vs. Whole Plant
  misc_feature: MA Experiment ID: 20000286 Result: Up-regulated in Transcription
  misc_feature: MA Experiment 20000286 PARAMETER Experiment Name: At_Open_Flower_P Parameter: Age (day) Value: 21
  misc_feature: MA Experiment 20000286 PARAMETER Experiment Name: At_Open_Flower_P Parameter: Plant Line Value: WS
  misc_feature: MA Experiment 20000286 PARAMETER Experiment Name: At_Open_Flower_P Parameter: Tissue Value: Half Open vs. Whole Plant
  misc_feature: MA Experiment ID: 20000438 Result: Down-regulated in Transcription
  misc_feature: MA Experiment 20000438 PARAMETER Experiment Name: At_Shoots__P Parameter: Age (day) Value: 14
  misc_feature: MA Experiment 20000438 PARAMETER Experiment Name: At_Shoots__P Parameter: Tissue Value: Shoots vs. Whole Plant
  misc_feature: MA Experiment ID: 20000495 Result: Up-regulated in Transcription
  misc_feature: MA Experiment 20000495 PARAMETER Experiment Name: At_Guard_Cells_P Parameter: Harvest Date Value: 8/2/2002
  misc_feature: MA Experiment 20000495 PARAMETER Experiment Name: At_Guard_Cells_P Parameter: Organism Value: A. thaliana
  misc_feature: MA Experiment 20000495 PARAMETER Experiment Name: At_Guard_Cells_P Parameter: Tissue Value: Guard Cells vs. Leaves
aaacagagaaaacaaaaaaatgaaaggaaagtagaaaaaagagaaaaagttttgcagaaggaagaaaaagaaaaagaagagaaaaaatgggtcttcgtctccgtcttcgtctccctcacaaaagctctcctcgttcaccttcctatctccttctctgtgttcttgctctatccttcttctccttcaccgctcttcttttctacaaggttgacgactttatagctcagacaaaaactctggccggacataacttggaaccaacaccgtggcatatcttcccacgcaaatctttcagcgcagctacgaaacattctcaggcttaccgaatcctccagtgctcctacttctcatgtccgtacaaagccgtcgtccaaccaaagagtctccactcggaatctgggtcgggtcgtcaaacccatcaaccacaatgcccagacttcttcagccaggtggattcaccgggatttagagccgtgggcaaagactggggtgactaaagagcacgtgaagagggcaaaagcgaatgctgcgtttcgagtggtgatactatcagggaagttatacgtggatctctattacgcatgtgtgcagagcagaatgatgttcaccatttgggggattctgcaactgctcaccaagtatccagggatggttcctgatgtcgacatgatgtttgattgtatggacaaacccatcatcaaccagaccgagtaccagtcctttcctgttccgctttttcgatattgcaccaacgaagctcatttggacattccttttccggattggtcgttttggggatggtcggagacaaatctaaggccctgggaagaagagtttggggatataaagcaagggtctaggagaagaagttggtacaacaagcaacctagagcttactggaaaggcaatcccgatgttgtatcgcctatacgactggagctcatgaaatgcaaccattcaaggttatggggagcacagattatgcgccaggactgggcagaagaagcaaaaggtgggtttgagcaatccaagctttccaaccaatgcaatcaccggtacaaaatctatgcagaaggttatgcgtggtcagtttctctaaagtatatcttatcatgtggttccatgacactcataatatcacctgagtatgaagatttcttcagtagaggcctccttcccaaggaaaattactggcctatctctcccactgatctatgtcggtccatcaaatacgctgttgattggggaaattccaacccctctgaagctgaaacaattggaaaaagaggacagggttatatggaaagccttagcatgaaccgggtttatgactatatgtttcatctcatcactgagtactcgaaacttcagaagttcaagccagagaagccggcttccgctaatgaagtctgtgcaggatcattgctctgcattgcagaacaaaaagagcgggaactactcgaaagatccagagtcgtaccttctctggatcaaccatgtaaatttccagtagaagataggaataggcttgagtggttgatccaacagaagaataaaacaatcgaaaatgttagatacatggagatgacaagaacacagaggggttctaaatgaattgtctttttagggacatgaatttttggtgtatcctctctctttttttg

SEQ ID NO: 74603 - protein, 338 aa, Arabidopsis thaliana; identical to SEQ ID NO: 43646
  peptide (1)..(338): Ceres Seq. ID no. 5678526
  misc_feature (1)..(334): Pfam Name: Arabidopsis thaliana protein of unknown function Pfam Description: Arabidopsis thaliana protein of unknown
  misc_feature (1)..(338): Homolog of NCBI NO: 15222341 NR Description: hypothetical protein; protein id: At1g07220.1
  misc_feature (1)..(329): Homolog of NCBI NO: 15237842 NR Description: putative protein; protein id: At5g23850.1 thaliana] >gi|10176852|dbj|BAB10058.1| contains similarity to
  misc_feature (1)..(338): Homolog of NCBI NO: 15229061 NR Description: putative protein; protein id: At3g48980.1
  misc_feature (1)..(335): Homolog of NCBI NO: 15222413 NR Description: hypothetical protein; protein id: At1g63420.1
  misc_feature (1)..(329): Homolog of NCBI NO: 7486461 NR Description: hypothetical protein At2g45830 [imported] - thaliana >gi|3386611|gb|AAC28541.1| unknown protein [Arabidopsis
  misc_feature (1)..(329): Homolog of NCBI NO: 15233070 NR Description: putative protein; protein id: At3g61270.1
  misc_feature (1)..(329): Homolog of NCBI NO: 21742339 NR Description: OSJNBb0020O11.18 [Oryza sativa (japonica
  misc_feature (1)..(329): Homolog of NCBI NO: 38346998 NR Description: OSJNBb0039L24.21 [Oryza sativa (japonica
  misc_feature (140)..(335): Homolog of NCBI NO: 25404907 NR Description: protein F2K11.20 [imported] - Arabidopsis >gi|6633846|gb|AAF19705.1|AC008047_12 F2K11.20 [Arabidopsis
  misc_feature (1)..(131): Homolog of NCBI NO: 25404907 NR Description: protein F2K11.20 [imported] - Arabidopsis >gi|6633846|gb|AAF19705.1|AC008047_12 F2K11.20 [Arabidopsis

SEQ ID NO: 74604 - protein, 337 aa, Arabidopsis thaliana; identical to SEQ ID NO: 43647
  peptide (1)..(337): Ceres Seq. ID no. 5678527
  misc_feature (1)..(333): Pfam Name: Arabidopsis thaliana protein of unknown function Pfam Description: Arabidopsis thaliana protein of unknown
  misc_feature (1)..(337): Homolog of NCBI NO: 15222341 NR Description: hypothetical protein; protein id: At1g07220.1
  misc_feature (1)..(328): Homolog of NCBI NO: 15237842 NR Description: putative protein; protein id: At5g23850.1 thaliana] >gi|10176852|dbj|BAB10058.1| contains similarity to
  misc_feature (1)..(337): Homolog of NCBI NO: 15229061 NR Description: putative protein; protein id: At3g48980.1
  misc_feature (1)..(334): Homolog of NCBI NO: 15222413 NR Description: hypothetical protein; protein id: At1g63420.1
  misc_feature (1)..(328): Homolog of NCBI NO: 7486461 NR Description: hypothetical protein At2g45830 [imported] - thaliana >gi|3386611|gb|AAC28541.1| unknown protein [Arabidopsis
  misc_feature (1)..(328): Homolog of NCBI NO: 15233070 NR Description: putative protein; protein id: At3g61270.1
  misc_feature (1)..(328): Homolog of NCBI NO: 21742339 NR Description: OSJNBb0020O11.18 [Oryza sativa (japonica
  misc_feature (1)..(328): Homolog of NCBI NO: 38346998 NR Description: OSJNBb0039L24.21 [Oryza sativa (japonica
  misc_feature (139)..(334): Homolog of NCBI NO: 25404907 NR Description: protein F2K11.20 [imported] - Arabidopsis >gi|6633846|gb|AAF19705.1|AC008047_12 F2K11.20 [Arabidopsis
  misc_feature (1)..(130): Homolog of NCBI NO: 25404907 NR Description: protein F2K11.20 [imported] - Arabidopsis >gi|6633846|gb|AAF19705.1|AC008047_12 F2K11.20 [Arabidopsis

SEQ ID NO: 74605 - protein, 321 aa, Arabidopsis thaliana; identical to SEQ ID NO: 43648
  peptide (1)..(321): Ceres Seq. ID no. 5678528
  misc_feature (1)..(317): Pfam Name: Arabidopsis thaliana protein of unknown function Pfam Description: Arabidopsis thaliana protein of unknown
  misc_feature (1)..(321): Homolog of NCBI NO: 15222341 NR Description: hypothetical protein; protein id: At1g07220.1
  misc_feature (1)..(312): Homolog of NCBI NO: 15237842 NR Description: putative protein; protein id: At5g23850.1 thaliana] >gi|10176852|dbj|BAB10058.1| contains similarity to
  misc_feature (1)..(321): Homolog of NCBI NO: 15229061 NR Description: putative protein; protein id: At3g48980.1
  misc_feature (1)..(318): Homolog of NCBI NO: 15222413 NR Description: hypothetical protein; protein id: At1g63420.1
  misc_feature (1)..(312): Homolog of NCBI NO: 7486461 NR Description: hypothetical protein At2g45830 [imported] - thaliana >gi|3386611|gb|AAC28541.1| unknown protein [Arabidopsis
  misc_feature (1)..(312): Homolog of NCBI NO: 15233070 NR Description: putative protein; protein id: At3g61270.1
  misc_feature (1)..(312): Homolog of NCBI NO: 21742339 NR Description: OSJNBb0020O11.18 [Oryza sativa (japonica
  misc_feature (1)..(312): Homolog of NCBI NO: 38346998 NR Description: OSJNBb0039L24.21 [Oryza sativa (japonica
  misc_feature (123)..(318): Homolog of NCBI NO: 25404907 NR Description: protein F2K11.20 [imported] - Arabidopsis >gi|6633846|gb|AAF19705.1|AC008047_12 F2K11.20 [Arabidopsis
  misc_feature (1)..(114): Homolog of NCBI NO: 25404907 NR Description: protein F2K11.20 [imported] - Arabidopsis >gi|6633846|gb|AAF19705.1|AC008047_12 F2K11.20 [Arabidopsis

SEQ ID NO: 74606 - DNA, 609 bp, Arabidopsis thaliana
  misc_feature (1)..(609): Ceres Seq. ID no. 5678537
  misc_feature: MA Experiment ID: 108434 Result: Up-regulated in Transcription
  misc_feature: MA Experiment 108434 PARAMETER Experiment Name: At_Root_Tips_cDNA_P Parameter: Tissue Value: Root Tips
  misc_feature: MA Experiment ID: 108573 Result: Down-regulated in Transcription
  misc_feature: MA Experiment 108573 PARAMETER Experiment Name: At_Drought_cDNA_P Parameter: Timepoint (hr) Value: 6
  misc_feature: MA Experiment 108573 PARAMETER Experiment Name: At_Drought_cDNA_P Parameter: Tissue Value: Aerial
  misc_feature: MA Experiment 108573 PARAMETER Experiment Name: At_Drought_cDNA_P Parameter: Treatment Value: Drought vs. No Drought
  misc_feature: MA Experiment ID: 20000306 Result: Up-regulated in Transcription
  misc_feature: MA Experiment 20000306 PARAMETER Experiment Name: At_Germinating_Seeds_Sub_P Parameter: Age (hr) Value: 6 vs. 0
  misc_feature: MA Experiment 20000306 PARAMETER Experiment Name: At_Germinating_Seeds_Sub_P Parameter: Organism Value: A. thaliana
  misc_feature: MA Experiment 20000306 PARAMETER Experiment Name: At_Germinating_Seeds_Sub_P Parameter: Plant Line Value: WS
  misc_feature: MA Experiment 20000306 PARAMETER Experiment Name: At_Germinating_Seeds_Sub_P Parameter: Tissue Value: Germinating Seeds
  misc_feature: MA Experiment ID: 20000307 Result: Up-regulated in Transcription
  misc_feature: MA Experiment 20000307 PARAMETER Experiment Name: At_Germinating_Seeds_Sub_P Parameter: Age (hr) Value: 24 vs. 0
  misc_feature: MA Experiment 20000307 PARAMETER Experiment Name: At_Germinating_Seeds_Sub_P Parameter: Organism Value: A. thaliana
  misc_feature: MA Experiment 20000307 PARAMETER Experiment Name: At_Germinating_Seeds_Sub_P Parameter: Plant Line Value: WS
  misc_feature: MA Experiment 20000307 PARAMETER Experiment Name: At_Germinating_Seeds_Sub_P Parameter: Tissue Value: Germinating Seeds
  misc_feature: MA Experiment ID: 20000327 Result: Down-regulated in Transcription
  misc_feature: MA Experiment 20000327 PARAMETER Experiment Name: At_42deg_Heat_Sub_P Parameter: Age (day) Value: 14
  misc_feature: MA Experiment 20000327 PARAMETER Experiment Name: At_42deg_Heat_Sub_P Parameter: Organism Value: A. thaliana
  misc_feature: MA Experiment 20000327 PARAMETER Experiment Name: At_42deg_Heat_Sub_P Parameter: Plant Line Value: WS
  misc_feature: MA Experiment 20000327 PARAMETER Experiment Name: At_42deg_Heat_Sub_P Parameter: Temperature (deg C) Value: 42 vs. 22
  misc_feature: MA Experiment 20000327 PARAMETER Experiment Name: At_42deg_Heat_Sub_P Parameter: Timepoint (hr) Value: 1
  misc_feature: MA Experiment 20000327 PARAMETER Experiment Name: At_42deg_Heat_Sub_P Parameter: Tissue Value: Aerial
  misc_feature: Pfam Name: Histone Pfam Description: Core histone H2A/H2B/H3/H4
atatccgtcaaattcaattgatcctctctccaaatcatcttaaaatcacagatctttgggtatcaagtaaaactgtgaagtgatgtcgggaagaggaaagggaggaaaaggattgggaaagggaggagcgaagaggcacaggaaggttctgagggataacattcaaggaatcaccaagcctgccattcgtcgtcttgctcgtagaggtggtgtcaagcgtatcagtggtctcatctacgaagagaccagaggtgtcctcaagatcttcctcgagaatgtcatccgtgacgccgttacttacactgagcacgctagaaggaagacggtgaccgccatggatgttgtctacgctttgaagaggcaaggtcgtactctctacggtttcggaggttaatccgatttgggggattagggtttatgcaagtttggggatttcttcttgtttctgagatctgtgttaaatggtttgaattagtctaaagtaaatctaggagtgttagctactgcttttgttttctattgtgatgtcgttgttagccaatgcggtgtagttgaaaatctttgcaaacttaaagctaagaaaatctaatgaggatgaacaatttactc

SEQ ID NO: 74607 - protein, 103 aa, Arabidopsis thaliana; identical to SEQ ID NO: 7737
  peptide (1)..(103): Ceres Seq. ID no. 5678538
  misc_feature: Pfam Name: Histone Pfam Description: Core histone H2A/H2B/H3/H4
  misc_feature (1)..(103): Homolog of NCBI NO: 15226944 NR Description: histone H4; protein id: At2g28740.1, supported by
  misc_feature (1)..(103): Homolog of NCBI NO: 27692935 NR Description: Similar to germinal histone H4 gene [Mus musculus]
  misc_feature (1)..(103): Homolog of NCBI NO: 462243 NR Description: Histone H4 >gi|421921|pir||S32769 histone H4 - >gi|297150|emb|CAA48923.1| histone H4 [Lycopersicon esculentum] histone H4 [Lycopersicon esculentum] >gi|2746721|gb|AAB94924.1|
  misc_feature (1)..(103): Homolog of NCBI NO: 1806283 NR Description: Histone H4 homologue [Sesbania rostrata]
  misc_feature (1)..(103): Homolog of NCBI NO: 4504301 NR Description: H4 histone family, member A [Homo sapiens] H4 histone family, member B [Homo sapiens] H4 histone family, member C [Homo sapiens]
  misc_feature (1)..(103): Homolog of NCBI NO: 27692960 NR Description: Similar to germinal histone H4 gene [Mus musculus]
  misc_feature (1)..(103): Homolog of NCBI NO: 31197305 NR Description: ENSANGP00000016197 [Anopheles gambiae]
  misc_feature (1)..(103): Homolog of NCBI NO: 31212289 NR Description: ENSANGP00000015255 [Anopheles gambiae]
  misc_feature (1)..(103): Homolog of NCBI NO: 34858262 NR Description: similar to germinal histone H4 gene [Rattus
  misc_feature (1)..(103): Homolog of NCBI NO: 34876368 NR Description: similar to germinal histone H4 gene [Rattus

SEQ ID NO: 74608 - DNA, 386 bp, Arabidopsis thaliana
  misc_feature (1)..(386): Ceres Seq. ID no. 5678539
  misc_feature: MA Experiment ID: 108434 Result: Down-regulated in Transcription
  misc_feature: MA Experiment 108434 PARAMETER Experiment Name: At_Root_Tips_cDNA_P Parameter: Tissue Value: Root Tips
  misc_feature: MA Experiment ID: 108463 Result: Up-regulated in Transcription
  misc_feature: MA Experiment 108463 PARAMETER Experiment Name: At_Germinating_Seeds_cDNA_P Parameter: Age (day) Value: 3 vs. 0
  misc_feature: MA Experiment 108463 PARAMETER Experiment Name: At_Germinating_Seeds_cDNA_P Parameter: Tissue Value: Germinating Seeds
  misc_feature: MA Experiment ID: 108464 Result: Up-regulated in Transcription
  misc_feature: MA Experiment 108464 PARAMETER Experiment Name: At_Germinating_Seeds_cDNA_P Parameter: Age (day) Value: 4 vs. 0
  misc_feature: MA Experiment 108464 PARAMETER Experiment Name: At_Germinating_Seeds_cDNA_P Parameter: Tissue Value: Germinating Seeds
  misc_feature: MA Experiment ID: 108569 Result: Up-regulated in Transcription
  misc_feature: MA Experiment 108569 PARAMETER Experiment Name: At_0.001%_MeJA__cDNA_P Parameter: Timepoint (hr) Value: 6
  misc_feature: MA Experiment 108569 PARAMETER Experiment Name: At_0.001%_MeJA__cDNA_P Parameter: Tissue Value: Aerial
  misc_feature: MA Experiment 108569 PARAMETER Experiment Name: At_0.001%_MeJA__cDNA_P Parameter: Treatment Value: 0.001% MeJA vs. No Treatment
  misc_feature: MA Experiment ID: 108573 Result: Up-regulated in Transcription
  misc_feature: MA Experiment 108573 PARAMETER Experiment Name: At_Drought_cDNA_P Parameter: Timepoint (hr) Value: 6
  misc_feature: MA Experiment 108573 PARAMETER Experiment Name: At_Drought_cDNA_P Parameter: Tissue Value: Aerial
  misc_feature: MA Experiment 108573 PARAMETER Experiment Name: At_Drought_cDNA_P Parameter: Treatment Value: Drought vs. No Drought
  misc_feature: MA Experiment ID: 108574 Result: Up-regulated in Transcription
  misc_feature: MA Experiment 108574 PARAMETER Experiment Name: At_Wounding__cDNA_P Parameter: Timepoint (hr) Value: 1
  misc_feature: MA Experiment 108574 PARAMETER Experiment Name: At_Wounding__cDNA_P Parameter: Tissue Value: Aerial
  misc_feature: MA Experiment 108574 PARAMETER Experiment Name: At_Wounding__cDNA_P Parameter: Treatment Value: Wounding vs. No Wounding
  misc_feature: MA Experiment ID: 108577 Result: Down-regulated in Transcription
  misc_feature: MA Experiment 108577 PARAMETER Experiment Name: At_42deg_Heat_cDNA_P Parameter: Temperature (deg C) Value: 42 vs. 22
  misc_feature: MA Experiment 108577 PARAMETER Experiment Name: At_42deg_Heat_cDNA_P Parameter: Timepoint (hr) Value: 6
  misc_feature: MA Experiment 108577 PARAMETER Experiment Name: At_42deg_Heat_cDNA_P Parameter: Tissue Value: Aerial
  misc_feature: MA Experiment ID: 108595 Result: Up-regulated in Transcription
  misc_feature: MA Experiment 108595 PARAMETER Experiment Name: At_Ler-pi_Ovule_cDNA_P Parameter: Plant Line Value: null
  misc_feature: MA Experiment ID: 108667 Result: Up-regulated in Transcription
  misc_feature: MA Experiment 108667 PARAMETER Experiment Name: At_2mM_SA_cDNA_P Parameter: Plant Line Value: WS
  misc_feature: MA Experiment 108667 PARAMETER Experiment Name: At_2mM_SA_cDNA_P Parameter: Timepoint (hr) Value: 1
  misc_feature: MA Experiment 108667 PARAMETER Experiment Name: At_2mM_SA_cDNA_P Parameter: Treatment Value: 2mM SA vs. No Treatment
  misc_feature: MA Experiment ID: 20000030 Result: Down-regulated in Transcription
  misc_feature: MA Experiment 20000030 PARAMETER Experiment Name: At_CS6630_Roots_cDNA_P Parameter: Plant Line Value: CS6630 vs. WS
  misc_feature: MA Experiment 20000030 PARAMETER Experiment Name: At_CS6630_Roots_cDNA_P Parameter: Tissue Value: Roots
  misc_feature: MA Experiment ID: 20000068 Result: Down-regulated in Transcription
  misc_feature: MA Experiment ID: 20000113 Result: Down-regulated in Transcription
  misc_feature: MA Experiment 20000113 PARAMETER Experiment Name: At_42deg_Heat_cDNA_P Parameter: Temperature (deg C) Value: 42 vs. 22
  misc_feature: MA Experiment 20000113 PARAMETER Experiment Name: At_42deg_Heat_cDNA_P Parameter: Timepoint (hr) Value: 8
  misc_feature: MA Experiment 20000113 PARAMETER Experiment Name: At_42deg_Heat_cDNA_P Parameter: Tissue Value: Aerial
actttgtagtttgtgttttgtccttatcggcggagacatgacggcggcacaagggaactctaacgagactctgttttcttcttacaagatgggaagattcgatctctctcatcgagtggttctggcgccgatgacgcggtgcagggcgttgaacggagtaccaaacgcggcgttggcagagtattatgctcaacggaccactcccggcggttttctcatctccgaaggcaccatggtctctcccggatccgcagggttcccacatgtgcctggaatctattcagatgaacaagtagaagcatggaagcaagttgtggaagcagttcacgctaagggaggtttcatcttttgtcaattatggcatgttggacgtgcttctcatgcag

SEQ ID NO: 74609 - protein, 128 aa, Arabidopsis thaliana
  peptide (1)..(128): Ceres Seq. ID no. 5678540
  misc_feature (23)..(127): Pfam Name: NADH:flavin oxidoreductase / NADH oxidase family Pfam Description: NADH:flavin oxidoreductase / NADH oxidase family
  misc_feature (13)..(127): Homolog of NCBI NO: 5059115 NR Description: OPDA-reductase homolog [Arabidopsis thaliana]
  misc_feature (13)..(127): Homolog of NCBI NO: 6707797 NR Description: 12-oxo-phytodienoate reductase [Arabidopsis
  misc_feature (13)..(127): Homolog of NCBI NO: 7688991 NR Description: 12-oxo-phytodienoate reductase [Arabidopsis
  misc_feature (13)..(127): Homolog of NCBI NO: 15225045 NR Description: 12-oxophytodienoate reductase (OPR3)(DDE1); id: At2g06050.1, supported by cDNA: gi_10242313, supported by
  misc_feature (13)..(127): Homolog of NCBI NO: 10242314 NR Description: 12-oxo-phytodienoate reductase [Arabidopsis
  misc_feature (13)..(127): Homolog of NCBI NO: 12056507 NR Description: 12-oxophytodienoate reductase 3 [Lycopersicon
  misc_feature (13)..(127): Homolog of NCBI NO: 2765083 NR Description: 12-oxophytodienoate reductase [Arabidopsis
  misc_feature (12)..(127): Homolog of NCBI NO: 15223140 NR Description: 12-oxophytodienoate reductase (OPR2); protein id: [Arabidopsis thaliana] >gi|25325950|pir||C96795 hypothetical
  misc_feature (12)..(127): Homolog of NCBI NO: 26450549 NR Description: putative 12-oxophytodienoate reductase OPR2
  misc_feature (13)..(127): Homolog of NCBI NO: 15223138 NR Description: 12-oxophytodienoate reductase (OPR1); protein id: supported by cDNA: 38527., supported by cDNA: gi_18650649
LCSLCFVLIGGDMTAAQGNSNETLFSSYKMGRFDLSHRVVLAPMTRCRALNGVPNAALAEYYAQRTTPGGFLISEGTMVSPGSAGFPHVPGIYSDEQVEAWKQVVEAVHAKGGFIFCQLWHVGRASHA

SEQ ID NO: 74610 - protein, 116 aa, Arabidopsis thaliana
  peptide (1)..(116): Ceres Seq. ID no. 5678541
  misc_feature (11)..(115): Pfam Name: NADH:flavin oxidoreductase / NADH oxidase family Pfam Description: NADH:flavin oxidoreductase / NADH oxidase family
  misc_feature (1)..(115): Homolog of NCBI NO: 5059115 NR Description: OPDA-reductase homolog [Arabidopsis thaliana]
  misc_feature (1)..(115): Homolog of NCBI NO: 7688991 NR Description: 12-oxo-phytodienoate reductase [Arabidopsis
  misc_feature (1)..(115): Homolog of NCBI NO: 10242314 NR Description: 12-oxo-phytodienoate reductase [Arabidopsis
  misc_feature (1)..(115): Homolog of NCBI NO: 15225045 NR Description: 12-oxophytodienoate reductase (OPR3)(DDE1); id: At2g06050.1, supported by cDNA: gi_10242313, supported by
  misc_feature (1)..(115): Homolog of NCBI NO: 6707797 NR Description: 12-oxo-phytodienoate reductase [Arabidopsis
  misc_feature (1)..(115): Homolog of NCBI NO: 12056507 NR Description: 12-oxophytodienoate reductase 3 [Lycopersicon
  misc_feature (1)..(115): Homolog of NCBI NO: 2765083 NR Description: 12-oxophytodienoate reductase [Arabidopsis
  misc_feature (1)..(115): Homolog of NCBI NO: 15223140 NR Description: 12-oxophytodienoate reductase (OPR2); protein id: [Arabidopsis thaliana] >gi|25325950|pir||C96795 hypothetical
  misc_feature (1)..(115): Homolog of NCBI NO: 26450549 NR Description: putative 12-oxophytodienoate reductase OPR2
  misc_feature (1)..(115): Homolog of NCBI NO: 15223138 NR Description: 12-oxophytodienoate reductase (OPR1); protein id: supported by cDNA: 38527., supported by cDNA: gi_18650649
MTAAQGNSNETLFSSYKMGRFDLSHRVVLAPMTRCRALNGVPNAALAEYYAQRTTPGGFLISEGTMVSPGSAGFPHVPGIYSDEQVEAWKQVVEAVHAKGGFIFCQLWHVGRASHA

SEQ ID NO: 74611 - protein, 99 aa, Arabidopsis thaliana; identical to SEQ ID NO: 24884
  peptide (1)..(99): Ceres Seq. ID no. 5678542
  misc_feature (1)..(98): Pfam Name: NADH:flavin oxidoreductase / NADH oxidase family Pfam Description: NADH:flavin oxidoreductase / NADH oxidase family
  misc_feature (1)..(98): Homolog of NCBI NO: 5059115 NR Description: OPDA-reductase homolog [Arabidopsis thaliana]
  misc_feature (1)..(98): Homolog of NCBI NO: 10242314 NR Description: 12-oxo-phytodienoate reductase [Arabidopsis
  misc_feature (1)..(98): Homolog of NCBI NO: 7688991 NR Description: 12-oxo-phytodienoate reductase [Arabidopsis
  misc_feature (1)..(98): Homolog of NCBI NO: 15225045 NR Description: 12-oxophytodienoate reductase (OPR3)(DDE1); id: At2g06050.1, supported by cDNA: gi_10242313, supported by
  misc_feature (1)..(98): Homolog of NCBI NO: 6707797 NR Description: 12-oxo-phytodienoate reductase [Arabidopsis
  misc_feature (1)..(98): Homolog of NCBI NO: 12056507 NR Description: 12-oxophytodienoate reductase 3 [Lycopersicon
  misc_feature (1)..(98): Homolog of NCBI NO: 2765083 NR Description: 12-oxophytodienoate reductase [Arabidopsis
  misc_feature (1)..(98): Homolog of NCBI NO: 15223140 NR Description: 12-oxophytodienoate reductase (OPR2); protein id: [Arabidopsis thaliana] >gi|25325950|pir||C96795 hypothetical
  misc_feature (1)..(98): Homolog of NCBI NO: 26450549 NR Description: putative 12-oxophytodienoate reductase OPR2
  misc_feature (1)..(98): Homolog of NCBI NO: 15223138 NR Description: 12-oxophytodienoate reductase (OPR1); protein id: supported by cDNA: 38527., supported by cDNA: gi_18650649

SEQ ID NO: 74612 - DNA, 1521 bp, Arabidopsis thaliana
  misc_feature (1)..(1521): Ceres Seq. ID no. 5678557
  misc_feature: MA Experiment ID: 108434 Result: Up-regulated in Transcription
  misc_feature: MA Experiment 108434 PARAMETER Experiment Name: At_Root_Tips_cDNA_P Parameter: Tissue Value: Root Tips
  misc_feature: MA Experiment ID: 108462 Result: Down-regulated in Transcription
  misc_feature: MA Experiment 108462 PARAMETER Experiment Name: At_Germinating_Seeds_cDNA_P Parameter: Age (day) Value: 2 vs. 0
  misc_feature: MA Experiment 108462 PARAMETER Experiment Name: At_Germinating_Seeds_cDNA_P Parameter: Tissue Value: Germinating Seeds
  misc_feature: MA Experiment ID: 108463 Result: Down-regulated in Transcription
  misc_feature: MA Experiment 108463 PARAMETER Experiment Name: At_Germinating_Seeds_cDNA_P Parameter: Age (day) Value: 3 vs. 0
  misc_feature: MA Experiment 108463 PARAMETER Experiment Name: At_Germinating_Seeds_cDNA_P Parameter: Tissue Value: Germinating Seeds
  misc_feature: MA Experiment ID: 108464 Result: Down-regulated in Transcription
  misc_feature: MA Experiment 108464 PARAMETER Experiment Name: At_Germinating_Seeds_cDNA_P Parameter: Age (day) Value: 4 vs. 0
  misc_feature: MA Experiment 108464 PARAMETER Experiment Name: At_Germinating_Seeds_cDNA_P Parameter: Tissue Value: Germinating Seeds
  misc_feature: MA Experiment ID: 108573 Result: Down-regulated in Transcription
  misc_feature: MA Experiment 108573 PARAMETER Experiment Name: At_Drought_cDNA_P Parameter: Timepoint (hr) Value: 6
  misc_feature: MA Experiment 108573 PARAMETER Experiment Name: At_Drought_cDNA_P Parameter: Tissue Value: Aerial
  misc_feature: MA Experiment 108573 PARAMETER Experiment Name: At_Drought_cDNA_P Parameter: Treatment Value: Drought vs. No Drought
  misc_feature: MA Experiment ID: 20000087 Result: Down-regulated in Transcription
  misc_feature: MA Experiment 20000087 PARAMETER Experiment Name: At_100uM_ABA_Mutants_cDNA_P Parameter: Plant Line Value: WS
  misc_feature: MA Experiment 20000087 PARAMETER Experiment Name: At_100uM_ABA_Mutants_cDNA_P Parameter: Timepoint (hr) Value: 6
  misc_feature: MA Experiment 20000087 PARAMETER Experiment Name: At_100uM_ABA_Mutants_cDNA_P Parameter: Tissue Value: Aerial
  misc_feature: MA Experiment 20000087 PARAMETER Experiment Name: At_100uM_ABA_Mutants_cDNA_P Parameter: Treatment Value: 100uM ABA vs. No Treatment
  misc_feature: MA Experiment ID: 20000179 Result: Down-regulated in Transcription
  misc_feature: MA Experiment 20000179 PARAMETER Experiment Name: At_Germinating_Seeds_P Parameter: Age (hr) Value: 6 vs. 0
  misc_feature: MA Experiment 20000179 PARAMETER Experiment Name: At_Germinating_Seeds_P Parameter: Tissue Value: Germinating Seeds
  misc_feature: MA Experiment ID: 20000443 Result: Down-regulated in Transcription
  misc_feature: MA Experiment 20000443 PARAMETER Experiment Name: At_1uM_BR-BRZ__P Parameter: Tissue Value: Shoot Apices
  misc_feature: MA Experiment 20000443 PARAMETER Experiment Name: At_1uM_BR-BRZ__P Parameter: Treatment Value: 1uM BRZ vs. No Treatment
ctcttcttcctctaattgcttttctccgtcactgagtaccttgcctctcgagctcccaatcttaagtagaggattgagcttaaggcaagatggtaagaaacttaaatatttattttgaatatttgatcaattatctatctttatgaattattgatcaagaaacaaaatttaaagaacatccgggacttgaaaaagtagtggaaatttcacaaaaccgaaaagcaaacggttaattcggttttacaaagaccaaacagaaaattcaataattcggtttggttcggtttaattacaccgaacaaaaaagttggtacattcgtttttatttttccgccattcttgtcgatcttcttcagtcgtaaaaccgccgcgtctctgctgaccctcctcttctcatttcatcgacgggagaaaatcccataccatctgagatttccaacagtgaaattaagatgtcaacaggaatatccactgatctccatgtccattttggagctctaaatttctcaaaaacctacaaatctggtttaagcaatcgaacggtgtctttttcgagagtcgggtatgctcagaacaggaaattgagctgcagtgtttccaacacagagaatgtagctcctaaggatgatgaaagaggaaaggatagacctttggttaagatgtgtggcatcacatcagccagagatgcagctatggcagttgaggctggtgccgattttattgggatgattatttggccacattcaaaacgatctatttctctttctgtcgcaaaggatatctccaaagtggccagggaaggtggggccaaacctgttggtgtttttgttgaagatgatgagaacacgatactgagagcagctgattcctctgaccttgagcttgtgcagcttcatggtaatggttcgcgtgctgctttctcgaggttagtacgcaagaggagagtcatatatgtccttaatgcaaatcaggatggaaagctcttgaatgaagttcctgaagaggattgtcatcttgctgattggattcttgtggatagtgcaacgggtgggagtggacacggatttaactgggctcaattcaagttgccttccgtcagaagcagaaatgggtggctcttagctgggggaatcaatccaacaaatgtttcagaagctctttctatccttcaacctgatggaattgatgttagtagcggtatttgcggtacagacggtatccagaaggataagtctaagataagctcctttataactgcagttcgctctgtacactactaatggcaagcaatataaaccacggtaatttatcttgtaactatagttttgagcatcaacctgttgtttccaatccatgtcattaagttttgaattgtaactggctgataataataataatgcccttttttttcatcagtagtagatttaaattaaaagcgttgggttgtcaccgtaataatgtcgttgggctctcaagaacaagatccttgtatgaaatgtattctactgatcatatattatt

SEQ ID NO: 74613 - protein, 275 aa, Arabidopsis thaliana
  peptide (1)..(275): Ceres Seq. ID no. 5678558
  misc_feature (68)..(269): Pfam Name: N-(5'phosphoribosyl)anthranilate (PRA) isomerase Pfam Description: N-(5'phosphoribosyl)anthranilate (PRA) isomerase
  misc_feature (1)..(275): Homolog of NCBI NO: 15223003 NR Description: phosphoribosylanthranilate isomerase; protein id: supported by cDNA: gi_19698854 [Arabidopsis thaliana] phosphoribosylanthranilate isomerase >gi|1403668|gb|AAB03498.1|
  misc_feature (1)..(275): Homolog of NCBI NO: 30681012 NR Description: phosphoribosylanthranilate isomerase (PAI2) thaliana] >gi|619747|gb|AAC49003.1| phosphoribosylanthranilate
  misc_feature (2)..(275): Homolog of NCBI NO: 25407008 NR Description: hypothetical protein [imported] - Arabidopsis >gi|8439889|gb|AAF75075.1|AC007583_11 Strong similarity to isomerase PAI4 gb|AF130876. This is a pseudogene. [Arabidopsis
  misc_feature (2)..(275): Homolog of NCBI NO: 10178136 NR Description: phosphoribosylanthranilate isomerase [Arabidopsis
  misc_feature (1)..(275): Homolog of NCBI NO: 5031264 NR Description: phosphoribosylanthranilate isomerase [Arabidopsis
  misc_feature (1)..(275): Homolog of NCBI NO: 5031258 NR Description: phosphoribosylanthranilate isomerase [Arabidopsis >gi|5031259|gb|AAD38137.1|AF130875_2 phosphoribosylanthranilate
  misc_feature (1)..(275): Homolog of NCBI NO: 5031261 NR Description: phosphoribosylanthranilate isomerase [Arabidopsis
  misc_feature (1)..(275): Homolog of NCBI NO: 1403670 NR Description: phosphoribosylanthranilate isomerase [Arabidopsis
  misc_feature (1)..(275): Homolog of NCBI NO: 5031262 NR Description: phosphoribosylanthranilate isomerase [Arabidopsis
  misc_feature (1)..(275): Homolog of NCBI NO: 5031256 NR Description: phosphoribosylanthranilate isomerase [Arabidopsis
MSTGISTDLHVHFGALNFSKTYKSGLSNRTVSFSRVGYAQNRKLSCSVSNTENVAPKDDERGKDRPLVKMCGITSARDAAMAVEAGADFIGMIIWPHSKRSISLSVAKDISKVAREGGAKPVGVFVEDDENTILRAADSSDLELVQLHGNGSRAAFSRLVRKRRVIYVLNANQDGKLLNEVPEEDCHLADWILVDSATGGSGHGFNWAQFKLPSVRSRNGWLLAGGINPTNVSEALSILQPDGIDVSSGICGTDGIQKDKSKISSFITAVRSVHY

SEQ ID NO: 74614 - protein, 206 aa, Arabidopsis thaliana
  peptide (1)..(206): Ceres Seq. ID no. 5678559
  misc_feature (1)..(200): Pfam Name: N-(5'phosphoribosyl)anthranilate (PRA) isomerase Pfam Description: N-(5'phosphoribosyl)anthranilate (PRA) isomerase
  misc_feature (1)..(206): Homolog of NCBI NO: 15223003 NR Description: phosphoribosylanthranilate isomerase; protein id: supported by cDNA: gi_19698854 [Arabidopsis thaliana] phosphoribosylanthranilate isomerase >gi|1403668|gb|AAB03498.1|
  misc_feature (1)..(206): Homolog of NCBI NO: 30681012 NR Description: phosphoribosylanthranilate isomerase (PAI2) thaliana] >gi|619747|gb|AAC49003.1| phosphoribosylanthranilate
  misc_feature (1)..(206): Homolog of NCBI NO: 25407008 NR Description: hypothetical protein [imported] - Arabidopsis >gi|8439889|gb|AAF75075.1|AC007583_11 Strong similarity to isomerase PAI4 gb|AF130876. This is a pseudogene. [Arabidopsis
  misc_feature (1)..(206): Homolog of NCBI NO: 10178136 NR Description: phosphoribosylanthranilate isomerase [Arabidopsis
  misc_feature (1)..(206): Homolog of NCBI NO: 5031264 NR Description: phosphoribosylanthranilate isomerase [Arabidopsis
  misc_feature (1)..(206): Homolog of NCBI NO: 5031258 NR Description: phosphoribosylanthranilate isomerase [Arabidopsis >gi|5031259|gb|AAD38137.1|AF130875_2 phosphoribosylanthranilate
  misc_feature (1)..(206): Homolog of NCBI NO: 5031261 NR Description: phosphoribosylanthranilate isomerase [Arabidopsis
  misc_feature (1)..(206): Homolog of NCBI NO: 1403670 NR Description: phosphoribosylanthranilate isomerase [Arabidopsis
  misc_feature (1)..(206): Homolog of NCBI NO: 5031262 NR Description: phosphoribosylanthranilate isomerase [Arabidopsis
  misc_feature (1)..(206): Homolog of NCBI NO: 5031256 NR Description: phosphoribosylanthranilate isomerase [Arabidopsis
MCGITSARDAAMAVEAGADFIGMIIWPHSKRSISLSVAKDISKVAREGGAKPVGVFVEDDENTILRAADSSDLELVQLHGNGSRAAFSRLVRKRRVIYVLNANQDGKLLNEVPEEDCHLADWILVDSATGGSGHGFNWAQFKLPSVRSRNGWLLAGGINPTNVSEALSILQPDGIDVSSGICGTDGIQKDKSKISSFITAVRSVHY

SEQ ID NO: 74615 - protein, 195 aa, Arabidopsis thaliana
  peptide (1)..(195): Ceres Seq. ID no. 5678560
  misc_feature (1)..(189): Pfam Name: N-(5'phosphoribosyl)anthranilate (PRA) isomerase Pfam Description: N-(5'phosphoribosyl)anthranilate (PRA) isomerase
  misc_feature (1)..(195): Homolog of NCBI NO: 15223003 NR Description: phosphoribosylanthranilate isomerase; protein id: supported by cDNA: gi_19698854 [Arabidopsis thaliana] phosphoribosylanthranilate isomerase >gi|1403668|gb|AAB03498.1|
  misc_feature (1)..(195): Homolog of NCBI NO: 30681012 NR Description: phosphoribosylanthranilate isomerase (PAI2) thaliana] >gi|619747|gb|AAC49003.1| phosphoribosylanthranilate
  misc_feature (1)..(195): Homolog of NCBI NO: 25407008 NR Description: hypothetical protein [imported] - Arabidopsis >gi|8439889|gb|AAF75075.1|AC007583_11 Strong similarity to isomerase PAI4 gb|AF130876. This is a pseudogene. [Arabidopsis
  misc_feature (1)..(195): Homolog of NCBI NO: 10178136 NR Description: phosphoribosylanthranilate isomerase [Arabidopsis
  misc_feature (1)..(195): Homolog of NCBI NO: 5031264 NR Description: phosphoribosylanthranilate isomerase [Arabidopsis
  misc_feature (1)..(195): Homolog of NCBI NO: 5031258 NR Description: phosphoribosylanthranilate isomerase [Arabidopsis >gi|5031259|gb|AAD38137.1|AF130875_2 phosphoribosylanthranilate
  misc_feature (1)..(195): Homolog of NCBI NO: 5031261 NR Description: phosphoribosylanthranilate isomerase [Arabidopsis
  misc_feature (1)..(195): Homolog of NCBI NO: 1403670 NR Description: phosphoribosylanthranilate isomerase [Arabidopsis
  misc_feature (1)..(195): Homolog of NCBI NO: 5031262 NR Description: phosphoribosylanthranilate isomerase [Arabidopsis
  misc_feature (1)..(195): Homolog of NCBI NO: 5031256 NR Description: phosphoribosylanthranilate isomerase [Arabidopsis
MAVEAGADFIGMIIWPHSKRSISLSVAKDISKVAREGGAKPVGVFVEDDENTILRAADSSDLELVQLHGNGSRAAFSRLVRKRRVIYVLNANQDGKLLNEVPEEDCHLADWILVDSATGGSGHGFNWAQFKLPSVRSRNGWLLAGGINPTNVSEALSILQPDGIDVSSGICGTDGIQKDKSKISSFITAVRSVHY

SEQ ID NO: 74616 - DNA, 1409 bp, Arabidopsis thaliana
  misc_feature (1)..(1409): Ceres Seq. ID no. 5678612
  misc_feature: MA Experiment ID: 108434 Result: Up-regulated in Transcription
  misc_feature: MA Experiment 108434 PARAMETER Experiment Name: At_Root_Tips_cDNA_P Parameter: Tissue Value: Root Tips
  misc_feature: MA Experiment ID: 108462 Result: Down-regulated in Transcription
  misc_feature: MA Experiment 108462 PARAMETER Experiment Name: At_Germinating_Seeds_cDNA_P Parameter: Age (day) Value: 2 vs. 0
  misc_feature: MA Experiment 108462 PARAMETER Experiment Name: At_Germinating_Seeds_cDNA_P Parameter: Tissue Value: Germinating Seeds
  misc_feature: MA Experiment ID: 108463 Result: Down-regulated in Transcription
  misc_feature: MA Experiment 108463 PARAMETER Experiment Name: At_Germinating_Seeds_cDNA_P Parameter: Age (day) Value: 3 vs. 0
  misc_feature: MA Experiment 108463 PARAMETER Experiment Name: At_Germinating_Seeds_cDNA_P Parameter: Tissue Value: Germinating Seeds
  misc_feature: MA Experiment ID: 108577 Result: Down-regulated in Transcription
  misc_feature: MA Experiment 108577 PARAMETER Experiment Name: At_42deg_Heat_cDNA_P Parameter: Temperature (deg C) Value: 42 vs. 22
  misc_feature: MA Experiment 108577 PARAMETER Experiment Name: At_42deg_Heat_cDNA_P Parameter: Timepoint (hr) Value: 6
  misc_feature: MA Experiment 108577 PARAMETER Experiment Name: At_42deg_Heat_cDNA_P Parameter: Tissue Value: Aerial
  misc_feature: MA Experiment ID: 20000437 Result: Down-regulated in Transcription
  misc_feature: MA Experiment 20000437 PARAMETER Experiment Name: At_Drought_P Parameter: Age (day) Value: 8
  misc_feature: MA Experiment 20000437 PARAMETER Experiment Name: At_Drought_P Parameter: Organism Value: A. thaliana
  misc_feature: MA Experiment 20000437 PARAMETER Experiment Name: At_Drought_P Parameter: Plant Line Value: WS
  misc_feature: MA Experiment 20000437 PARAMETER Experiment Name: At_Drought_P Parameter: Timepoint (hr) Value: 24
  misc_feature: MA Experiment 20000437 PARAMETER Experiment Name: At_Drought_P Parameter: Tissue Value: Whole Plant
  misc_feature: MA Experiment 20000437 PARAMETER Experiment Name: At_Drought_P Parameter: Treatment Value: Drought vs. No Drought
  misc_feature: MA Experiment ID: 20000496 Result: Up-regulated in Transcription
  misc_feature: MA Experiment 20000496 PARAMETER Experiment Name: At_Guard_Cells_P Parameter: Harvest Date Value: 7/19/2002
  misc_feature: MA Experiment 20000496 PARAMETER Experiment Name: At_Guard_Cells_P Parameter: Organism Value: Canola
  misc_feature: MA Experiment 20000496 PARAMETER Experiment Name: At_Guard_Cells_P Parameter: Tissue Value: Guard Cells vs. Leaves
  misc_feature: MA Experiment ID: 20001905 Result: Down-regulated in Transcription
  misc_feature: MA Experiment 20001905 PARAMETER Experiment Name: At_Drought_Reproduction_P Parameter: Age (day) Value: 40
  misc_feature: MA Experiment 20001905 PARAMETER Experiment Name: At_Drought_Reproduction_P Parameter: Organism Value: A. thaliana
  misc_feature: MA Experiment 20001905 PARAMETER Experiment Name: At_Drought_Reproduction_P Parameter: Plant Line Value: WS
  misc_feature: MA Experiment 20001905 PARAMETER Experiment Name: At_Drought_Reproduction_P Parameter: Timepoint (day) Value: 10
  misc_feature: MA Experiment 20001905 PARAMETER Experiment Name: At_Drought_Reproduction_P Parameter: Tissue Value: Rosettes
  misc_feature: MA Experiment 20001905 PARAMETER Experiment Name: At_Drought_Reproduction_P Parameter: Treatment Value: Drought vs. No Drought
atcgaaaatgagatgagagagagaggaggagtctctcatcgtgagtagggcttttgactccctccctactttgcctacttcttcttcttcctctgtggccactctacacagtccacacctacttcaagacacctttctcatccttgagatcggcgtcagatcctccgccgcttctcctcttcactatctccggtcacaacttgtttttctctgtttttctttatctctactttatgcacaatctgactttctaagtggatttacagtgttaaagatgatggaatctggcgctggtttcgtggccatggaagagaggatctctcctggaagtttcttccagtatcctctttctggattccgtgcttctcctaatcgatccccttgtcctccctctgatcgtgaaaggtacttgactgaattattgcaagagagacaaaagttgggtccctttttgcaagttatgccaaattgctgcagactgcttaatcatgaaatcaggagggtctctagttttcctgatcttgatagatatgagcatggcagtccatttagatcgcttggtcagccgacaaatggaaagcttgatttagagggatggtcgatgatgcaagccgaggaaaactgtcacctccagagagcttctccatttcgcggtccttccccagtgggctggattgggatgccgggactccctaacccacccattgtgaaaaaagtgattagacttgatgtcccagtggataaatatccaagctataattttgttgggaggattcttgggccacgtggaaactccctaaaaagagttgagctagcaacccactgcagggtgtttatcagaggacgaggatctgtgaaggatactgtcaaggaggaaaaattaaaaggtaagccagggtacgagcatctctgcgagccactacatgtactgatcgaggccgagcttccagaagacataataaactctcgattggagcatgcagtgcatttcctggaatcactcctgaagccgatggacgagtcaatggatcactacaagagggaacagctgaaggagttagcggctttgaatggtacactaagggaggagagtccgagtccgagcttgagcccttgtttgagccccagcatgtcccctttcaacagcaagcgtgctaagacagagatatgatcaagagaaaccactagtgcatgggtcttgtgggcaggatcatgagtttgctaagttctaacgtttggactcttgaattaatttattttgtcattaactttattctttatttttgttggttagctgagatgaccattaaccagtgggtaataaactaataatggtgtttatgaaattgtaatctccttctcaatcattgtaacctttatttaagttttaaaccccaaacgtttatttc

SEQ ID NO: 74617 - protein, 298 aa, Arabidopsis thaliana; identical to SEQ ID NO: 30428
  peptide (1)..(298): Ceres Seq. ID no. 5678613
  misc_feature (150)..(205): Pfam Name: KH domain Pfam Description: KH domain
  misc_feature (1)..(298): Homolog of NCBI NO: 22329449 NR Description: KH domain quaking protein, putative; protein id: supported by cDNA: gi_16930472, supported by cDNA: gi_19310522 thaliana] >gi|26452384|dbj|BAC43277.1| putative elongation factor
  misc_feature (1)..(298): Homolog of NCBI NO: 16930473 NR Description: At1g09660/F21M12_5 [Arabidopsis thaliana]
  misc_feature (136)..(298): Homolog of NCBI NO: 25402559 NR Description: hypothetical protein [imported] - Arabidopsis >gi|2160160|gb|AAB60723.1| F21M12.5 gene product [Arabidopsis
  misc_feature (62)..(296): Homolog of NCBI NO: 34907446 NR Description: P0434C04.5 [Oryza sativa (japonica
  misc_feature (4)..(296): Homolog of NCBI NO: 15236738 NR Description: KH domain protein; protein id: At4g26480.1
  misc_feature (4)..(296): Homolog of NCBI NO: 20268733 NR Description: unknown protein [Arabidopsis thaliana]
  misc_feature (31)..(295): Homolog of NCBI NO: 34900448 NR Description: contains EST C27129(C51039)~similar to
  misc_feature (41)..(296): Homolog of NCBI NO: 19424087 NR Description: putative RNA-binding protein [Arabidopsis
  misc_feature (30)..(296): Homolog of NCBI NO: 15224909 NR Description: KH domain protein; protein id: At2g38610.1, by cDNA: gi_14596032, supported by cDNA: gi_17473661, supported
  misc_feature (41)..(296): Homolog of NCBI NO: 15241136 NR Description: KH domain protein; protein id: At5g56140.1

SEQ ID NO: 74618 - protein, 297 aa, Arabidopsis thaliana; identical to SEQ ID NO: 30429
  peptide (1)..(297): Ceres Seq. ID no. 5678614
  misc_feature (149)..(204): Pfam Name: KH domain Pfam Description: KH domain
  misc_feature (1)..(297): Homolog of NCBI NO: 22329449 NR Description: KH domain quaking protein, putative; protein id: supported by cDNA: gi_16930472, supported by cDNA: gi_19310522 thaliana] >gi|26452384|dbj|BAC43277.1| putative elongation factor
  misc_feature (1)..(297): Homolog of NCBI NO: 16930473 NR Description: At1g09660/F21M12_5 [Arabidopsis thaliana]
  misc_feature (135)..(297): Homolog of NCBI NO: 25402559 NR Description: hypothetical protein [imported] - Arabidopsis >gi|2160160|gb|AAB60723.1| F21M12.5 gene product [Arabidopsis
  misc_feature (61)..(295): Homolog of NCBI NO: 34907446 NR Description: P0434C04.5 [Oryza sativa (japonica
  misc_feature (3)..(295): Homolog of NCBI NO: 15236738 NR Description: KH domain protein; protein id: At4g26480.1
  misc_feature (3)..(295): Homolog of NCBI NO: 20268733 NR Description: unknown protein [Arabidopsis thaliana]
  misc_feature (30)..(294): Homolog of NCBI NO: 34900448 NR Description: contains EST C27129(C51039)~similar to
  misc_feature (40)..(295): Homolog of NCBI NO: 19424087 NR Description: putative RNA-binding protein [Arabidopsis
  misc_feature (29)..(295): Homolog of NCBI NO: 15224909 NR Description: KH domain protein; protein id: At2g38610.1, by cDNA: gi_14596032, supported by cDNA: gi_17473661, supported
  misc_feature (40)..(295): Homolog of NCBI NO: 15241136 NR Description: KH domain protein; protein id: At5g56140.1

SEQ ID NO: 74619 - protein, 288 aa, Arabidopsis thaliana; identical to SEQ ID NO: 30430
  peptide (1)..(288): Ceres Seq. ID no. 5678615
  misc_feature (140)..(195): Pfam Name: KH domain Pfam Description: KH domain
  misc_feature (1)..(288): Homolog of NCBI NO: 22329449 NR Description: KH domain quaking protein, putative; protein id: supported by cDNA: gi_16930472, supported by cDNA: gi_19310522 thaliana] >gi|26452384|dbj|BAC43277.1| putative elongation factor
  misc_feature (1)..(288): Homolog of NCBI NO: 16930473 NR Description: At1g09660/F21M12_5 [Arabidopsis thaliana]
  misc_feature (126)..(288): Homolog of NCBI NO: 25402559 NR Description: hypothetical protein [imported] - Arabidopsis >gi|2160160|gb|AAB60723.1| F21M12.5 gene product [Arabidopsis
  misc_feature (52)..(286): Homolog of NCBI NO: 34907446 NR Description: P0434C04.5 [Oryza sativa (japonica
  misc_feature (1)..(286): Homolog of NCBI NO: 15236738 NR Description: KH domain protein; protein id: At4g26480.1
  misc_feature (1)..(286): Homolog of NCBI NO: 20268733 NR Description: unknown protein [Arabidopsis thaliana]
  misc_feature (21)..(285): Homolog of NCBI NO: 34900448 NR Description: contains EST C27129(C51039)~similar to
  misc_feature (31)..(286): Homolog of NCBI NO: 19424087 NR Description: putative RNA-binding protein [Arabidopsis
  misc_feature (20)..(286): Homolog of NCBI NO: 15224909 NR Description: KH domain protein; protein id: At2g38610.1, by cDNA: gi_14596032, supported by cDNA: gi_17473661, supported
  misc_feature (31)..(286): Homolog of NCBI NO: 15241136 NR Description: KH domain protein; protein id: At5g56140.1

SEQ ID NO: 74620 - DNA, 1459 bp, Arabidopsis thaliana
  misc_feature (1)..(1459): Ceres Seq. ID no. 5678673
  misc_feature: MA Experiment ID: 108473 Result: Down-regulated in Transcription
  misc_feature: MA Experiment 108473 PARAMETER Experiment Name: At_Drought_Flowers_cDNA_P Parameter: Timepoint (hr) Value: 7 d
  misc_feature: MA Experiment 108473 PARAMETER Experiment Name: At_Drought_Flowers_cDNA_P Parameter: Tissue Value: Flower
  misc_feature: MA Experiment 108473 PARAMETER Experiment Name: At_Drought_Flowers_cDNA_P Parameter: Treatment Value: Drought vs. No Drought
  misc_feature: MA Experiment ID: 108488 Result: Up-regulated in Transcription
  misc_feature: MA Experiment ID: 108561 Result: Down-regulated in Transcription
  misc_feature: MA Experiment 108561 PARAMETER Experiment Name: At_100uM_ABA_cDNA_P Parameter: Timepoint (hr) Value: 6
  misc_feature: MA Experiment 108561 PARAMETER Experiment Name: At_100uM_ABA_cDNA_P Parameter: Tissue Value: Aerial
  misc_feature: MA Experiment 108561 PARAMETER Experiment Name: At_100uM_ABA_cDNA_P Parameter: Treatment Value: 100uM ABA vs. No Treatment
  misc_feature: MA Experiment ID: 108576 Result: Down-regulated in Transcription
  misc_feature: MA Experiment 108576 PARAMETER Experiment Name: At_42deg_Heat_cDNA_P Parameter: Temperature (deg C) Value: 42 vs. 22
  misc_feature: MA Experiment 108576 PARAMETER Experiment Name: At_42deg_Heat_cDNA_P Parameter: Timepoint (hr) Value: 1
  misc_feature: MA Experiment 108576 PARAMETER Experiment Name: At_42deg_Heat_cDNA_P Parameter: Tissue Value: Aerial
  misc_feature: MA Experiment ID: 108577 Result: Down-regulated in Transcription
  misc_feature: MA Experiment 108577 PARAMETER Experiment Name: At_42deg_Heat_cDNA_P Parameter: Temperature (deg C) Value: 42 vs. 22
  misc_feature: MA Experiment 108577 PARAMETER Experiment Name: At_42deg_Heat_cDNA_P Parameter: Timepoint (hr) Value: 6
  misc_feature: MA Experiment 108577 PARAMETER Experiment Name: At_42deg_Heat_cDNA_P Parameter: Tissue Value: Aerial
  misc_feature: MA Experiment ID: 108595 Result: Down-regulated in Transcription
  misc_feature: MA Experiment 108595 PARAMETER Experiment Name: At_Ler-pi_Ovule_cDNA_P Parameter: Plant Line Value: null
  misc_feature: MA Experiment ID: 108605 Result: Down-regulated in Transcription
  misc_feature: MA Experiment 108605 PARAMETER Experiment Name: At_100uM_ABA_cDNA_P Parameter: Timepoint (hr) Value: 6
  misc_feature: MA Experiment 108605 PARAMETER Experiment Name: At_100uM_ABA_cDNA_P Parameter: Tissue Value: Aerial
  misc_feature: MA Experiment 108605 PARAMETER Experiment Name: At_100uM_ABA_cDNA_P Parameter: Treatment Value: 100uM ABA vs. No Treatment
  misc_feature: MA Experiment ID: 108607 Result: Down-regulated in Transcription
  misc_feature: MA Experiment 108607 PARAMETER Experiment Name: At_100uM_ABA_cDNA_P Parameter: Timepoint (hr) Value: 4
  misc_feature: MA Experiment 108607 PARAMETER Experiment Name: At_100uM_ABA_cDNA_P Parameter: Tissue Value: Aerial
  misc_feature: MA Experiment 108607 PARAMETER Experiment Name: At_100uM_ABA_cDNA_P Parameter: Treatment Value: 100uM ABA vs. No Treatment
  misc_feature: MA Experiment ID: 108668 Result: Down-regulated in Transcription
  misc_feature: MA Experiment 108668 PARAMETER Experiment Name: At_2mM_SA_cDNA_P Parameter: Plant Line Value: WS
  misc_feature: MA Experiment 108668 PARAMETER Experiment Name: At_2mM_SA_cDNA_P Parameter: Timepoint (hr) Value: 6
  misc_feature: MA Experiment 108668 PARAMETER Experiment Name: At_2mM_SA_cDNA_P Parameter: Treatment Value: 2mM SA vs. No Treatment
  misc_feature: MA Experiment ID: 20000069 Result: Down-regulated in Transcription
  misc_feature: MA Experiment 20000069 PARAMETER Experiment Name: At_100uM_ABA_Mutants_cDNA_P Parameter: Plant Line Value: CS23
  misc_feature: MA Experiment 20000069 PARAMETER Experiment Name: At_100uM_ABA_Mutants_cDNA_P Parameter: Timepoint (hr) Value: 6
  misc_feature: MA Experiment 20000069 PARAMETER Experiment Name: At_100uM_ABA_Mutants_cDNA_P Parameter: Tissue Value: Aerial
  misc_feature: MA Experiment 20000069 PARAMETER Experiment Name: At_100uM_ABA_Mutants_cDNA_P Parameter: Treatment Value: 100uM ABA vs. No Treatment
  misc_feature: MA Experiment ID: 20000070 Result: Down-regulated in Transcription
  misc_feature: MA Experiment 20000070 PARAMETER Experiment Name: At_100uM_ABA_Mutants_cDNA_P Parameter: Plant Line Value: CS24
  misc_feature: MA Experiment 20000070 PARAMETER Experiment Name: At_100uM_ABA_Mutants_cDNA_P Parameter: Timepoint (hr) Value: 6
  misc_feature: MA Experiment 20000070 PARAMETER Experiment Name: At_100uM_ABA_Mutants_cDNA_P Parameter: Tissue Value: Aerial
  misc_feature: MA Experiment 20000070 PARAMETER Experiment Name: At_100uM_ABA_Mutants_cDNA_P Parameter: Treatment Value: 100uM ABA vs. No Treatment
  misc_feature: MA Experiment ID: 20000071 Result: Down-regulated in Transcription
  misc_feature: MA Experiment 20000071 PARAMETER Experiment Name: At_100uM_ABA_Mutants_cDNA_P Parameter: Plant Line Value: CS8104
  misc_feature: MA Experiment 20000071 PARAMETER Experiment Name: At_100uM_ABA_Mutants_cDNA_P Parameter: Timepoint (hr) Value: 6
  misc_feature: MA Experiment 20000071 PARAMETER Experiment Name: At_100uM_ABA_Mutants_cDNA_P Parameter: Tissue Value: Aerial
  misc_feature: MA Experiment 20000071 PARAMETER Experiment Name: At_100uM_ABA_Mutants_cDNA_P Parameter: Treatment Value: 100uM ABA vs. No Treatment
  misc_feature: MA Experiment ID: 20000072 Result: Down-regulated in Transcription
  misc_feature: MA Experiment 20000072 PARAMETER Experiment Name: At_100uM_ABA_Mutants_cDNA_P Parameter: Plant Line Value: CS8105
  misc_feature: MA Experiment 20000072 PARAMETER Experiment Name: At_100uM_ABA_Mutants_cDNA_P Parameter: Timepoint (hr) Value: 6
  misc_feature: MA Experiment 20000072 PARAMETER Experiment Name: At_100uM_ABA_Mutants_cDNA_P Parameter: Tissue Value: Aerial
  misc_feature: MA Experiment 20000072 PARAMETER Experiment Name: At_100uM_ABA_Mutants_cDNA_P Parameter: Treatment Value: 100uM ABA vs. No Treatment
  misc_feature: MA Experiment ID: 20000086 Result: Down-regulated in Transcription
  misc_feature: MA Experiment 20000086 PARAMETER Experiment Name: At_100uM_ABA_Mutants_cDNA_P Parameter: Plant Line Value: CS22
  misc_feature: MA Experiment 20000086 PARAMETER Experiment Name: At_100uM_ABA_Mutants_cDNA_P Parameter: Timepoint (hr) Value: 6
  misc_feature: MA Experiment 20000086 PARAMETER Experiment Name: At_100uM_ABA_Mutants_cDNA_P Parameter: Tissue Value: Aerial
  misc_feature: MA Experiment 20000086 PARAMETER Experiment Name: At_100uM_ABA_Mutants_cDNA_P Parameter: Treatment Value: 100uM ABA vs. No Treatment
  misc_feature: MA Experiment ID: 20000087 Result: Down-regulated in Transcription
  misc_feature: MA Experiment 20000087 PARAMETER Experiment Name: At_100uM_ABA_Mutants_cDNA_P Parameter: Plant Line Value: WS
  misc_feature: MA Experiment 20000087 PARAMETER Experiment Name: At_100uM_ABA_Mutants_cDNA_P Parameter: Timepoint (hr) Value: 6
  misc_feature: MA Experiment 20000087 PARAMETER Experiment Name: At_100uM_ABA_Mutants_cDNA_P Parameter: Tissue Value: Aerial
  misc_feature: MA Experiment 20000087 PARAMETER Experiment Name: At_100uM_ABA_Mutants_cDNA_P Parameter: Treatment Value: 100uM ABA vs. No Treatment
  misc_feature: MA Experiment ID: 20000088 Result: Down-regulated in Transcription
  misc_feature: MA Experiment 20000088 PARAMETER Experiment Name: At_100uM_ABA_Mutants_cDNA_P Parameter: Plant Line Value: Landsberg
  misc_feature: MA Experiment 20000088 PARAMETER Experiment Name: At_100uM_ABA_Mutants_cDNA_P Parameter: Timepoint (hr) Value: 6
  misc_feature: MA Experiment 20000088 PARAMETER Experiment Name: At_100uM_ABA_Mutants_cDNA_P Parameter: Tissue Value: Aerial
  misc_feature: MA Experiment 20000088 PARAMETER Experiment Name: At_100uM_ABA_Mutants_cDNA_P Parameter: Treatment Value: 100uM ABA vs. No Treatment
  misc_feature: MA Experiment ID: 20000089 Result: Down-regulated in Transcription
  misc_feature: MA Experiment ID: 20000090 Result: Down-regulated in Transcription
  misc_feature: MA Experiment ID: 20000111 Result: Down-regulated in Transcription
  misc_feature: MA Experiment 20000111 PARAMETER Experiment Name: At_42deg_Heat_cDNA_P Parameter: Temperature (deg C) Value: 42 vs. 22
  misc_feature: MA Experiment 20000111 PARAMETER Experiment Name: At_42deg_Heat_cDNA_P Parameter: Timepoint (hr) Value: 6
  misc_feature: MA Experiment 20000111 PARAMETER Experiment Name: At_42deg_Heat_cDNA_P Parameter: Tissue Value: Aerial
  misc_feature: MA Experiment ID: 20000112 Result: Down-regulated in Transcription
  misc_feature: MA Experiment 20000112 PARAMETER Experiment Name: At_42deg_Heat_cDNA_P Parameter: Temperature (deg C) Value: 42 vs. 22
  misc_feature: MA Experiment 20000112 PARAMETER Experiment Name: At_42deg_Heat_cDNA_P Parameter: Timepoint (hr) Value: 2
  misc_feature: MA Experiment 20000112 PARAMETER Experiment Name: At_42deg_Heat_cDNA_P Parameter: Tissue Value: Aerial
  misc_feature: MA Experiment ID: 20000117 Result: Down-regulated in Transcription
  misc_feature: MA Experiment 20000117 PARAMETER Experiment Name: At_100uM_ABA_Mutants_cDNA_P Parameter: Plant Line Value: Columbia
  misc_feature: MA Experiment 20000117 PARAMETER Experiment Name: At_100uM_ABA_Mutants_cDNA_P Parameter: Timepoint (hr) Value: 6
  misc_feature: MA Experiment 20000117 PARAMETER Experiment Name: At_100uM_ABA_Mutants_cDNA_P Parameter: Tissue Value: Aerial
  misc_feature: MA Experiment 20000117 PARAMETER Experiment Name: At_100uM_ABA_Mutants_cDNA_P Parameter: Treatment Value: 100uM ABA vs. No Treatment
  misc_feature: MA Experiment ID: 20000144 Result: Down-regulated in Transcription
  misc_feature: MA Experiment 20000144 PARAMETER Experiment Name: At_42deg_Heat_cDNA_P Parameter: Temperature (deg C) Value: 42 vs. 22
  misc_feature: MA Experiment 20000144 PARAMETER Experiment Name: At_42deg_Heat_cDNA_P Parameter: Timepoint (hr) Value: 1
  misc_feature: MA Experiment 20000144 PARAMETER Experiment Name: At_42deg_Heat_cDNA_P Parameter: Tissue Value: Aerial
  misc_feature: MA Experiment ID: 20000171 Result: Down-regulated in Transcription
  misc_feature: MA Experiment 20000171 PARAMETER Experiment Name: At_42deg_Heat_P Parameter: Age (day) Value: 14
  misc_feature: MA Experiment 20000171 PARAMETER Experiment Name: At_42deg_Heat_P Parameter: Organism Value: A. thaliana
  misc_feature: MA Experiment 20000171 PARAMETER Experiment Name: At_42deg_Heat_P Parameter: Plant Line Value: WS
  misc_feature: MA Experiment 20000171 PARAMETER Experiment Name: At_42deg_Heat_P Parameter: Temperature (deg C) Value: 42 vs. 22
  misc_feature: MA Experiment 20000171 PARAMETER Experiment Name: At_42deg_Heat_P Parameter: Timepoint (hr) Value: 1
  misc_feature: MA Experiment 20000171 PARAMETER Experiment Name: At_42deg_Heat_P Parameter: Tissue Value: Aerial
  misc_feature: MA Experiment ID: 20000173 Result: Down-regulated in Transcription
  misc_feature: MA Experiment 20000173 PARAMETER Experiment Name: At_42deg_Heat_P Parameter: Age (day) Value: 14
  misc_feature: MA Experiment 20000173 PARAMETER Experiment Name: At_42deg_Heat_P Parameter: Organism Value: A. thaliana
  misc_feature: MA Experiment 20000173 PARAMETER Experiment Name: At_42deg_Heat_P Parameter: Plant Line Value: WS
  misc_feature: MA Experiment 20000173 PARAMETER Experiment Name: At_42deg_Heat_P Parameter: Temperature (deg C) Value: 42 vs. 22
  misc_feature: MA Experiment 20000173 PARAMETER Experiment Name: At_42deg_Heat_P Parameter: Timepoint (hr) Value: 6
  misc_feature: MA Experiment 20000173 PARAMETER Experiment Name: At_42deg_Heat_P Parameter: Tissue Value: Aerial
  misc_feature: MA Experiment ID: 20000182 Result: Down-regulated in Transcription
  misc_feature: MA Experiment 20000182 PARAMETER Experiment Name: At_2mM_SA_P Parameter: Age (day) Value: 14
  misc_feature: MA Experiment 20000182 PARAMETER Experiment Name: At_2mM_SA_P Parameter: Organism Value: A. thaliana
  misc_feature: MA Experiment 20000182 PARAMETER Experiment Name: At_2mM_SA_P Parameter: Plant Line Value: WS
  misc_feature: MA Experiment 20000182 PARAMETER Experiment Name: At_2mM_SA_P Parameter: Timepoint (hr) Value: 6
  misc_feature: MA Experiment 20000182 PARAMETER Experiment Name: At_2mM_SA_P Parameter: Tissue Value: Aerial
  misc_feature: MA Experiment 20000182 PARAMETER Experiment Name: At_2mM_SA_P Parameter: Treatment Value: 2mM SA vs. No Treatment
  misc_feature: MA Experiment ID: 20000234 Result: Up-regulated in Transcription
  misc_feature: MA Experiment 20000234 PARAMETER Experiment Name: At_Siliques_P Parameter: Age (day) Value: 21
  misc_feature: MA Experiment 20000234 PARAMETER Experiment Name: At_Siliques_P Parameter: Organism Value: A. thaliana
  misc_feature: MA Experiment 20000234 PARAMETER Experiment Name: At_Siliques_P Parameter: Plant Line Value: WS
  misc_feature: MA Experiment 20000234 PARAMETER Experiment Name: At_Siliques_P Parameter: Tissue Value: Less Than 5mm Siliques vs. Whole Plant
  misc_feature: MA Experiment ID: 20000235 Result: Up-regulated in Transcription
  misc_feature: MA Experiment 20000235 PARAMETER Experiment Name: At_Siliques_P Parameter: Age (day) Value: 21
  misc_feature: MA Experiment 20000235 PARAMETER Experiment Name: At_Siliques_P Parameter: Organism Value: A. thaliana
  misc_feature: MA Experiment 20000235 PARAMETER Experiment Name: At_Siliques_P Parameter: Plant Line Value: WS
  misc_feature: MA Experiment 20000235 PARAMETER Experiment Name: At_Siliques_P Parameter: Tissue Value: 5-10mm Siliques vs. Whole Plant
  misc_feature: MA Experiment ID: 20000436 Result: Down-regulated in Transcription
  misc_feature: MA Experiment 20000436 PARAMETER Experiment Name: At_Drought_P Parameter: Age (day) Value: 7
  misc_feature: MA Experiment 20000436 PARAMETER Experiment Name: At_Drought_P Parameter: Organism Value: A. thaliana
  misc_feature: MA Experiment 20000436 PARAMETER Experiment Name: At_Drought_P Parameter: Plant Line Value: WS
  misc_feature: MA Experiment 20000436 PARAMETER Experiment Name: At_Drought_P Parameter: Timepoint (hr) Value: 12
  misc_feature: MA Experiment 20000436 PARAMETER Experiment Name: At_Drought_P Parameter: Tissue Value: Whole Plant
  misc_feature: MA Experiment 20000436 PARAMETER Experiment Name: At_Drought_P Parameter: Treatment Value: Drought vs. No Drought
  misc_feature: MA Experiment ID: 20000437 Result: Down-regulated in Transcription
  misc_feature: MA Experiment 20000437 PARAMETER Experiment Name: At_Drought_P Parameter: Age (day) Value: 8
  misc_feature: MA Experiment 20000437 PARAMETER Experiment Name: At_Drought_P Parameter: Organism Value: A. thaliana
  misc_feature: MA Experiment 20000437 PARAMETER Experiment Name: At_Drought_P Parameter: Plant Line Value: WS
  misc_feature: MA Experiment 20000437 PARAMETER Experiment Name: At_Drought_P Parameter: Timepoint (hr) Value: 24
  misc_feature: MA Experiment 20000437 PARAMETER Experiment Name: At_Drought_P Parameter: Tissue Value: Whole Plant
  misc_feature: MA Experiment 20000437 PARAMETER Experiment Name: At_Drought_P Parameter: Treatment Value: Drought vs. No Drought
  misc_feature: MA Experiment ID: 20001247 Result: Up-regulated in Transcription
  misc_feature: MA Experiment 20001247 PARAMETER Experiment Name: At_Far-red-induction_P Parameter: Age (day) Value: 7
  misc_feature: MA Experiment 20001247 PARAMETER Experiment Name: At_Far-red-induction_P Parameter: Light Value: Far-red vs. White
  misc_feature: MA Experiment 20001247 PARAMETER Experiment Name: At_Far-red-induction_P Parameter: Organism Value: A. thaliana
  misc_feature: MA Experiment 20001247 PARAMETER Experiment Name: At_Far-red-induction_P Parameter: Plant Line Value: Columbia
  misc_feature: MA Experiment 20001247 PARAMETER Experiment Name: At_Far-red-induction_P Parameter: Timepoint (hr) Value: 1
  misc_feature: MA Experiment 20001247 PARAMETER Experiment Name: At_Far-red-induction_P Parameter: Tissue Value: Whole Plant
  misc_feature: MA Experiment ID: 20001248 Result: Down-regulated in Transcription
  misc_feature: MA Experiment 20001248 PARAMETER Experiment Name: At_Far-red-induction_P Parameter: Age (day) Value: 7
  misc_feature: MA Experiment 20001248 PARAMETER Experiment Name: At_Far-red-induction_P Parameter: Light Value: Far-red vs. White
  misc_feature: MA Experiment 20001248 PARAMETER Experiment Name: At_Far-red-induction_P Parameter: Organism Value: A. thaliana
  misc_feature: MA Experiment 20001248 PARAMETER Experiment Name: At_Far-red-induction_P Parameter: Plant Line Value: Columbia
  misc_feature: MA Experiment 20001248 PARAMETER Experiment Name: At_Far-red-induction_P Parameter: Timepoint (hr) Value: 4
  misc_feature: MA Experiment 20001248 PARAMETER Experiment Name: At_Far-red-induction_P Parameter: Tissue Value: Whole Plant
  misc_feature: MA Experiment ID: 20001757 Result: Up-regulated in Transcription
  misc_feature: MA Experiment 20001757 PARAMETER Experiment Name: At_50mM_NH4NO3_L-to-H_P Parameter: Timepoint (hr) Value: 6
  misc_feature: MA Experiment 20001757 PARAMETER Experiment Name: At_50mM_NH4NO3_L-to-H_P Parameter: Tissue Value: Leaf
  misc_feature: MA Experiment 20001757 PARAMETER Experiment Name: At_50mM_NH4NO3_L-to-H_P Parameter: Treatment Value: 50mM NH4NO3 vs 100mM Mannitol
  misc_feature: MA Experiment ID: 20001906 Result: Down-regulated in Transcription
  misc_feature: MA Experiment 20001906 PARAMETER Experiment Name: At_Drought_Reproduction_P Parameter: Age (day) Value: 35
  misc_feature: MA Experiment 20001906 PARAMETER Experiment Name: At_Drought_Reproduction_P Parameter: Organism Value: A. thaliana
  misc_feature: MA Experiment 20001906 PARAMETER Experiment Name: At_Drought_Reproduction_P Parameter: Plant Line Value: WS
  misc_feature: MA Experiment 20001906 PARAMETER Experiment Name: At_Drought_Reproduction_P Parameter: Timepoint (day) Value: 5
  misc_feature: MA Experiment 20001906 PARAMETER Experiment Name: At_Drought_Reproduction_P Parameter: Tissue Value: Siliques
  misc_feature: MA Experiment 20001906 PARAMETER Experiment Name: At_Drought_Reproduction_P Parameter: Treatment Value: Drought vs. No Drought
  misc_feature: MA Experiment ID: 20001911 Result: Down-regulated in Transcription
  misc_feature: MA Experiment 20001911 PARAMETER Experiment Name: At_Drought_Reproduction_P Parameter: Age (day) Value: 40
  misc_feature: MA Experiment 20001911 PARAMETER Experiment Name: At_Drought_Reproduction_P Parameter: Organism Value: A. thaliana
  misc_feature: MA Experiment 20001911 PARAMETER Experiment Name: At_Drought_Reproduction_P Parameter: Plant Line Value: WS
  misc_feature: MA Experiment 20001911 PARAMETER Experiment Name: At_Drought_Reproduction_P Parameter: Timepoint (day) Value: 10
  misc_feature: MA Experiment 20001911 PARAMETER Experiment Name: At_Drought_Reproduction_P Parameter: Tissue Value: Flowers
  misc_feature: MA Experiment 20001911 PARAMETER Experiment Name: At_Drought_Reproduction_P Parameter: Treatment Value: Drought vs. No Drought
accgaaaaagataaaaactcacactttctctctctctctctagaaaaagaaagaaagaagaaaaacttattgttattcccatttcgcccctatccgaaaaatggttgaagctcaatcatggacaacgcggcggatgagcaatcctagattcgacgccgccgcaaccgccgcaccaaccatcgtagacatccccggaacaccaccacactcctccgcttcttcaccactcaaacccttcttcctctcttcccccaccgtatcaccaacaatcctcacggcggctataatcgccgcctggtttggctcaaatataggagtcctcctcttaaacaaataccttctcttctactacggtttccgttacccaatcttcctcaccatgacacacatgttatcatgcgccgcctatagctccgccgtaatcaatatcgccggaatcgtgccacgtcagcacatcttatctcgccgtcagtttctaaagatcctctctttgtcagcgatcttttgtctctccgtcgtctgtggcaacacttcgctacgttatatccctgtttcttttaatcaagctattggagctacgacgccgtttttcaccgccgtgttctcttttctcattacttgtaaaacagagtccactgaagtttatttagctcttcttccggttgtctccggcatcgttcttgcttctaactctgaaccttcttttcatctttttggtttccttatctgtgttgcttccaccgccggtagagctctcaaatccgtcgtccaggggattattctgacgtcggaatcggagaagctacattctatgaatcttttgctatacatggctccaatggcggcttgtatcttactaccatttacgctatacattgaaggaaacgttttaagagttctaatcgagaaagcgaggacggatccattgatcatcttcttgttagccgggaatgcgacagtggcatatttagtgaatttgacgaatttcttggtgacaaagcatacaagtgctctcacattgcaggttttggggaacggaaaagctgcggtggctgccggagtctcggttttgatatttaggaatccggtgacggtgatgggaatagccggatttggtgtgacgattatgggtgtggttctctatagcgaagctaggaagagatccaaattgctaaaccagaagtgaaaagtgtgaagagaaagattattggatttaaaccggtgaagtaatttttactttttaatttttacttcttttttttcggtttagtttcttgattctttggaattctgctattgtttggaaccggtttggttcgttttgagagggggaaaatcaatttaattgtaaatggttgagattggggaaaaactatgaaaagaaaagtggagatatatttatgtaacaaaagtgaaaaagtagggagcataattaaaggaaataagattgtatctttat

SEQ ID NO: 74621 - protein, 361 aa, Arabidopsis thaliana; identical to SEQ ID NO: 30110
  peptide (1)..(361): Ceres Seq. ID no. 5678674
  misc_feature (73)..(196): Pfam Name: Integral membrane protein DUF6 Pfam Description: Integral membrane protein DUF6
  misc_feature (1)..(361): Homolog of NCBI NO: 15221371 NR Description: hypothetical protein; protein id: At1g12500.1 thaliana] >gi|8778643|gb|AAF79651.1|AC025416_25 F5O11.25 thaliana] >gi|9502394|gb|AAF88101.1|AC025417_29 T12C24.5
  misc_feature (59)..(356): Homolog of NCBI NO: 27476065 NR Description: Putative phosphate/phosphoenolpyruvate
  misc_feature (59)..(356): Homolog of NCBI NO: 9759107 NR Description: phosphate/phosphoenolpyruvate translocator
  misc_feature (59)..(356): Homolog of NCBI NO: 30681126 NR Description: phosphate translocator-related [Arabidopsis
  misc_feature (48)..(354): Homolog of NCBI NO: 15237644 NR Description: phosphate/phosphoenolpyruvate translocator - like protein id: At5g04160.1, supported by cDNA: 100777., supported by
  misc_feature (48)..(354): Homolog of NCBI NO: 17064798 NR Description: phosphate/phosphoenolpyruvate translocator-like [Arabidopsis thaliana] >gi|20259810|gb|AAM13252.1|
  misc_feature (48)..(354): Homolog of NCBI NO: 15228248 NR Description: unknown protein; protein id: At3g10290.1 thaliana] >gi|6056196|gb|AAF02813.1|AC009400_9 unknown protein
  misc_feature (170)..(356): Homolog of NCBI NO: 15229717 NR Description: integral membrane protein, putative; protein id: [Arabidopsis thaliana] >gi|12321869|gb|AAG50965.1|AC073395_7
  misc_feature (59)..(307): Homolog of NCBI NO: 15229717 NR Description: integral membrane protein, putative; protein id: [Arabidopsis thaliana] >gi|12321869|gb|AAG50965.1|AC073395_7
  misc_feature (63)..(352): Homolog of NCBI NO: 18411611 NR Description: expressed protein; protein id: At1g77610.1, by cDNA: gi_13430497, supported by cDNA: gi_21281057 [Arabidopsis

SEQ ID NO: 74622 - protein, 350 aa, Arabidopsis thaliana; identical to SEQ ID NO: 30111
  peptide (1)..(350): Ceres Seq. ID no. 5678675
  misc_feature (62)..(185): Pfam Name: Integral membrane protein DUF6 Pfam Description: Integral membrane protein DUF6
  misc_feature (1)..(350): Homolog of NCBI NO: 15221371 NR Description: hypothetical protein; protein id: At1g12500.1 thaliana] >gi|8778643|gb|AAF79651.1|AC025416_25 F5O11.25 thaliana] >gi|9502394|gb|AAF88101.1|AC025417_29 T12C24.5
  misc_feature (48)..(345): Homolog of NCBI NO: 27476065 NR Description: Putative phosphate/phosphoenolpyruvate
  misc_feature (48)..(345): Homolog of NCBI NO: 9759107 NR Description: phosphate/phosphoenolpyruvate translocator
  misc_feature (48)..(345): Homolog of NCBI NO: 30681126 NR Description: phosphate translocator-related [Arabidopsis
  misc_feature (37)..(343): Homolog of NCBI NO: 15237644 NR Description: phosphate/phosphoenolpyruvate translocator - like protein id: At5g04160.1, supported by cDNA: 100777., supported by
  misc_feature (37)..(343): Homolog of NCBI NO: 17064798 NR Description: phosphate/phosphoenolpyruvate translocator-like [Arabidopsis thaliana] >gi|20259810|gb|AAM13252.1|
  misc_feature (37)..(343): Homolog of NCBI NO: 15228248 NR Description: unknown protein; protein id: At3g10290.1 thaliana] >gi|6056196|gb|AAF02813.1|AC009400_9 unknown protein
  misc_feature (159)..(345): Homolog of NCBI NO: 15229717 NR Description: integral membrane protein, putative; protein id: [Arabidopsis thaliana] >gi|12321869|gb|AAG50965.1|AC073395_7
  misc_feature (48)..(296): Homolog of NCBI NO: 15229717 NR Description: integral membrane protein, putative; protein id: [Arabidopsis thaliana] >gi|12321869|gb|AAG50965.1|AC073395_7
  misc_feature (52)..(341): Homolog of NCBI NO: 18411611 NR Description: expressed protein; protein id: At1g77610.1, by cDNA: gi_13430497, supported by cDNA: gi_21281057 [Arabidopsis

SEQ ID NO: 74623 - protein, 268 aa, Arabidopsis thaliana; identical to SEQ ID NO: 30112
  peptide (1)..(268): Ceres Seq. ID no. 5678676
  misc_feature (1)..(103): Pfam Name: Integral membrane protein DUF6 Pfam Description: Integral membrane protein DUF6
  misc_feature (1)..(268): Homolog of NCBI NO: 15221371 NR Description: hypothetical protein; protein id: At1g12500.1 thaliana] >gi|8778643|gb|AAF79651.1|AC025416_25 F5O11.25 thaliana] >gi|9502394|gb|AAF88101.1|AC025417_29 T12C24.5
  misc_feature (1)..(263): Homolog of NCBI NO: 27476065 NR Description: Putative phosphate/phosphoenolpyruvate
  misc_feature (1)..(263): Homolog of NCBI NO: 9759107 NR Description: phosphate/phosphoenolpyruvate translocator
  misc_feature (1)..(263): Homolog of NCBI NO: 30681126 NR Description: phosphate translocator-related [Arabidopsis
  misc_feature (1)..(261): Homolog of NCBI NO: 15237644 NR Description: phosphate/phosphoenolpyruvate translocator - like protein id: At5g04160.1, supported by cDNA: 100777., supported by
  misc_feature (1)..(261): Homolog of NCBI NO: 17064798 NR Description: phosphate/phosphoenolpyruvate translocator-like [Arabidopsis thaliana] >gi|20259810|gb|AAM13252.1|
  misc_feature (1)..(261): Homolog of NCBI NO: 15228248 NR Description: unknown protein; protein id: At3g10290.1 thaliana] >gi|6056196|gb|AAF02813.1|AC009400_9 unknown protein
  misc_feature (77)..(263): Homolog of NCBI NO: 15229717 NR Description: integral membrane protein, putative; protein id: [Arabidopsis thaliana] >gi|12321869|gb|AAG50965.1|AC073395_7
  misc_feature (1)..(214): Homolog of NCBI NO: 15229717 NR Description: integral membrane protein, putative; protein id: [Arabidopsis thaliana] >gi|12321869|gb|AAG50965.1|AC073395_7
  misc_feature (1)..(259): Homolog of NCBI NO: 18411611 NR Description: expressed protein; protein id: At1g77610.1, by cDNA: gi_13430497, supported by cDNA: gi_21281057 [Arabidopsis

SEQ ID NO: 74624 - DNA, 609 bp, Arabidopsis thaliana
  misc_feature (1)..(609): Ceres Seq. ID no. 5678724
  misc_feature: MA Experiment ID: 108434 Result: Down-regulated in Transcription
  misc_feature: MA Experiment 108434 PARAMETER Experiment Name: At_Root_Tips_cDNA_P Parameter: Tissue Value: Root Tips
  misc_feature: MA Experiment ID: 108488 Result: Down-regulated in Transcription
  misc_feature: MA Experiment ID: 108595 Result: Up-regulated in Transcription
  misc_feature: MA Experiment 108595 PARAMETER Experiment Name: At_Ler-pi_Ovule_cDNA_P Parameter: Plant Line Value: null
  misc_feature: MA Experiment ID: 108605 Result: Up-regulated in Transcription
  misc_feature: MA Experiment 108605 PARAMETER Experiment Name: At_100uM_ABA_cDNA_P Parameter: Timepoint (hr) Value: 6
  misc_feature: MA Experiment 108605 PARAMETER Experiment Name: At_100uM_ABA_cDNA_P Parameter: Tissue Value: Aerial
  misc_feature: MA Experiment 108605 PARAMETER Experiment Name: At_100uM_ABA_cDNA_P Parameter: Treatment Value: 100uM ABA vs. No Treatment
  misc_feature: MA Experiment ID: 108607 Result: Up-regulated in Transcription
  misc_feature: MA Experiment 108607 PARAMETER Experiment Name: At_100uM_ABA_cDNA_P Parameter: Timepoint (hr) Value: 4
  misc_feature: MA Experiment 108607 PARAMETER Experiment Name: At_100uM_ABA_cDNA_P Parameter: Tissue Value: Aerial
  misc_feature: MA Experiment 108607 PARAMETER Experiment Name: At_100uM_ABA_cDNA_P Parameter: Treatment Value: 100uM ABA vs. No Treatment
  misc_feature: MA Experiment ID: 108609 Result: Up-regulated in Transcription
  misc_feature: MA Experiment 108609 PARAMETER Experiment Name: At_100uM_ABA_cDNA_P Parameter: Timepoint (hr) Value: 24
  misc_feature: MA Experiment 108609 PARAMETER Experiment Name: At_100uM_ABA_cDNA_P Parameter: Tissue Value: Aerial
  misc_feature: MA Experiment 108609 PARAMETER Experiment Name: At_100uM_ABA_cDNA_P Parameter: Treatment Value: 100uM ABA vs. No Treatment
  misc_feature: MA Experiment ID: 108668 Result: Up-regulated in Transcription
  misc_feature: MA Experiment 108668 PARAMETER Experiment Name: At_2mM_SA_cDNA_P Parameter: Plant Line Value: WS
  misc_feature: MA Experiment 108668 PARAMETER Experiment Name: At_2mM_SA_cDNA_P Parameter: Timepoint (hr) Value: 6
  misc_feature: MA Experiment 108668 PARAMETER Experiment Name: At_2mM_SA_cDNA_P Parameter: Treatment Value: 2mM SA vs. No Treatment
  misc_feature: MA Experiment ID: 20000180 Result: Up-regulated in Transcription
  misc_feature: MA Experiment 20000180 PARAMETER Experiment Name: At_Germinating_Seeds_P Parameter: Age (hr) Value: 24 vs. 0
  misc_feature: MA Experiment 20000180 PARAMETER Experiment Name: At_Germinating_Seeds_P Parameter: Tissue Value: Germinating Seeds
  misc_feature: MA Experiment ID: 20001248 Result: Down-regulated in Transcription
  misc_feature: MA Experiment 20001248 PARAMETER Experiment Name: At_Far-red-induction_P Parameter: Age (day) Value: 7
  misc_feature: MA Experiment 20001248 PARAMETER Experiment Name: At_Far-red-induction_P Parameter: Light Value: Far-red vs. White
  misc_feature: MA Experiment 20001248 PARAMETER Experiment Name: At_Far-red-induction_P Parameter: Organism Value: A. thaliana
  misc_feature: MA Experiment 20001248 PARAMETER Experiment Name: At_Far-red-induction_P Parameter: Plant Line Value: Columbia
  misc_feature: MA Experiment 20001248 PARAMETER Experiment Name: At_Far-red-induction_P Parameter: Timepoint (hr) Value: 4
  misc_feature: MA Experiment 20001248 PARAMETER Experiment Name: At_Far-red-induction_P Parameter: Tissue Value: Whole Plant
  misc_feature: MA Experiment ID: 20001557 Result: Down-regulated in Transcription
  misc_feature: MA Experiment 20001557 PARAMETER Experiment Name: At_Drought_Soil_Dry_P Parameter: Age (day) Value: 27
  misc_feature: MA Experiment 20001557 PARAMETER Experiment Name: At_Drought_Soil_Dry_P Parameter: Organism Value: A. thaliana
  misc_feature: MA Experiment 20001557 PARAMETER Experiment Name: At_Drought_Soil_Dry_P Parameter: Plant Line Value: WS
  misc_feature: MA Experiment 20001557 PARAMETER Experiment Name: At_Drought_Soil_Dry_P Parameter: Post Timepoint (hr) Value: 3
  misc_feature: MA Experiment 20001557 PARAMETER Experiment Name: At_Drought_Soil_Dry_P Parameter: Post-Treatment Value: Re-Water vs. No Drought
  misc_feature: MA Experiment 20001557 PARAMETER Experiment Name: At_Drought_Soil_Dry_P Parameter: Timepoint (day) Value: 13
  misc_feature: MA Experiment 20001557 PARAMETER Experiment Name: At_Drought_Soil_Dry_P Parameter: Treatment Value: Drought vs. No Drought
  misc_feature: MA Experiment ID: 20001558 Result: Down-regulated in Transcription
  misc_feature: MA Experiment 20001558 PARAMETER Experiment Name: At_Drought_Soil_Dry_P Parameter: Age (day) Value: 27
  misc_feature: MA Experiment 20001558 PARAMETER Experiment Name: At_Drought_Soil_Dry_P Parameter: Organism Value: A. thaliana
  misc_feature: MA Experiment 20001558 PARAMETER Experiment Name: At_Drought_Soil_Dry_P Parameter: Plant Line Value: WS
  misc_feature: MA Experiment 20001558 PARAMETER Experiment Name: At_Drought_Soil_Dry_P Parameter: Post Timepoint (hr) Value: 6
  misc_feature: MA Experiment 20001558 PARAMETER Experiment Name: At_Drought_Soil_Dry_P Parameter: Post-Treatment Value: Re-Water vs. No Drought
  misc_feature: MA Experiment 20001558 PARAMETER Experiment Name: At_Drought_Soil_Dry_P Parameter: Timepoint (day) Value: 13
  misc_feature: MA Experiment 20001558 PARAMETER Experiment Name: At_Drought_Soil_Dry_P Parameter: Treatment Value: Drought vs. No Drought
atcttcaccaaattctctcaatcactcatcaatggcgatttctcaagctcagcctctgcttcttctcctcttatcagtcttcttcttacctgctttgcacgccacttctttcacctactgcgataagaggctcgatcccgttaaggtcacgggtgtgaagatctcccctgaccctgttgtgagtggtgcagccgcaacatttaagatttttggttctactggcgaagacatctctggaggaaaagtagtgatcagggttttatacgttgggattcctgtccataccgaaactcatgacctctgcgatgagacggcatgtccggttgcacctggcagctttgtgctttctcattctcaaacactcccttcaattacaccacctggtacttacacgctaaagatgacaatcaacgacaagaatggcggaagactaacgtgtatcagcttcaaattcaagatcacagtaggttctgcggtctttgctagttaagttttatggtgtaaattgtgtctttgtgaatctctctctcgtttacttttgtggtgtccaaataaagaatgctctttagagacttgagttgatctacatgaaacaaagagtcacaaacc

SEQ ID NO: 74625 - protein, 162 aa, Arabidopsis thaliana
  peptide (1)..(162): Ceres Seq. ID no. 5678725
  misc_feature (33)..(153): Pfam Name: ML domain Pfam Description: ML domain
  misc_feature (11)..(162): Homolog of NCBI NO: 15229872 NR Description: putative protein; protein id: At3g44100.1, by cDNA: 5597. [Arabidopsis thaliana] >gi|11357670|pir||T49126
  misc_feature (22)..(159): Homolog of NCBI NO: 18399355 NR Description: expressed protein; protein id: At3g11780.1, by cDNA: 250294., supported by cDNA: gi_14334429 [Arabidopsis >gi|6671934|gb|AAF23194.1|AC016795_7 unknown protein [Arabidopsis
  misc_feature (22)..(159): Homolog of NCBI NO: 21554315 NR Description: unknown [Arabidopsis thaliana]
  misc_feature (11)..(153): Homolog of NCBI NO: 34899866 NR Description: OJ1714_H10.15 [Oryza sativa (japonica
  misc_feature (18)..(159): Homolog of NCBI NO: 15240063 NR Description: putative protein; protein id: At5g06480.1, by cDNA: 5127. [Arabidopsis thaliana] contains similarity to unknown
  misc_feature (18)..(159): Homolog of NCBI NO: 21593850 NR Description: unknown [Arabidopsis thaliana]
  misc_feature (11)..(154): Homolog of NCBI NO: 21618166 NR Description: unknown [Arabidopsis thaliana]
  misc_feature (11)..(154): Homolog of NCBI NO: 18397991 NR Description: Expressed protein; protein id: At2g16005.1, by cDNA: 994., supported by cDNA: gi_13605717, supported by cDNA: [Arabidopsis thaliana] >gi|13605718|gb|AAK32852.1|AF361840_1
  misc_feature (11)..(157): Homolog of NCBI NO: 22330033 NR Description: unknown protein; protein id: At1g45015.1 thaliana] >gi|7767658|gb|AAF69155.1|AC007915_7 F27F5.10
  misc_feature (39)..(147): Homolog of NCBI NO: 4322563 NR Description: phosphatidylglycerol/phosphatidylinositol protein [Aspergillus oryzae] phosphatidylglycerol/phosphatidylinositol transfer protein
SSPNSLNHSSMAISQAQPLLLLLLSVFFLPALHATSFTYCDKRLDPVKVTGVKISPDPVVSGAAATFKIFGSTGEDISGGKVVIRVLYVGIPVHTETHDLCDETACPVAPGSFVLSHSQTLPSITPPGTYTLKMTINDKNGGRLTCISFKFKITVGSAVFAS

SEQ ID NO: 74626 - protein, 152 aa, Arabidopsis thaliana; identical to SEQ ID NO: 27165
  peptide (1)..(152): Ceres Seq. ID no. 5678726
  misc_feature (23)..(143): Pfam Name: ML domain Pfam Description: ML domain
  misc_feature (1)..(152): Homolog of NCBI NO: 15229872 NR Description: putative protein; protein id: At3g44100.1, by cDNA: 5597. [Arabidopsis thaliana] >gi|11357670|pir||T49126
  misc_feature (12)..(149): Homolog of NCBI NO: 18399355 NR Description: expressed protein; protein id: At3g11780.1, by cDNA: 250294., supported by cDNA: gi_14334429 [Arabidopsis >gi|6671934|gb|AAF23194.1|AC016795_7 unknown protein [Arabidopsis
  misc_feature (12)..(149): Homolog of NCBI NO: 21554315 NR Description: unknown [Arabidopsis thaliana]
  misc_feature (1)..(143): Homolog of NCBI NO: 34899866 NR Description: OJ1714_H10.15 [Oryza sativa (japonica
  misc_feature (8)..(149): Homolog of NCBI NO: 15240063 NR Description: putative protein; protein id: At5g06480.1, by cDNA: 5127. [Arabidopsis thaliana] contains similarity to unknown
  misc_feature (8)..(149): Homolog of NCBI NO: 21593850 NR Description: unknown [Arabidopsis thaliana]
  misc_feature (1)..(144): Homolog of NCBI NO: 21618166 NR Description: unknown [Arabidopsis thaliana]
  misc_feature (1)..(144): Homolog of NCBI NO: 18397991 NR Description: Expressed protein; protein id: At2g16005.1, by cDNA: 994., supported by cDNA: gi_13605717, supported by cDNA: [Arabidopsis thaliana] >gi|13605718|gb|AAK32852.1|AF361840_1
  misc_feature (1)..(147): Homolog of NCBI NO: 22330033 NR Description: unknown protein; protein id: At1g45015.1 thaliana] >gi|7767658|gb|AAF69155.1|AC007915_7 F27F5.10
  misc_feature (29)..(137): Homolog of NCBI NO: 4322563 NR Description: phosphatidylglycerol/phosphatidylinositol protein [Aspergillus oryzae] phosphatidylglycerol/phosphatidylinositol transfer protein

SEQ ID NO: 74627 - DNA, 1186 bp, Arabidopsis thaliana
  misc_feature (1)..(1186): Ceres Seq. ID no. 5678751
  misc_feature: MA Experiment ID: 108595 Result: Up-regulated in Transcription
  misc_feature: MA Experiment 108595 PARAMETER Experiment Name: At_Ler-pi_Ovule_cDNA_P Parameter: Plant Line Value: null
actaatctctctctccctctctttcttcttcttccacaaatggcttcttgcgtcaccggaacagaggcagcaatcagagcagcggcatgtagagacggcgaagaagcctctcatctaaagatagtcgccgtcttcgccatctttctcacaagcgttttcggagtttggggaccagttttactcgctaaatactttcatggtaaacctctgtacgataaagcaattcttgtgataaagtgtttcgccgccggcgtgattctctcgacgtctttagtccacgttttaccggaagcgtttgagtcactcgctgattgccaagtgtcgtcacgtcatccatggaaagattttccgtttgctggtttagttacgatgatcggagctataacggctttgttggttgatttaacggcgagtgaacatatgggacacggtggtggtggtggtggtgacggagggatggagtatatgccggtgggtaaggcggttggagggttagaaatgaaagaaggaaagtgtggggctgatttggaaatacaagaaaatagtgaggaggaaattgtgaagatgaaacaaagattagtgtcacaagttcttgaaatagggattatatttcattcggtgataattggagtaacaatgggaatgtcacaaaataagtgtaccattagacctttgattgctgcgctttcttttcatcagatttttgaaggtttgggtcttggtggttgcattgctcaggctgggtttaaggcagggacagtggtgtatatgtgcttaatgttcgcggtaacaacgccactcgggattgtactagggatggtgatatttgcagcgaccgggtacgatgatcagaacccgaacgcattgataatggagggtttattgggatcattctcttcaggtattctaatatacatggccttggttgacctaattgcattggatttcttccataacaagatgctgacgacttgcggtgaatcgggttctcgcctcaagaagctttgttttgtggctttggttttaggttctgcctctatgtcactacttgctctttgggcttagacaaaaagaatttaaggttatatactaatttggccacaggaaatagtatgaatacctaaacctgttttaacatatttgaactttggtttactttataaatatatctaattatcatttcttc

SEQ ID NO: 74628 - protein, 354 aa, Arabidopsis thaliana
  peptide (1)..(354): Ceres Seq. ID no. 5678752
  misc_feature (37)..(351): Pfam Name: ZIP Zinc transporter Pfam Description: ZIP Zinc transporter
  misc_feature (14)..(354): Homolog of NCBI NO: 15227702 NR Description: putative Fe(II) transport protein; protein id: [Arabidopsis thaliana] >gi|7487926|pir||T02478 iron transport
  misc_feature (14)..(354): Homolog of NCBI NO: 40782197 NR Description: zinc transporter ZIP6 [Arabidopsis halleri subsp.
  misc_feature (183)..(354): Homolog of NCBI NO: 40888872 NR Description: TPA: putative ZIP-like protein [Oryza sativa
  misc_feature (140)..(354): Homolog of NCBI NO: 32816615 NR Description: putative zinc transporter [Oryza sativa (japonica
  misc_feature (27)..(138): Homolog of NCBI NO: 32816615 NR Description: putative zinc transporter [Oryza sativa (japonica
  misc_feature (140)..(354): Homolog of NCBI NO: 40888854 NR Description: TPA: putative ZIP-like protein [Oryza sativa
  misc_feature (27)..(138): Homolog of NCBI NO: 40888854 NR Description: TPA: putative ZIP-like protein [Oryza sativa
  misc_feature (7)..(354): Homolog of NCBI NO: 30841912 NR Description: putative zinc transporter OsZIP2 [Oryza sativa]
  misc_feature (29)..(354): Homolog of NCBI NO: 7488829 NR Description: probable Fe(II) transport protein, root - garden >gi|3153889|gb|AAC17441.1| root iron transporter protein [Pisum
  misc_feature (27)..(354): Homolog of NCBI NO: 32966053 NR Description: iron transporter Fe2 [Oryza sativa (japonica
TNLSLPLFLLLPQMASCVTGTEAAIRAAACRDGEEASHLKIVAVFAIFLTSVFGVWGPVLLAKYFHGKPLYDKAILVIKCFAAGVILSTSLVHVLPEAFESLADCQVSSRHPWKDFPFAGLVTMIGAITALLVDLTASEHMGHGGGGGGDGGMEYMPVGKAVGGLEMKEGKCGADLEIQENSEEEIVKMKQRLVSQVLEIGIIFHSVIIGVTMGMSQNKCTIRPLIAALSFHQIFEGLGLGGCIAQAGFKAGTVVYMCLMFAVTTPLGIVLGMVIFAATGYDDQNPNALIMEGLLGSFSSGILIYMALVDLIALDFFHNKMLTTCGESGSRLKKLCFVALVLGSASMSLLALWA

SEQ ID NO: 74629 - protein, 341 aa, Arabidopsis thaliana; identical to SEQ ID NO: 74397
  peptide (1)..(341): Ceres Seq. ID no. 5678753
  misc_feature (24)..(338): Pfam Name: ZIP Zinc transporter Pfam Description: ZIP Zinc transporter
  misc_feature (1)..(341): Homolog of NCBI NO: 15227702 NR Description: putative Fe(II) transport protein; protein id: [Arabidopsis thaliana] >gi|7487926|pir||T02478 iron transport
  misc_feature (1)..(341): Homolog of NCBI NO: 40782197 NR Description: zinc transporter ZIP6 [Arabidopsis halleri subsp.
  misc_feature (170)..(341): Homolog of NCBI NO: 40888872 NR Description: TPA: putative ZIP-like protein [Oryza sativa
  misc_feature (127)..(341): Homolog of NCBI NO: 32816615 NR Description: putative zinc transporter [Oryza sativa (japonica
  misc_feature (14)..(125): Homolog of NCBI NO: 32816615 NR Description: putative zinc transporter [Oryza sativa (japonica
  misc_feature (127)..(341): Homolog of NCBI NO: 40888854 NR Description: TPA: putative ZIP-like protein [Oryza sativa
  misc_feature (14)..(125): Homolog of NCBI NO: 40888854 NR Description: TPA: putative ZIP-like protein [Oryza sativa
  misc_feature (1)..(341): Homolog of NCBI NO: 30841912 NR Description: putative zinc transporter OsZIP2 [Oryza sativa]
  misc_feature (16)..(341): Homolog of NCBI NO: 7488829 NR Description: probable Fe(II) transport protein, root - garden >gi|3153889|gb|AAC17441.1| root iron transporter protein [Pisum
  misc_feature (14)..(341): Homolog of NCBI NO: 32966053 NR Description: iron transporter Fe2 [Oryza sativa (japonica

SEQ ID NO: 74630 - protein, 231 aa, Arabidopsis thaliana; identical to SEQ ID NO: 26937
  peptide (1)..(231): Ceres Seq. ID no. 5678754
  misc_feature (1)..(228): Pfam Name: ZIP Zinc transporter Pfam Description: ZIP Zinc transporter
  misc_feature (1)..(231): Homolog of NCBI NO: 15227702 NR Description: putative Fe(II) transport protein; protein id: [Arabidopsis thaliana] >gi|7487926|pir||T02478 iron transport
  misc_feature (1)..(231): Homolog of NCBI NO: 40782197 NR Description: zinc transporter ZIP6 [Arabidopsis halleri subsp.
  misc_feature (60)..(231): Homolog of NCBI NO: 40888872 NR Description: TPA: putative ZIP-like protein [Oryza sativa
  misc_feature (17)..(231): Homolog of NCBI NO: 32816615 NR Description: putative zinc transporter [Oryza sativa (japonica
  misc_feature (1)..(15): Homolog of NCBI NO: 32816615 NR Description: putative zinc transporter [Oryza sativa (japonica
  misc_feature (17)..(231): Homolog of NCBI NO: 40888854 NR Description: TPA: putative ZIP-like protein [Oryza sativa
  misc_feature (1)..(15): Homolog of NCBI NO: 40888854 NR Description: TPA: putative ZIP-like protein [Oryza sativa
  misc_feature (1)..(231): Homolog of NCBI NO: 30841912 NR Description: putative zinc transporter OsZIP2 [Oryza sativa]
  misc_feature (1)..(231): Homolog of NCBI NO: 7488829 NR Description: probable Fe(II) transport protein, root - garden >gi|3153889|gb|AAC17441.1| root iron transporter protein [Pisum
  misc_feature (1)..(231): Homolog of NCBI NO: 32966053 NR Description: iron transporter Fe2 [Oryza sativa (japonica

SEQ ID NO: 74631 - DNA, 1139 bp, Arabidopsis thaliana
  misc_feature (1)..(1139): Ceres Seq. ID no. 5678793
  misc_feature: MA Experiment ID: 20000173 Result: Down-regulated in Transcription
  misc_feature: MA Experiment 20000173 PARAMETER Experiment Name: At_42deg_Heat_P Parameter: Age (day) Value: 14
  misc_feature: MA Experiment 20000173 PARAMETER Experiment Name: At_42deg_Heat_P Parameter: Organism Value: A. thaliana
  misc_feature: MA Experiment 20000173 PARAMETER Experiment Name: At_42deg_Heat_P Parameter: Plant Line Value: WS
  misc_feature: MA Experiment 20000173 PARAMETER Experiment Name: At_42deg_Heat_P Parameter: Temperature (deg C) Value: 42 vs. 22
  misc_feature: MA Experiment 20000173 PARAMETER Experiment Name: At_42deg_Heat_P Parameter: Timepoint (hr) Value: 6
  misc_feature: MA Experiment 20000173 PARAMETER Experiment Name: At_42deg_Heat_P Parameter: Tissue Value: Aerial
  misc_feature: MA Experiment ID: 20000185 Result: Down-regulated in Transcription
  misc_feature: MA Experiment 20000185 PARAMETER Experiment Name: At_Roots__P Parameter: Age (day) Value: 7 vs. 21
  misc_feature: MA Experiment 20000185 PARAMETER Experiment Name: At_Roots__P Parameter: Organism Value: A. thaliana
  misc_feature: MA Experiment 20000185 PARAMETER Experiment Name: At_Roots__P Parameter: Tissue Value: Roots vs. Whole Plant
  misc_feature: MA Experiment ID: 20000227 Result: Down-regulated in Transcription
  misc_feature: MA Experiment 20000227 PARAMETER Experiment Name: At_Root-Tips-vs-Tops_P Parameter: Tissue Value: Root Tips vs. Root Tops
  misc_feature: MA Experiment ID: 20000573 Result: Down-regulated in Transcription
  misc_feature: MA Experiment 20000573 PARAMETER Experiment Name: At_100uM_ABA_Mutants__P Parameter: Organism Value: A. thaliana
  misc_feature: MA Experiment 20000573 PARAMETER Experiment Name: At_100uM_ABA_Mutants__P Parameter: Plant Line Value: CS22 vs. Ler wt
  misc_feature: MA Experiment 20000573 PARAMETER Experiment Name: At_100uM_ABA_Mutants__P Parameter: Timepoint (hr) Value: N/A
  misc_feature: MA Experiment 20000573 PARAMETER Experiment Name: At_100uM_ABA_Mutants__P Parameter: Tissue Value: Whole Plant
  misc_feature: MA Experiment 20000573 PARAMETER Experiment Name: At_100uM_ABA_Mutants__P Parameter: Treatment Value: None
  misc_feature: MA Experiment ID: 20000574 Result: Down-regulated in Transcription
  misc_feature: MA Experiment 20000574 PARAMETER Experiment Name: At_100uM_ABA_Mutants__P Parameter: Organism Value: A. thaliana
  misc_feature: MA Experiment 20000574 PARAMETER Experiment Name: At_100uM_ABA_Mutants__P Parameter: Plant Line Value: CS23 vs. Ler wt
  misc_feature: MA Experiment 20000574 PARAMETER Experiment Name: At_100uM_ABA_Mutants__P Parameter: Timepoint (hr) Value: N/A
  misc_feature: MA Experiment 20000574 PARAMETER Experiment Name: At_100uM_ABA_Mutants__P Parameter: Tissue Value: Whole Plant
  misc_feature: MA Experiment 20000574 PARAMETER Experiment Name: At_100uM_ABA_Mutants__P Parameter: Treatment Value: None
  misc_feature: MA Experiment ID: 20000709 Result: Down-regulated in Transcription
  misc_feature: MA Experiment 20000709 PARAMETER Experiment Name: At_15mM_NH4NO3_L-to-H_P Parameter: Age (hr) Value: 14
  misc_feature: MA Experiment 20000709 PARAMETER Experiment Name: At_15mM_NH4NO3_L-to-H_P Parameter: Organism Value: A. thaliana
  misc_feature: MA Experiment 20000709 PARAMETER Experiment Name: At_15mM_NH4NO3_L-to-H_P Parameter: Plant Line Value: WS
  misc_feature: MA Experiment 20000709 PARAMETER Experiment Name: At_15mM_NH4NO3_L-to-H_P Parameter: Timepoint (hr) Value: 4
  misc_feature: MA Experiment 20000709 PARAMETER Experiment Name: At_15mM_NH4NO3_L-to-H_P Parameter: Tissue Value: Aerial
  misc_feature: MA Experiment 20000709 PARAMETER Experiment Name: At_15mM_NH4NO3_L-to-H_P Parameter: Treatment Value: 15mM NH4NO3 vs. 30mM Mannitol
  misc_feature: MA Experiment ID: 20000794 Result: Down-regulated in Transcription
  misc_feature: MA Experiment 20000794 PARAMETER Experiment Name: At_Petals_P Parameter: Age (day) Value: 23-25 days
  misc_feature: MA Experiment 20000794 PARAMETER Experiment Name: At_Petals_P Parameter: Plant Line Value: WS
  misc_feature: MA Experiment 20000794 PARAMETER Experiment Name: At_Petals_P Parameter: Tissue Value: Petals vs. Whole plant
  misc_feature: MA Experiment ID: 20001557 Result: Down-regulated in Transcription
  misc_feature: MA Experiment 20001557 PARAMETER Experiment Name: At_Drought_Soil_Dry_P Parameter: Age (day) Value: 27
  misc_feature: MA Experiment 20001557 PARAMETER Experiment Name: At_Drought_Soil_Dry_P Parameter: Organism Value: A. thaliana
  misc_feature: MA Experiment 20001557 PARAMETER Experiment Name: At_Drought_Soil_Dry_P Parameter: Plant Line Value: WS
  misc_feature: MA Experiment 20001557 PARAMETER Experiment Name: At_Drought_Soil_Dry_P Parameter: Post Timepoint (hr) Value: 3
  misc_feature: MA Experiment 20001557 PARAMETER Experiment Name: At_Drought_Soil_Dry_P Parameter: Post-Treatment Value: Re-Water vs. No Drought
  misc_feature: MA Experiment 20001557 PARAMETER Experiment Name: At_Drought_Soil_Dry_P Parameter: Timepoint (day) Value: 13
  misc_feature: MA Experiment 20001557 PARAMETER Experiment Name: At_Drought_Soil_Dry_P Parameter: Treatment Value: Drought vs. No Drought
  misc_feature: MA Experiment ID: 20001558 Result: Down-regulated in Transcription
  misc_feature: MA Experiment 20001558 PARAMETER Experiment Name: At_Drought_Soil_Dry_P Parameter: Age (day) Value: 27
  misc_feature: MA Experiment 20001558 PARAMETER Experiment Name: At_Drought_Soil_Dry_P Parameter: Organism Value: A. thaliana
  misc_feature: MA Experiment 20001558 PARAMETER Experiment Name: At_Drought_Soil_Dry_P Parameter: Plant Line Value: WS
  misc_feature: MA Experiment 20001558 PARAMETER Experiment Name: At_Drought_Soil_Dry_P Parameter: Post Timepoint (hr) Value: 6
  misc_feature: MA Experiment 20001558 PARAMETER Experiment Name: At_Drought_Soil_Dry_P Parameter: Post-Treatment Value: Re-Water vs. No Drought
  misc_feature: MA Experiment 20001558 PARAMETER Experiment Name: At_Drought_Soil_Dry_P Parameter: Timepoint (day) Value: 13
  misc_feature: MA Experiment 20001558 PARAMETER Experiment Name: At_Drought_Soil_Dry_P Parameter: Treatment Value: Drought vs. No Drought
  misc_feature: MA Experiment ID: 20001560 Result: Down-regulated in Transcription
  misc_feature: MA Experiment 20001560 PARAMETER Experiment Name: At_Drought_Soil_Dry_P Parameter: Age (day) Value: 28
  misc_feature: MA Experiment 20001560 PARAMETER Experiment Name: At_Drought_Soil_Dry_P Parameter: Organism Value: A. thaliana
  misc_feature: MA Experiment 20001560 PARAMETER Experiment Name: At_Drought_Soil_Dry_P Parameter: Plant Line Value: WS
  misc_feature: MA Experiment 20001560 PARAMETER Experiment Name: At_Drought_Soil_Dry_P Parameter: Post Timepoint (hr) Value: None
  misc_feature: MA Experiment 20001560 PARAMETER Experiment Name: At_Drought_Soil_Dry_P Parameter: Post-Treatment Value: None
  misc_feature: MA Experiment 20001560 PARAMETER Experiment Name: At_Drought_Soil_Dry_P Parameter: Timepoint (day) Value: 14
  misc_feature: MA Experiment 20001560 PARAMETER Experiment Name: At_Drought_Soil_Dry_P Parameter: Treatment Value: Drought vs. No Drought
  misc_feature: MA Experiment ID: 20001904 Result: Down-regulated in Transcription
  misc_feature: MA Experiment 20001904 PARAMETER Experiment Name: At_Drought_Reproduction_P Parameter: Age (day) Value: 37
  misc_feature: MA Experiment 20001904 PARAMETER Experiment Name: At_Drought_Reproduction_P Parameter: Organism Value: A. thaliana
  misc_feature: MA Experiment 20001904 PARAMETER Experiment Name: At_Drought_Reproduction_P Parameter: Plant Line Value: WS
  misc_feature: MA Experiment 20001904 PARAMETER Experiment Name: At_Drought_Reproduction_P Parameter: Timepoint (day) Value: 7
  misc_feature: MA Experiment 20001904 PARAMETER Experiment Name: At_Drought_Reproduction_P Parameter: Tissue Value: Rosettes
  misc_feature: MA Experiment 20001904 PARAMETER Experiment Name: At_Drought_Reproduction_P Parameter: Treatment Value: Drought vs. No Drought
  misc_feature: MA Experiment ID: 20001905 Result: Down-regulated in Transcription
  misc_feature: MA Experiment 20001905 PARAMETER Experiment Name: At_Drought_Reproduction_P Parameter: Age (day) Value: 40
  misc_feature: MA Experiment 20001905 PARAMETER Experiment Name: At_Drought_Reproduction_P Parameter: Organism Value: A. thaliana
  misc_feature: MA Experiment 20001905 PARAMETER Experiment Name: At_Drought_Reproduction_P Parameter: Plant Line Value: WS
  misc_feature: MA Experiment 20001905 PARAMETER Experiment Name: At_Drought_Reproduction_P Parameter: Timepoint (day) Value: 10
  misc_feature: MA Experiment 20001905 PARAMETER Experiment Name: At_Drought_Reproduction_P Parameter: Tissue Value: Rosettes
  misc_feature: MA Experiment 20001905 PARAMETER Experiment Name: At_Drought_Reproduction_P Parameter: Treatment Value: Drought vs. No Drought
caatcatctgatctttccctctctcagcaatgcatgatcttcgattttctatcagtgttcaaagctgaaaaaaatcgaactgggtctgttgatttcttcaggtctaaaatcagattagattagagaagaagaagaagaatgctggaagctgtagatagctcaggagtggtgaatggaggattcccgcagattcagagcttttacggcgattgcagtagtgaagaagagttatcggtattgccacgtcatacaaaagtggtggtcaccggaaacaaccggacgaaatcggtgcttgttggtcttcaaggtgttgtcaaaaaagctgtcggtctcggtggttggcattggctggttttgacaaatggaatagaagtaaagttgcagaggaatgcgcttagtgtccttgaacctcctactggaaacgaagaagacgatgatcttgatttcgaaaacacacagaggaatggctctgatatgattgtttcttttccagcatctgaggacacactgaagcctcataagtcgaagctaagagggcagagatcatctcggtcatctcacaagacgatgagcaggtctctatcatctgactcgcaatcaaaaagttcgggttttactcctcctgaaaacatgaaggttgatcttagcaaattggaaatgcctgctttactgaattattggcgacattttaaccttgtggatgcaattccaaatccatcaaaggagcaactaattgacattgttcaaaggcacttcatgtctcagcaaatggatgagcttcaggttattgtggggtttgtccaagctgcaaagagaatgaagaaggcttgcaagtttcaatccaaagaatccagaaacactgatcttaactgcatcagctaaagaaaagccctgactcttaacaaatcctgtatgtacggtacatcaacttgtttaaccatttgtggcttgctaagtttagttcttctagtgatgtttggctaaagggtagatgttgtttcttctttgcttctgttgtttagccaatgtaagtaccatcaaaaaaaccaaataactctctaaagctccctattggaaactatcttgtctgatacgatctggagtgaccggtatgttgttagaatgtaaatatgtttggt

SEQ ID NO: 74632 - protein, 247 aa, Arabidopsis thaliana; identical to SEQ ID NO: 26839
  peptide (1)..(247): Ceres Seq. ID no. 5678794
  misc_feature (1)..(247): Homolog of NCBI NO: 18394724 NR Description: expressed protein; protein id: At1g19330.1, by cDNA: 4026. [Arabidopsis thaliana] >gi|21593580|gb|AAM65547.1|
  misc_feature (1)..(247): Homolog of NCBI NO: 25372870 NR Description: protein F18O14.5 [imported] - Arabidopsis >gi|8778446|gb|AAF79454.1|AC025808_36 F18O14.5 [Arabidopsis
  misc_feature (1)..(239): Homolog of NCBI NO: 15222092 NR Description: hypothetical protein; protein id: At1g75060.1
  misc_feature (1)..(218): Homolog of NCBI NO: 37533376 NR Description: hypothetical protein [Oryza sativa (japonica group)] >gi|18057114|gb|AAL58137.1| hypothetical protein [Oryza
  misc_feature (2)..(218): Homolog of NCBI NO: 18767383 NR Description: Hypothetical protein [Oryza sativa]
  misc_feature (26)..(228): Homolog of NCBI NO: 38346468 NR Description: OSJNBa0019G23.16 [Oryza sativa (japonica
  misc_feature (26)..(98): Homolog of NCBI NO: 38567956 NR Description: OSJNBb0115I21.12 [Oryza sativa (japonica
  misc_feature (209)..(228): Homolog of NCBI NO: 38567956 NR Description: OSJNBb0115I21.12 [Oryza sativa (japonica

SEQ ID NO: 74633 - protein, 135 aa, Arabidopsis thaliana; identical to SEQ ID NO: 26840
  peptide (1)..(135): Ceres Seq. ID no. 5678795
  misc_feature (1)..(135): Homolog of NCBI NO: 18394724 NR Description: expressed protein; protein id: At1g19330.1, by cDNA: 4026. [Arabidopsis thaliana] >gi|21593580|gb|AAM65547.1|
  misc_feature (1)..(135): Homolog of NCBI NO: 25372870 NR Description: protein F18O14.5 [imported] - Arabidopsis >gi|8778446|gb|AAF79454.1|AC025808_36 F18O14.5 [Arabidopsis
  misc_feature (1)..(127): Homolog of NCBI NO: 15222092 NR Description: hypothetical protein; protein id: At1g75060.1
  misc_feature (1)..(106): Homolog of NCBI NO: 37533376 NR Description: hypothetical protein [Oryza sativa (japonica group)] >gi|18057114|gb|AAL58137.1| hypothetical protein [Oryza
  misc_feature (1)..(106): Homolog of NCBI NO: 18767383 NR Description: Hypothetical protein [Oryza sativa]
  misc_feature (1)..(116): Homolog of NCBI NO: 38346468 NR Description: OSJNBa0019G23.16 [Oryza sativa (japonica
  misc_feature (97)..(116): Homolog of NCBI NO: 38567956 NR Description: OSJNBb0115I21.12 [Oryza sativa (japonica

SEQ ID NO: 74634 - DNA, 1353 bp, Arabidopsis thaliana
  misc_feature (1)..(1353): Ceres Seq. ID no. 5678808
  misc_feature: MA Experiment ID: 108573 Result: Up-regulated in Transcription
  misc_feature: MA Experiment 108573 PARAMETER Experiment Name: At_Drought_cDNA_P Parameter: Timepoint (hr) Value: 6
  misc_feature: MA Experiment 108573 PARAMETER Experiment Name: At_Drought_cDNA_P Parameter: Tissue Value: Aerial
  misc_feature: MA Experiment 108573 PARAMETER Experiment Name: At_Drought_cDNA_P Parameter: Treatment Value: Drought vs. No Drought
  misc_feature: MA Experiment ID: 108574 Result: Up-regulated in Transcription
  misc_feature: MA Experiment 108574 PARAMETER Experiment Name: At_Wounding__cDNA_P Parameter: Timepoint (hr) Value: 1
  misc_feature: MA Experiment 108574 PARAMETER Experiment Name: At_Wounding__cDNA_P Parameter: Tissue Value: Aerial
  misc_feature: MA Experiment 108574 PARAMETER Experiment Name: At_Wounding__cDNA_P Parameter: Treatment Value: Wounding vs. No Wounding
  misc_feature: MA Experiment ID: 108579 Result: Up-regulated in Transcription
  misc_feature: MA Experiment 108579 PARAMETER Experiment Name: At_4deg_Cold_cDNA_P Parameter: Temperature (deg C) Value: 4 vs. 22
  misc_feature: MA Experiment 108579 PARAMETER Experiment Name: At_4deg_Cold_cDNA_P Parameter: Timepoint (hr) Value: 6
  misc_feature: MA Experiment 108579 PARAMETER Experiment Name: At_4deg_Cold_cDNA_P Parameter: Tissue Value: Aerial
  misc_feature: MA Experiment ID: 20000069 Result: Down-regulated in Transcription
  misc_feature: MA Experiment 20000069 PARAMETER Experiment Name: At_100uM_ABA_Mutants_cDNA_P Parameter: Plant Line Value: CS23
  misc_feature: MA Experiment 20000069 PARAMETER Experiment Name: At_100uM_ABA_Mutants_cDNA_P Parameter: Timepoint (hr) Value: 6
  misc_feature: MA Experiment 20000069 PARAMETER Experiment Name: At_100uM_ABA_Mutants_cDNA_P Parameter: Tissue Value: Aerial
  misc_feature: MA Experiment 20000069 PARAMETER Experiment Name: At_100uM_ABA_Mutants_cDNA_P Parameter: Treatment Value: 100uM ABA vs. No Treatment
  misc_feature: MA Experiment ID: 20000070 Result: Down-regulated in Transcription
  misc_feature: MA Experiment 20000070 PARAMETER Experiment Name: At_100uM_ABA_Mutants_cDNA_P Parameter: Plant Line Value: CS24
  misc_feature: MA Experiment 20000070 PARAMETER Experiment Name: At_100uM_ABA_Mutants_cDNA_P Parameter: Timepoint (hr) Value: 6
  misc_feature: MA Experiment 20000070 PARAMETER Experiment Name: At_100uM_ABA_Mutants_cDNA_P Parameter: Tissue Value: Aerial
  misc_feature: MA Experiment 20000070 PARAMETER Experiment Name: At_100uM_ABA_Mutants_cDNA_P Parameter: Treatment Value: 100uM ABA vs. No Treatment
  misc_feature: MA Experiment ID: 20000071 Result: Down-regulated in Transcription
  misc_feature: MA Experiment 20000071 PARAMETER Experiment Name: At_100uM_ABA_Mutants_cDNA_P Parameter: Plant Line Value: CS8104
  misc_feature: MA Experiment 20000071 PARAMETER Experiment Name: At_100uM_ABA_Mutants_cDNA_P Parameter: Timepoint (hr) Value: 6
  misc_feature: MA Experiment 20000071 PARAMETER Experiment Name: At_100uM_ABA_Mutants_cDNA_P Parameter: Tissue Value: Aerial
  misc_feature: MA Experiment 20000071 PARAMETER Experiment Name: At_100uM_ABA_Mutants_cDNA_P Parameter: Treatment Value: 100uM ABA vs. No Treatment
  misc_feature: MA Experiment ID: 20000086 Result: Down-regulated in Transcription
  misc_feature: MA Experiment 20000086 PARAMETER Experiment Name: At_100uM_ABA_Mutants_cDNA_P Parameter: Plant Line Value: CS22
  misc_feature: MA Experiment 20000086 PARAMETER Experiment Name: At_100uM_ABA_Mutants_cDNA_P Parameter: Timepoint (hr) Value: 6
  misc_feature: MA Experiment 20000086 PARAMETER Experiment Name: At_100uM_ABA_Mutants_cDNA_P Parameter: Tissue Value: Aerial
  misc_feature: MA Experiment 20000086 PARAMETER Experiment Name: At_100uM_ABA_Mutants_cDNA_P Parameter: Treatment Value: 100uM ABA vs. No Treatment
  misc_feature: MA Experiment ID: 20000088 Result: Down-regulated in Transcription
  misc_feature: MA Experiment 20000088 PARAMETER Experiment Name: At_100uM_ABA_Mutants_cDNA_P Parameter: Plant Line Value: Landsberg
  misc_feature: MA Experiment 20000088 PARAMETER Experiment Name: At_100uM_ABA_Mutants_cDNA_P Parameter: Timepoint (hr) Value: 6
  misc_feature: MA Experiment 20000088 PARAMETER Experiment Name: At_100uM_ABA_Mutants_cDNA_P Parameter: Tissue Value: Aerial
  misc_feature: MA Experiment 20000088 PARAMETER Experiment Name: At_100uM_ABA_Mutants_cDNA_P Parameter: Treatment Value: 100uM ABA vs. No Treatment
  misc_feature: MA Experiment ID: 20000089 Result: Down-regulated in Transcription
  misc_feature: MA Experiment ID: 20000090 Result: Down-regulated in Transcription
  misc_feature: MA Experiment ID: 20000111 Result: Up-regulated in Transcription
  misc_feature: MA Experiment 20000111 PARAMETER Experiment Name: At_42deg_Heat_cDNA_P Parameter: Temperature (deg C) Value: 42 vs. 22
  misc_feature: MA Experiment 20000111 PARAMETER Experiment Name: At_42deg_Heat_cDNA_P Parameter: Timepoint (hr) Value: 6
  misc_feature: MA Experiment 20000111 PARAMETER Experiment Name: At_42deg_Heat_cDNA_P Parameter: Tissue Value: Aerial
  misc_feature: MA Experiment ID: 20000211 Result: Up-regulated in Transcription
  misc_feature: MA Experiment 20000211 PARAMETER Experiment Name: At_0.001percent_MeJA__P Parameter: Age (day) Value: 14
  misc_feature: MA Experiment 20000211 PARAMETER Experiment Name: At_0.001percent_MeJA__P Parameter: Organism Value: A. thaliana
  misc_feature: MA Experiment 20000211 PARAMETER Experiment Name: At_0.001percent_MeJA__P Parameter: Plant Line Value: WS
  misc_feature: MA Experiment 20000211 PARAMETER Experiment Name: At_0.001percent_MeJA__P Parameter: Timepoint (hr) Value: 1
  misc_feature: MA Experiment 20000211 PARAMETER Experiment Name: At_0.001percent_MeJA__P Parameter: Tissue Value: Aerial
  misc_feature: MA Experiment 20000211 PARAMETER Experiment Name: At_0.001percent_MeJA__P Parameter: Treatment Value: 0.001percent MeJA vs. No Treatment
  misc_feature: MA Experiment ID: 20000264 Result: Up-regulated in Transcription
  misc_feature: MA Experiment 20000264 PARAMETER Experiment Name: At_Open_Flower_P Parameter: Age (day) Value: 21
  misc_feature: MA Experiment 20000264 PARAMETER Experiment Name: At_Open_Flower_P Parameter: Plant Line Value: WS
  misc_feature: MA Experiment 20000264 PARAMETER Experiment Name: At_Open_Flower_P Parameter: Tissue Value: Open Flower vs. Whole Plant
  misc_feature: MA Experiment ID: 20000265 Result: Up-regulated in Transcription
  misc_feature: MA Experiment 20000265 PARAMETER Experiment Name: At_Open_Flower_P Parameter: Age (day) Value: 21
  misc_feature: MA Experiment 20000265 PARAMETER Experiment Name: At_Open_Flower_P Parameter: Plant Line Value: WS
  misc_feature: MA Experiment 20000265 PARAMETER Experiment Name: At_Open_Flower_P Parameter: Tissue Value: Closed Flower vs. Whole Plant
  misc_feature: MA Experiment ID: 20000286 Result: Up-regulated in Transcription
  misc_feature: MA Experiment 20000286 PARAMETER Experiment Name: At_Open_Flower_P Parameter: Age (day) Value: 21
  misc_feature: MA Experiment 20000286 PARAMETER Experiment Name: At_Open_Flower_P Parameter: Plant Line Value: WS
  misc_feature: MA Experiment 20000286 PARAMETER Experiment Name: At_Open_Flower_P Parameter: Tissue Value: Half Open vs. Whole Plant
  misc_feature: MA Experiment ID: 20000453 Result: Down-regulated in Transcription
  misc_feature: MA Experiment 20000453 PARAMETER Experiment Name: At_100uM_ABA_P Parameter: Age (day) Value: 15
  misc_feature: MA Experiment 20000453 PARAMETER Experiment Name: At_100uM_ABA_P Parameter: Organism Value: A. thaliana
  misc_feature: MA Experiment 20000453 PARAMETER Experiment Name: At_100uM_ABA_P Parameter: Plant Line Value: WS
  misc_feature: MA Experiment 20000453 PARAMETER Experiment Name: At_100uM_ABA_P Parameter: Timepoint (hr) Value: 24
  misc_feature: MA Experiment 20000453 PARAMETER Experiment Name: At_100uM_ABA_P Parameter: Tissue Value: Aerial
  misc_feature: MA Experiment 20000453 PARAMETER Experiment Name: At_100uM_ABA_P Parameter: Treatment Value: 100uM ABA vs. No Treatment
  misc_feature: MA Experiment ID: 20000794 Result: Up-regulated in Transcription
  misc_feature: MA Experiment 20000794 PARAMETER Experiment Name: At_Petals_P Parameter: Age (day) Value: 23-25 days
  misc_feature: MA Experiment 20000794 PARAMETER Experiment Name: At_Petals_P Parameter: Plant Line Value: WS
  misc_feature: MA Experiment 20000794 PARAMETER Experiment Name: At_Petals_P Parameter: Tissue Value: Petals vs. Whole plant
  misc_feature: MA Experiment ID: 20001757 Result: Down-regulated in Transcription
  misc_feature: MA Experiment 20001757 PARAMETER Experiment Name: At_50mM_NH4NO3_L-to-H_P Parameter: Timepoint (hr) Value: 6
  misc_feature: MA Experiment 20001757 PARAMETER Experiment Name: At_50mM_NH4NO3_L-to-H_P Parameter: Tissue Value: Leaf
  misc_feature: MA Experiment 20001757 PARAMETER Experiment Name: At_50mM_NH4NO3_L-to-H_P Parameter: Treatment Value: 50mM NH4NO3 vs 100mM Mannitol
  misc_feature: MA Experiment ID: 20001911 Result: Down-regulated in Transcription
  misc_feature: MA Experiment 20001911 PARAMETER Experiment Name: At_Drought_Reproduction_P Parameter: Age (day) Value: 40
  misc_feature: MA Experiment 20001911 PARAMETER Experiment Name: At_Drought_Reproduction_P Parameter: Organism Value: A. thaliana
  misc_feature: MA Experiment 20001911 PARAMETER Experiment Name: At_Drought_Reproduction_P Parameter: Plant Line Value: WS
  misc_feature: MA Experiment 20001911 PARAMETER Experiment Name: At_Drought_Reproduction_P Parameter: Timepoint (day) Value: 10
  misc_feature: MA Experiment 20001911 PARAMETER Experiment Name: At_Drought_Reproduction_P Parameter: Tissue Value: Flowers
  misc_feature: MA Experiment 20001911 PARAMETER Experiment Name: At_Drought_Reproduction_P Parameter: Treatment Value: Drought vs. No Drought
ttaaccttctgcttcatcaaaaagaaagagacacaaagagcgagagagggagagagatggaggtaatgcgagttcttcacatgaacaaaggaaacggtgaaacgagttatgccaagaactccaccgctcagagtaacataatatctctaggcagaagagtaatggacgaggccttgaagaagttaatgatgagcaattcagagatttcgagcattggaatcgccgacttaggctgctcctccggtccgaacagtctcttgtccatctccaacatagttgacacgatccacaacttgtgtcctgacctcgaccgtcctgtccctgagctcagagtctctctgaacgacctccctagcaatgacttcaactacatatgtgcttctttgccagagttttacgaccgggttaataataacaaggagggtttagggttcggtcgtggaggaggagaatcgtgttttgtgtcggccgtcccaggttcgttctacggacgtttgtttcctcgccggagccttcactttgtgcattcttcttctagtttacattggttatctcaggttccatgtcgtgaggcggagaaggaagacaggacaataacagctgatttagaaaacatggggaaaatatacatatcaaagacaagtcctaagagtgcacataaagcttatgctcttcaattccaaactgatttctgggtttttttgagatcgcgatctgaggagttggtcccgggaggccgaatggttttatcgttccttggtagaagatcactggatcccacaaccgaagagagttgctatcaatgggaactcctagctcaagctcttatgtccatggccaaagagggtatcatcgaggaagagaagatcgatgctttcaacgctccttactatgctgcgagctccgaagagttgaaaatggtgatagagaaagaagggtcattttcgatcgataggcttgagataagtccgattgattgggaaggtgggagtatcagtgaggagagttatgaccttgtaataaggtccaaacccgaagccctagctagtggccgaagagtgtctaataccataagagctgtggtcgagccgatgctagaacctactttcggtgaaaatgtgatggacgagctttttgaaaggtatgcaaagatcgtgggagagtacttctatgtaagctcgccacgatacgctattgttattctttcgctcgttagagccggttgatcgtgttataacatatgccaatatacatgtctttgggcctacaatgacatgatttggtagttttctaatcaagcatatgtaatataatttgcttcgagaataaaataataaaataaagtctgatgtt

SEQ ID NO: 74635 - protein, 407 aa, Arabidopsis thaliana
  peptide (1)..(407): Ceres Seq. ID no. 5678809
  misc_feature (54)..(405): Pfam Name: SAM dependent carboxyl methyltransferase Pfam Description: SAM dependent carboxyl methyltransferase
  misc_feature (19)..(407): Homolog of NCBI NO: 15223601 NR Description: S-adenosyl-L-methionine:jasmonic acid carboxyl (JMT); protein id: At1g19640.1, supported by cDNA: gi_13676828
  misc_feature (19)..(407): Homolog of NCBI NO: 13676829 NR Description: S-adenosyl-L-methionine:jasmonic acid carboxyl
  misc_feature (19)..(407): Homolog of NCBI NO: 6651395 NR Description: floral nectary-specific protein [Brassica rapa
  misc_feature (19)..(185): Homolog of NCBI NO: 25518363 NR Description: hypothetical protein F14P1.3 - Arabidopsis >gi|9795588|gb|AAF98406.1|AC024609_7 Hypothetical protein
  misc_feature (282)..(407): Homolog of NCBI NO: 25518363 NR Description: hypothetical protein F14P1.3 - Arabidopsis >gi|9795588|gb|AAF98406.1|AC024609_7 Hypothetical protein
  misc_feature (150)..(405): Homolog of NCBI NO: 15237695 NR Description: S-adenosyl-L-methionine:carboxyl
  misc_feature (7)..(187): Homolog of NCBI NO: 15237695 NR Description: S-adenosyl-L-methionine:carboxyl
  misc_feature (152)..(389): Homolog of NCBI NO: 15240823 NR Description: S-adenosyl-L-methionine:carboxyl
  misc_feature (22)..(187): Homolog of NCBI NO: 15240823 NR Description: S-adenosyl-L-methionine:carboxyl
  misc_feature (152)..(389): Homolog of NCBI NO: 8885604 NR Description: S-adenosyl-L-methionine:salicylic acid carboxyl
NLLLHQKERDTKSERGREMEVMRVLHMNKGNGETSYAKNSTAQSNIISLGRRVMDEALKKLMMSNSEISSIGIADLGCSSGPNSLLSISNIVDTIHNLCPDLDRPVPELRVSLNDLPSNDFNYICASLPEFYDRVNNNKEGLGFGRGGGESCFVSAVPGSFYGRLFPRRSLHFVHSSSSLHWLSQVPCREAEKEDRTITADLENMGKIYISKTSPKSAHKAYALQFQTDFWVFLRSRSEELVPGGRMVLSFLGRRSLDPTTEESCYQWELLAQALMSMAKEGIIEEEKIDAFNAPYYAASSEELKMVIEKEGSFSIDRLEISPIDWEGGSISEESYDLVIRSKPEALASGRRVSNTIRAVVEPMLEPTFGENVMDELFERYAKIVGEYFYVSSPRYAIVILSLVRAG

SEQ ID NO: 74636 - protein, 389 aa, Arabidopsis thaliana
  peptide (1)..(389): Ceres Seq. ID no. 5678810
  misc_feature (36)..(387): Pfam Name: SAM dependent carboxyl methyltransferase Pfam Description: SAM dependent carboxyl methyltransferase
  misc_feature (1)..(389): Homolog of NCBI NO: 15223601 NR Description: S-adenosyl-L-methionine:jasmonic acid carboxyl (JMT); protein id: At1g19640.1, supported by cDNA: gi_13676828
  misc_feature (1)..(389): Homolog of NCBI NO: 13676829 NR Description: S-adenosyl-L-methionine:jasmonic acid carboxyl
  misc_feature (1)..(389): Homolog of NCBI NO: 6651395 NR Description: floral nectary-specific protein [Brassica rapa
  misc_feature (1)..(167): Homolog of NCBI NO: 25518363 NR Description: hypothetical protein F14P1.3 - Arabidopsis >gi|9795588|gb|AAF98406.1|AC024609_7 Hypothetical protein
  misc_feature (264)..(389): Homolog of NCBI NO: 25518363 NR Description: hypothetical protein F14P1.3 - Arabidopsis >gi|9795588|gb|AAF98406.1|AC024609_7 Hypothetical protein
  misc_feature (132)..(387): Homolog of NCBI NO: 15237695 NR Description: S-adenosyl-L-methionine:carboxyl
  misc_feature (1)..(169): Homolog of NCBI NO: 15237695 NR Description: S-adenosyl-L-methionine:carboxyl
  misc_feature (134)..(371): Homolog of NCBI NO: 15240823 NR Description: S-adenosyl-L-methionine:carboxyl
  misc_feature (4)..(169): Homolog of NCBI NO: 15240823 NR Description: S-adenosyl-L-methionine:carboxyl
  misc_feature (134)..(371): Homolog of NCBI NO: 8885604 NR Description: S-adenosyl-L-methionine:salicylic acid carboxyl
MEVMRVLHMNKGNGETSYAKNSTAQSNIISLGRRVMDEALKKLMMSNSEISSIGIADLGCSSGPNSLLSISNIVDTIHNLCPDLDRPVPELRVSLNDLPSNDFNYICASLPEFYDRVNNNKEGLGFGRGGGESCFVSAVPGSFYGRLFPRRSLHFVHSSSSLHWLSQVPCREAEKEDRTITADLENMGKIYISKTSPKSAHKAYALQFQTDFWVFLRSRSEELVPGGRMVLSFLGRRSLDPTTEESCYQWELLAQALMSMAKEGIIEEEKIDAFNAPYYAASSEELKMVIEKEGSFSIDRLEISPIDWEGGSISEESYDLVIRSKPEALASGRRVSNTIRAVVEPMLEPTFGENVMDELFERYAKIVGEYFYVSSPRYAIVILSLVRAG

SEQ ID NO: 74637 - protein, 386 aa, Arabidopsis thaliana
  peptide (1)..(386): Ceres Seq. ID no. 5678811
  misc_feature (33)..(384): Pfam Name: SAM dependent carboxyl methyltransferase Pfam Description: SAM dependent carboxyl methyltransferase
  misc_feature (1)..(386): Homolog of NCBI NO: 15223601 NR Description: S-adenosyl-L-methionine:jasmonic acid carboxyl (JMT); protein id: At1g19640.1, supported by cDNA: gi_13676828
  misc_feature (1)..(386): Homolog of NCBI NO: 13676829 NR Description: S-adenosyl-L-methionine:jasmonic acid carboxyl
  misc_feature (1)..(386): Homolog of NCBI NO: 6651395 NR Description: floral nectary-specific protein [Brassica rapa
  misc_feature (1)..(164): Homolog of NCBI NO: 25518363 NR Description: hypothetical protein F14P1.3 - Arabidopsis >gi|9795588|gb|AAF98406.1|AC024609_7 Hypothetical protein
  misc_feature (261)..(386): Homolog of NCBI NO: 25518363 NR Description: hypothetical protein F14P1.3 - Arabidopsis >gi|9795588|gb|AAF98406.1|AC024609_7 Hypothetical protein
  misc_feature (129)..(384): Homolog of NCBI NO: 15237695 NR Description: S-adenosyl-L-methionine:carboxyl
  misc_feature (1)..(166): Homolog of NCBI NO: 15237695 NR Description: S-adenosyl-L-methionine:carboxyl
  misc_feature (131)..(368): Homolog of NCBI NO: 15240823 NR Description: S-adenosyl-L-methionine:carboxyl
  misc_feature (1)..(166): Homolog of NCBI NO: 15240823 NR Description: S-adenosyl-L-methionine:carboxyl
  misc_feature (131)..(368): Homolog of NCBI NO: 8885604 NR Description: S-adenosyl-L-methionine:salicylic acid carboxyl
MRVLHMNKGNGETSYAKNSTAQSNIISLGRRVMDEALKKLMMSNSEISSIGIADLGCSSGPNSLLSISNIVDTIHNLCPDLDRPVPELRVSLNDLPSNDFNYICASLPEFYDRVNNNKEGLGFGRGGGESCFVSAVPGSFYGRLFPRRSLHFVHSSSSLHWLSQVPCREAEKEDRTITADLENMGKIYISKTSPKSAHKAYALQFQTDFWVFLRSRSEELVPGGRMVLSFLGRRSLDPTTEESCYQWELLAQALMSMAKEGIIEEEKIDAFNAPYYAASSEELKMVIEKEGSFSIDRLEISPIDWEGGSISEESYDLVIRSKPEALASGRRVSNTIRAVVEPMLEPTFGENVMDELFERYAKIVGEYFYVSSPRYAIVILSLVRAG

SEQ ID NO: 74638 - DNA, 721 bp, Arabidopsis thaliana
  misc_feature (1)..(721): Ceres Seq. ID no. 5678816
  misc_feature: MA Experiment ID: 20000072 Result: Up-regulated in Transcription
  misc_feature: MA Experiment 20000072 PARAMETER Experiment Name: At_100uM_ABA_Mutants_cDNA_P Parameter: Plant Line Value: CS8105
  misc_feature: MA Experiment 20000072 PARAMETER Experiment Name: At_100uM_ABA_Mutants_cDNA_P Parameter: Timepoint (hr) Value: 6
  misc_feature: MA Experiment 20000072 PARAMETER Experiment Name: At_100uM_ABA_Mutants_cDNA_P Parameter: Tissue Value: Aerial
  misc_feature: MA Experiment 20000072 PARAMETER Experiment Name: At_100uM_ABA_Mutants_cDNA_P Parameter: Treatment Value: 100uM ABA vs. No Treatment
  misc_feature: MA Experiment ID: 20000086 Result: Up-regulated in Transcription
  misc_feature: MA Experiment 20000086 PARAMETER Experiment Name: At_100uM_ABA_Mutants_cDNA_P Parameter: Plant Line Value: CS22
  misc_feature: MA Experiment 20000086 PARAMETER Experiment Name: At_100uM_ABA_Mutants_cDNA_P Parameter: Timepoint (hr) Value: 6
  misc_feature: MA Experiment 20000086 PARAMETER Experiment Name: At_100uM_ABA_Mutants_cDNA_P Parameter: Tissue Value: Aerial
  misc_feature: MA Experiment 20000086 PARAMETER Experiment Name: At_100uM_ABA_Mutants_cDNA_P Parameter: Treatment Value: 100uM ABA vs. No Treatment
  misc_feature: MA Experiment ID: 20000087 Result: Up-regulated in Transcription
  misc_feature: MA Experiment 20000087 PARAMETER Experiment Name: At_100uM_ABA_Mutants_cDNA_P Parameter: Plant Line Value: WS
  misc_feature: MA Experiment 20000087 PARAMETER Experiment Name: At_100uM_ABA_Mutants_cDNA_P Parameter: Timepoint (hr) Value: 6
  misc_feature: MA Experiment 20000087 PARAMETER Experiment Name: At_100uM_ABA_Mutants_cDNA_P Parameter: Tissue Value: Aerial
  misc_feature: MA Experiment 20000087 PARAMETER Experiment Name: At_100uM_ABA_Mutants_cDNA_P Parameter: Treatment Value: 100uM ABA vs. No Treatment
  misc_feature: MA Experiment ID: 20000185 Result: Up-regulated in Transcription
  misc_feature: MA Experiment 20000185 PARAMETER Experiment Name: At_Roots__P Parameter: Age (day) Value: 7 vs. 21
  misc_feature: MA Experiment 20000185 PARAMETER Experiment Name: At_Roots__P Parameter: Organism Value: A. thaliana
  misc_feature: MA Experiment 20000185 PARAMETER Experiment Name: At_Roots__P Parameter: Tissue Value: Roots vs. Whole Plant
  misc_feature: MA Experiment ID: 20000234 Result: Up-regulated in Transcription
  misc_feature: MA Experiment 20000234 PARAMETER Experiment Name: At_Siliques_P Parameter: Age (day) Value: 21
  misc_feature: MA Experiment 20000234 PARAMETER Experiment Name: At_Siliques_P Parameter: Organism Value: A. thaliana
  misc_feature: MA Experiment 20000234 PARAMETER Experiment Name: At_Siliques_P Parameter: Plant Line Value: WS
  misc_feature: MA Experiment 20000234 PARAMETER Experiment Name: At_Siliques_P Parameter: Tissue Value: Less Than 5mm Siliques vs. Whole Plant
  misc_feature: MA Experiment ID: 20000235 Result: Up-regulated in Transcription
  misc_feature: MA Experiment 20000235 PARAMETER Experiment Name: At_Siliques_P Parameter: Age (day) Value: 21
  misc_feature: MA Experiment 20000235 PARAMETER Experiment Name: At_Siliques_P Parameter: Organism Value: A. thaliana
  misc_feature: MA Experiment 20000235 PARAMETER Experiment Name: At_Siliques_P Parameter: Plant Line Value: WS
  misc_feature: MA Experiment 20000235 PARAMETER Experiment Name: At_Siliques_P Parameter: Tissue Value: 5-10mm Siliques vs. Whole Plant
  misc_feature: MA Experiment ID: 20000265 Result: Up-regulated in Transcription
  misc_feature: MA Experiment 20000265 PARAMETER Experiment Name: At_Open_Flower_P Parameter: Age (day) Value: 21
  misc_feature: MA Experiment 20000265 PARAMETER Experiment Name: At_Open_Flower_P Parameter: Plant Line Value: WS
  misc_feature: MA Experiment 20000265 PARAMETER Experiment Name: At_Open_Flower_P Parameter: Tissue Value: Closed Flower vs. Whole Plant
  misc_feature: MA Experiment ID: 20000439 Result: Up-regulated in Transcription
  misc_feature: MA Experiment 20000439 PARAMETER Experiment Name: At_Roots__P Parameter: Age (day) Value: 14 vs. 21
  misc_feature: MA Experiment 20000439 PARAMETER Experiment Name: At_Roots__P Parameter: Organism Value: A. thaliana
  misc_feature: MA Experiment 20000439 PARAMETER Experiment Name: At_Roots__P Parameter: Tissue Value: Roots vs. Whole Plant
  misc_feature: MA Experiment ID: 20001557 Result: Up-regulated in Transcription
  misc_feature: MA Experiment 20001557 PARAMETER Experiment Name: At_Drought_Soil_Dry_P Parameter: Age (day) Value: 27
  misc_feature: MA Experiment 20001557 PARAMETER Experiment Name: At_Drought_Soil_Dry_P Parameter: Organism Value: A. thaliana
  misc_feature: MA Experiment 20001557 PARAMETER Experiment Name: At_Drought_Soil_Dry_P Parameter: Plant Line Value: WS
  misc_feature: MA Experiment 20001557 PARAMETER Experiment Name: At_Drought_Soil_Dry_P Parameter: Post Timepoint (hr) Value: 3
  misc_feature: MA Experiment 20001557 PARAMETER Experiment Name: At_Drought_Soil_Dry_P Parameter: Post-Treatment Value: Re-Water vs. No Drought
  misc_feature: MA Experiment 20001557 PARAMETER Experiment Name: At_Drought_Soil_Dry_P Parameter: Timepoint (day) Value: 13
  misc_feature: MA Experiment 20001557 PARAMETER Experiment Name: At_Drought_Soil_Dry_P Parameter: Treatment Value: Drought vs. No Drought
  misc_feature: MA Experiment ID: 20001560 Result: Up-regulated in Transcription
  misc_feature: MA Experiment 20001560 PARAMETER Experiment Name: At_Drought_Soil_Dry_P Parameter: Age (day) Value: 28
  misc_feature: MA Experiment 20001560 PARAMETER Experiment Name: At_Drought_Soil_Dry_P Parameter: Organism Value: A. thaliana
  misc_feature: MA Experiment 20001560 PARAMETER Experiment Name: At_Drought_Soil_Dry_P Parameter: Plant Line Value: WS
  misc_feature: MA Experiment 20001560 PARAMETER Experiment Name: At_Drought_Soil_Dry_P Parameter: Post Timepoint (hr) Value: None
  misc_feature: MA Experiment 20001560 PARAMETER Experiment Name: At_Drought_Soil_Dry_P Parameter: Post-Treatment Value: None
  misc_feature: MA Experiment 20001560 PARAMETER Experiment Name: At_Drought_Soil_Dry_P Parameter: Timepoint (day) Value: 14
  misc_feature: MA Experiment 20001560 PARAMETER Experiment Name: At_Drought_Soil_Dry_P Parameter: Treatment Value: Drought vs. No Drought
  misc_feature: Pfam Name: Phosducin Pfam Description: Phosducin
gttcatcttttgattttttgaaattgttagtaaagaaaggaaaaaagctttgatttcgatttctcaagctgtgtttttttatttttcttcttcgcatcaggaaggaattgaaaaagatttttggtgttaaaagatggatccagatgcagtcaaatcgactctctcgaatctagcatttggaaatgtaatggcggctgctgcaagaaattatcaaaaggaagttcttgcaaatgagaaggcgcaaggatcaaatcctgttaatgaagaggttgatcttgatgaacttatggatgatccagagctagaaagattgcacgcagataggattgcagcactaaagagagaggttgagaagagagaatcgtttaaaagacaagggcatggtgaatatcgagaggtgagtgaaggagatttcttgggtgaagtcaccaggagtgagaaagtgatatgtcatttctaccataaggaattttaccggtgcaagattatggacaagcatctgaaaactcttgcacctagacatgtggacacaaagttcattaaagtggacgcagagaatgctcctttctttgtcacgaagcttgcaataaagactttgccttgcgttgtgcttttcagcaagggagttgcgatggataggctagttgggttccaggatctgggaaccaaggacgatttcacaacgaataaactagagaacgttcttcttaaaaagggtatg

SEQ ID NO: 74639 - protein, 196 aa, Arabidopsis thaliana
  peptide (1)..(196): Ceres Seq. ID no. 5678817
  misc_feature: Pfam Name: Phosducin Pfam Description: Phosducin
  misc_feature (1)..(195): Homolog of NCBI NO: 30693386 NR Description: expressed protein [Arabidopsis thaliana]
  misc_feature (1)..(195): Homolog of NCBI NO: 18425069 NR Description: putative protein; protein id: At5g66410.1,
  misc_feature (1)..(195): Homolog of NCBI NO: 10177522 NR Description: contains similarity to ATP binding protein
  misc_feature (19)..(194): Homolog of NCBI NO: 7485705 NR Description: hypothetical protein F18B3.240 - Arabidopsis >gi|4835247|emb|CAB42925.1| putative tRNA synthetase [Arabidopsis
  misc_feature (29)..(188): Homolog of NCBI NO: 25286717 NR Description: ATP binding protein associated with cell [Mus musculus] >gi|12833213|dbj|BAB22438.1| unnamed protein [Mus musculus] >gi|12839124|dbj|BAB24440.1| unnamed protein
  misc_feature (29)..(188): Homolog of NCBI NO: 25282435 NR Description: ES cell-related protein; ATP binding protein
  misc_feature (20)..(188): Homolog of NCBI NO: 18104959 NR Description: ATP binding protein associated with cell
  misc_feature (20)..(188): Homolog of NCBI NO: 19683948 NR Description: Similar to ATP binding protein associated with
  misc_feature (19)..(188): Homolog of NCBI NO: 28277604 NR Description: Similar to ATP binding protein associated with
  misc_feature (20)..(188): Homolog of NCBI NO: 2342477 NR Description: ATP binding protein [Homo sapiens]
MDPDAVKSTLSNLAFGNVMAAAARNYQKEVLANEKAQGSNPVNEEVDLDELMDDPELERLHADRIAALKREVEKRESFKRQGHGEYREVSEGDFLGEVTRSEKVICHFYHKEFYRCKIMDKHLKTLAPRHVDTKFIKVDAENAPFFVTKLAIKTLPCVVLFSKGVAMDRLVGFQDLGTKDDFTTNKLENVLLKKGM

SEQ ID NO: 74640 - protein, 178 aa, Arabidopsis thaliana
  peptide (1)..(178): Ceres Seq. ID no. 5678818
  misc_feature: Pfam Name: Phosducin Pfam Description: Phosducin
  misc_feature (1)..(177): Homolog of NCBI NO: 30693386 NR Description: expressed protein [Arabidopsis thaliana]
  misc_feature (1)..(177): Homolog of NCBI NO: 18425069 NR Description: putative protein; protein id: At5g66410.1,
  misc_feature (1)..(177): Homolog of NCBI NO: 10177522 NR Description: contains similarity to ATP binding protein
  misc_feature (1)..(176): Homolog of NCBI NO: 7485705 NR Description: hypothetical protein F18B3.240 - Arabidopsis >gi|4835247|emb|CAB42925.1| putative tRNA synthetase [Arabidopsis
  misc_feature (11)..(170): Homolog of NCBI NO: 25286717 NR Description: ATP binding protein associated with cell [Mus musculus] >gi|12833213|dbj|BAB22438.1| unnamed protein [Mus musculus] >gi|12839124|dbj|BAB24440.1| unnamed protein
  misc_feature (11)..(170): Homolog of NCBI NO: 25282435 NR Description: ES cell-related protein; ATP binding protein
  misc_feature (2)..(170): Homolog of NCBI NO: 18104959 NR Description: ATP binding protein associated with cell
  misc_feature (2)..(170): Homolog of NCBI NO: 19683948 NR Description: Similar to ATP binding protein associated with
  misc_feature (1)..(170): Homolog of NCBI NO: 28277604 NR Description: Similar to ATP binding protein associated with
  misc_feature (2)..(170): Homolog of NCBI NO: 2342477 NR Description: ATP binding protein [Homo sapiens]
MAAAARNYQKEVLANEKAQGSNPVNEEVDLDELMDDPELERLHADRIAALKREVEKRESFKRQGHGEYREVSEGDFLGEVTRSEKVICHFYHKEFYRCKIMDKHLKTLAPRHVDTKFIKVDAENAPFFVTKLAIKTLPCVVLFSKGVAMDRLVGFQDLGTKDDFTTNKLENVLLKKGM

SEQ ID NO: 74641 - protein, 145 aa, Arabidopsis thaliana
  peptide (1)..(145): Ceres Seq. ID no. 5678819
  misc_feature: Pfam Name: Phosducin Pfam Description: Phosducin
  misc_feature (1)..(144): Homolog of NCBI NO: 30693386 NR Description: expressed protein [Arabidopsis thaliana]
  misc_feature (1)..(144): Homolog of NCBI NO: 18425069 NR Description: putative protein; protein id: At5g66410.1,
  misc_feature (1)..(144): Homolog of NCBI NO: 10177522 NR Description: contains similarity to ATP binding protein
  misc_feature (1)..(143): Homolog of NCBI NO: 7485705 NR Description: hypothetical protein F18B3.240 - Arabidopsis >gi|4835247|emb|CAB42925.1| putative tRNA synthetase [Arabidopsis
  misc_feature (1)..(137): Homolog of NCBI NO: 25286717 NR Description: ATP binding protein associated with cell [Mus musculus] >gi|12833213|dbj|BAB22438.1| unnamed protein [Mus musculus] >gi|12839124|dbj|BAB24440.1| unnamed protein
  misc_feature (1)..(137): Homolog of NCBI NO: 25282435 NR Description: ES cell-related protein; ATP binding protein
  misc_feature (1)..(137): Homolog of NCBI NO: 18104959 NR Description: ATP binding protein associated with cell
  misc_feature (1)..(137): Homolog of NCBI NO: 19683948 NR Description: Similar to ATP binding protein associated with
  misc_feature (1)..(137): Homolog of NCBI NO: 28277604 NR Description: Similar to ATP binding protein associated with
  misc_feature (1)..(137): Homolog of NCBI NO: 2342477 NR Description: ATP binding protein [Homo sapiens]
MDDPELERLHADRIAALKREVEKRESFKRQGHGEYREVSEGDFLGEVTRSEKVICHFYHKEFYRCKIMDKHLKTLAPRHVDTKFIKVDAENAPFFVTKLAIKTLPCVVLFSKGVAMDRLVGFQDLGTKDDFTTNKLENVLLKKGM

SEQ ID NO: 74642 - DNA, 1265 bp, Arabidopsis thaliana
  misc_feature (1)..(1265): Ceres Seq. ID no. 5678835
  misc_feature: MA Experiment ID: 108461 Result: Down-regulated in Transcription
  misc_feature: MA Experiment 108461 PARAMETER Experiment Name: At_Germinating_Seeds_cDNA_P Parameter: Age (day) Value: 1 vs. 0
  misc_feature: MA Experiment 108461 PARAMETER Experiment Name: At_Germinating_Seeds_cDNA_P Parameter: Tissue Value: Germinating Seeds
  misc_feature: MA Experiment ID: 108462 Result: Down-regulated in Transcription
  misc_feature: MA Experiment 108462 PARAMETER Experiment Name: At_Germinating_Seeds_cDNA_P Parameter: Age (day) Value: 2 vs. 0
  misc_feature: MA Experiment 108462 PARAMETER Experiment Name: At_Germinating_Seeds_cDNA_P Parameter: Tissue Value: Germinating Seeds
  misc_feature: MA Experiment ID: 108594 Result: Down-regulated in Transcription
  misc_feature: MA Experiment 108594 PARAMETER Experiment Name: At_Ler-rhl_Root_cDNA_P Parameter: Plant Line Value: null
  misc_feature: MA Experiment ID: 20000117 Result: Down-regulated in Transcription
  misc_feature: MA Experiment 20000117 PARAMETER Experiment Name: At_100uM_ABA_Mutants_cDNA_P Parameter: Plant Line Value: Columbia
  misc_feature: MA Experiment 20000117 PARAMETER Experiment Name: At_100uM_ABA_Mutants_cDNA_P Parameter: Timepoint (hr) Value: 6
  misc_feature: MA Experiment 20000117 PARAMETER Experiment Name: At_100uM_ABA_Mutants_cDNA_P Parameter: Tissue Value: Aerial
  misc_feature: MA Experiment 20000117 PARAMETER Experiment Name: At_100uM_ABA_Mutants_cDNA_P Parameter: Treatment Value: 100uM ABA vs. No Treatment
  misc_feature: MA Experiment ID: 20000179 Result: Down-regulated in Transcription
  misc_feature: MA Experiment 20000179 PARAMETER Experiment Name: At_Germinating_Seeds_P Parameter: Age (hr) Value: 6 vs. 0
  misc_feature: MA Experiment 20000179 PARAMETER Experiment Name: At_Germinating_Seeds_P Parameter: Tissue Value: Germinating Seeds
  misc_feature: MA Experiment ID: 20000180 Result: Down-regulated in Transcription
  misc_feature: MA Experiment 20000180 PARAMETER Experiment Name: At_Germinating_Seeds_P Parameter: Age (hr) Value: 24 vs. 0
  misc_feature: MA Experiment 20000180 PARAMETER Experiment Name: At_Germinating_Seeds_P Parameter: Tissue Value: Germinating Seeds
  misc_feature: MA Experiment ID: 20000227 Result: Down-regulated in Transcription
  misc_feature: MA Experiment 20000227 PARAMETER Experiment Name: At_Root-Tips-vs-Tops_P Parameter: Tissue Value: Root Tips vs. Root Tops
  misc_feature: MA Experiment ID: 20000234 Result: Down-regulated in Transcription
  misc_feature: MA Experiment 20000234 PARAMETER Experiment Name: At_Siliques_P Parameter: Age (day) Value: 21
  misc_feature: MA Experiment 20000234 PARAMETER Experiment Name: At_Siliques_P Parameter: Organism Value: A. thaliana
  misc_feature: MA Experiment 20000234 PARAMETER Experiment Name: At_Siliques_P Parameter: Plant Line Value: WS
  misc_feature: MA Experiment 20000234 PARAMETER Experiment Name: At_Siliques_P Parameter: Tissue Value: Less Than 5mm Siliques vs. Whole Plant
  misc_feature: MA Experiment ID: 20000264 Result: Down-regulated in Transcription
  misc_feature: MA Experiment 20000264 PARAMETER Experiment Name: At_Open_Flower_P Parameter: Age (day) Value: 21
  misc_feature: MA Experiment 20000264 PARAMETER Experiment Name: At_Open_Flower_P Parameter: Plant Line Value: WS
  misc_feature: MA Experiment 20000264 PARAMETER Experiment Name: At_Open_Flower_P Parameter: Tissue Value: Open Flower vs. Whole Plant
  misc_feature: MA Experiment ID: 20000265 Result: Down-regulated in Transcription
  misc_feature: MA Experiment 20000265 PARAMETER Experiment Name: At_Open_Flower_P Parameter: Age (day) Value: 21
  misc_feature: MA Experiment 20000265 PARAMETER Experiment Name: At_Open_Flower_P Parameter: Plant Line Value: WS
  misc_feature: MA Experiment 20000265 PARAMETER Experiment Name: At_Open_Flower_P Parameter: Tissue Value: Closed Flower vs. Whole Plant
  misc_feature: MA Experiment ID: 20000286 Result: Down-regulated in Transcription
  misc_feature: MA Experiment 20000286 PARAMETER Experiment Name: At_Open_Flower_P Parameter: Age (day) Value: 21
  misc_feature: MA Experiment 20000286 PARAMETER Experiment Name: At_Open_Flower_P Parameter: Plant Line Value: WS
  misc_feature: MA Experiment 20000286 PARAMETER Experiment Name: At_Open_Flower_P Parameter: Tissue Value: Half Open vs. Whole Plant
  misc_feature: MA Experiment ID: 20000438 Result: Down-regulated in Transcription
  misc_feature: MA Experiment 20000438 PARAMETER Experiment Name: At_Shoots__P Parameter: Age (day) Value: 14
  misc_feature: MA Experiment 20000438 PARAMETER Experiment Name: At_Shoots__P Parameter: Tissue Value: Shoots vs. Whole Plant
  misc_feature: MA Experiment ID: 20000794 Result: Down-regulated in Transcription
  misc_feature: MA Experiment 20000794 PARAMETER Experiment Name: At_Petals_P Parameter: Age (day) Value: 23-25 days
  misc_feature: MA Experiment 20000794 PARAMETER Experiment Name: At_Petals_P Parameter: Plant Line Value: WS
  misc_feature: MA Experiment 20000794 PARAMETER Experiment Name: At_Petals_P Parameter: Tissue Value: Petals vs. Whole plant
gaaactctctttcagatttcaagaaacccttaaaatcctctctctgtctctttctgtttgtttgttttcttgtttccttctctctctctctttctttctttgtcttcctttcccaggttgtttttttttgctctctctgccttcttgactttcaaaagactctttctttcttttggattgattttggattctagggctctctttcttttagtgggtttttgttgttgttgttgtggtctctctgatgattactgaacttgagatggggaaaggtgagagtgagcttgagcttggtctagggctgagtcttggcggtggaacggcggccaagattggtaaatcaggtggtggtggcgcgtggggagagcgtggaaggcttttgacggctaaggattttccttctgttggttctaaacgtgctgctgattctgcttctcatgctggttcatctcctcctcgttcaagtcaagttgttggatggcctcctatagggtcacacaggatgaacagtttggttaataaccaagctacaaagtcagcaagagaagaagaagaagctggtaagaagaaagtgaaagatgatgaacctaaagatgtgacaaagaaagtgaatgggaaagtacaagttggatttattaaggtgaacatggatggagttgctataggaagaaaagtggatttgaatgctcattcttcttacgagaatttggcgcaaacattggaagatatgttctttcgcactaatccgggtactgtcgggttaaccagtcagttcactaaaccgttgaggcttttagatggatcgtctgagtttgtacttacttatgaagataaggaaggagattggatgcttgttggtgatgttccatggagaatgttcatcaactcggtgaaaaggctacgtgtgatgaaaacctctgaagctaatggactcgctgcacgaaatcaagaaccaaacgagagacagcgaaagcagccggtttagatctcttttcgacgttacggtgttacaggttttatattttggggttttgcaagtctgagatacttctgaagcaagcataagctagattgatcttatatccagtttgtgtattttcttggttcttataatggtttttactggttttctttagtttttttttttgctgtcttttaattttcggttgcgatttcactatatactatggatggaagagaatgctctttatatcttttactacactgtaaatatttgaagcttatctaatatcgtttttaagggt

SEQ ID NO: 74643 - protein, 246 aa, Arabidopsis thaliana; identical to SEQ ID NO: 29294
  peptide (1)..(246): Ceres Seq. ID no. 5678836
  misc_feature (15)..(234): Pfam Name: AUX/IAA family Pfam Description: AUX/IAA family
  misc_feature (1)..(246): Homolog of NCBI NO: 15225833 NR Description: auxin regulated protein (IAA13); protein id: supported by cDNA: 13741., supported by cDNA: gi_12083207,
  misc_feature (1)..(246): Homolog of NCBI NO: 30685642 NR Description: auxin-responsive protein IAA13 (Indoleacetic protein 13) [Arabidopsis thaliana] >gi|29028860|gb|AAO64809.1|
  misc_feature (2)..(246): Homolog of NCBI NO: 21593621 NR Description: putative auxin-induced protein, IAA12
  misc_feature (2)..(246): Homolog of NCBI NO: 15219761 NR Description: putative auxin-induced protein, IAA12; protein At1g04550.1, supported by cDNA: 40608., supported by cDNA: supported by cDNA: gi_17529011, supported by cDNA: gi_20465450,
  misc_feature (2)..(164): Homolog of NCBI NO: 30678907 NR Description: auxin-responsive protein IAA12 (Indoleacetic
  misc_feature (53)..(230): Homolog of NCBI NO: 20269057 NR Description: aux/IAA protein [Populus tremula x Populus
  misc_feature (12)..(231): Homolog of NCBI NO: 15235385 NR Description: early auxin-inducible protein 11 (IAA11); protein At4g28640.1, supported by cDNA: gi_12083203, supported by cDNA:
  misc_feature (12)..(231): Homolog of NCBI NO: 20466408 NR Description: early auxin-inducible protein 11 [Arabidopsis
  misc_feature (11)..(230): Homolog of NCBI NO: 15219646 NR Description: putative IAA1 protein; protein id: At1g04100.1, by cDNA: gi_12083201, supported by cDNA: gi_972922 [Arabidopsis
  misc_feature (56)..(243): Homolog of NCBI NO: 21594025 NR Description: auxin regulated protein IAA18, putative

SEQ ID NO: 74644 - protein, 240 aa, Arabidopsis thaliana; identical to SEQ ID NO: 29295
  peptide (1)..(240): Ceres Seq. ID no. 5678837
  misc_feature (9)..(228): Pfam Name: AUX/IAA family Pfam Description: AUX/IAA family
  misc_feature (1)..(240): Homolog of NCBI NO: 15225833 NR Description: auxin regulated protein (IAA13); protein id: supported by cDNA: 13741., supported by cDNA: gi_12083207,
  misc_feature (1)..(240): Homolog of NCBI NO: 30685642 NR Description: auxin-responsive protein IAA13 (Indoleacetic protein 13) [Arabidopsis thaliana] >gi|29028860|gb|AAO64809.1|
  misc_feature (1)..(240): Homolog of NCBI NO: 21593621 NR Description: putative auxin-induced protein, IAA12
  misc_feature (1)..(240): Homolog of NCBI NO: 15219761 NR Description: putative auxin-induced protein, IAA12; protein At1g04550.1, supported by cDNA: 40608., supported by cDNA: supported by cDNA: gi_17529011, supported by cDNA: gi_20465450,
  misc_feature (1)..(158): Homolog of NCBI NO: 30678907 NR Description: auxin-responsive protein IAA12 (Indoleacetic
  misc_feature (47)..(224): Homolog of NCBI NO: 20269057 NR Description: aux/IAA protein [Populus tremula x Populus
  misc_feature (6)..(225): Homolog of NCBI NO: 15235385 NR Description: early auxin-inducible protein 11 (IAA11); protein At4g28640.1, supported by cDNA: gi_12083203, supported by cDNA:
  misc_feature (6)..(225): Homolog of NCBI NO: 20466408 NR Description: early auxin-inducible protein 11 [Arabidopsis
  misc_feature (5)..(224): Homolog of NCBI NO: 15219646 NR Description: putative IAA1 protein; protein id: At1g04100.1, by cDNA: gi_12083201, supported by cDNA: gi_972922 [Arabidopsis
  misc_feature (50)..(237): Homolog of NCBI NO: 21594025 NR Description: auxin regulated protein IAA18, putative

SEQ ID NO: 74645 - protein, 160 aa, Arabidopsis thaliana; identical to SEQ ID NO: 29296
  peptide (1)..(160): Ceres Seq. ID no. 5678838
  misc_feature (1)..(148): Pfam Name: AUX/IAA family Pfam Description: AUX/IAA family
  misc_feature (1)..(160): Homolog of NCBI NO: 15225833 NR Description: auxin regulated protein (IAA13); protein id: supported by cDNA: 13741., supported by cDNA: gi_12083207,
  misc_feature (1)..(160): Homolog of NCBI NO: 30685642 NR Description: auxin-responsive protein IAA13 (Indoleacetic protein 13) [Arabidopsis thaliana] >gi|29028860|gb|AAO64809.1|
  misc_feature (1)..(160): Homolog of NCBI NO: 21593621 NR Description: putative auxin-induced protein, IAA12
  misc_feature (1)..(160): Homolog of NCBI NO: 15219761 NR Description: putative auxin-induced protein, IAA12; protein At1g04550.1, supported by cDNA: 40608., supported by cDNA: supported by cDNA: gi_17529011, supported by cDNA: gi_20465450,
  misc_feature (1)..(78): Homolog of NCBI NO: 30678907 NR Description: auxin-responsive protein IAA12 (Indoleacetic
  misc_feature (1)..(144): Homolog of NCBI NO: 20269057 NR Description: aux/IAA protein [Populus tremula x Populus
  misc_feature (1)..(145): Homolog of NCBI NO: 15235385 NR Description: early auxin-inducible protein 11 (IAA11); protein At4g28640.1, supported by cDNA: gi_12083203, supported by cDNA:
  misc_feature (1)..(145): Homolog of NCBI NO: 20466408 NR Description: early auxin-inducible protein 11 [Arabidopsis
  misc_feature (1)..(144): Homolog of NCBI NO: 15219646 NR Description: putative IAA1 protein; protein id: At1g04100.1, by cDNA: gi_12083201, supported by cDNA: gi_972922 [Arabidopsis
  misc_feature (1)..(157): Homolog of NCBI NO: 21594025 NR Description: auxin regulated protein IAA18, putative

SEQ ID NO: 74646 - DNA, 757 bp, Arabidopsis thaliana
  misc_feature (1)..(757): Ceres Seq. ID no. 5678851
  misc_feature: MA Experiment ID: 108434 Result: Up-regulated in Transcription
  misc_feature: MA Experiment 108434 PARAMETER Experiment Name: At_Root_Tips_cDNA_P Parameter: Tissue Value: Root Tips
  misc_feature: MA Experiment ID: 108462 Result: Down-regulated in Transcription
  misc_feature: MA Experiment 108462 PARAMETER Experiment Name: At_Germinating_Seeds_cDNA_P Parameter: Age (day) Value: 2 vs. 0
  misc_feature: MA Experiment 108462 PARAMETER Experiment Name: At_Germinating_Seeds_cDNA_P Parameter: Tissue Value: Germinating Seeds
  misc_feature: MA Experiment ID: 108463 Result: Down-regulated in Transcription
  misc_feature: MA Experiment 108463 PARAMETER Experiment Name: At_Germinating_Seeds_cDNA_P Parameter: Age (day) Value: 3 vs. 0
  misc_feature: MA Experiment 108463 PARAMETER Experiment Name: At_Germinating_Seeds_cDNA_P Parameter: Tissue Value: Germinating Seeds
  misc_feature: MA Experiment ID: 108464 Result: Down-regulated in Transcription
  misc_feature: MA Experiment 108464 PARAMETER Experiment Name: At_Germinating_Seeds_cDNA_P Parameter: Age (day) Value: 4 vs. 0
  misc_feature: MA Experiment 108464 PARAMETER Experiment Name: At_Germinating_Seeds_cDNA_P Parameter: Tissue Value: Germinating Seeds
  misc_feature: MA Experiment ID: 108488 Result: Up-regulated in Transcription
  misc_feature: MA Experiment ID: 108561 Result: Down-regulated in Transcription
  misc_feature: MA Experiment 108561 PARAMETER Experiment Name: At_100uM_ABA_cDNA_P Parameter: Timepoint (hr) Value: 6
  misc_feature: MA Experiment 108561 PARAMETER Experiment Name: At_100uM_ABA_cDNA_P Parameter: Tissue Value: Aerial
  misc_feature: MA Experiment 108561 PARAMETER Experiment Name: At_100uM_ABA_cDNA_P Parameter: Treatment Value: 100uM ABA vs. No Treatment
  misc_feature: MA Experiment ID: 108573 Result: Down-regulated in Transcription
  misc_feature: MA Experiment 108573 PARAMETER Experiment Name: At_Drought_cDNA_P Parameter: Timepoint (hr) Value: 6
  misc_feature: MA Experiment 108573 PARAMETER Experiment Name: At_Drought_cDNA_P Parameter: Tissue Value: Aerial
  misc_feature: MA Experiment 108573 PARAMETER Experiment Name: At_Drought_cDNA_P Parameter: Treatment Value: Drought vs. No Drought
  misc_feature: MA Experiment ID: 20000184 Result: Up-regulated in Transcription
  misc_feature: MA Experiment 20000184 PARAMETER Experiment Name: At_Shoots__P Parameter: Age (day) Value: 7
  misc_feature: MA Experiment 20000184 PARAMETER Experiment Name: At_Shoots__P Parameter: Tissue Value: Shoots vs. Whole Plant
  misc_feature: MA Experiment ID: 20000437 Result: Down-regulated in Transcription
  misc_feature: MA Experiment 20000437 PARAMETER Experiment Name: At_Drought_P Parameter: Age (day) Value: 8
  misc_feature: MA Experiment 20000437 PARAMETER Experiment Name: At_Drought_P Parameter: Organism Value: A. thaliana
  misc_feature: MA Experiment 20000437 PARAMETER Experiment Name: At_Drought_P Parameter: Plant Line Value: WS
  misc_feature: MA Experiment 20000437 PARAMETER Experiment Name: At_Drought_P Parameter: Timepoint (hr) Value: 24
  misc_feature: MA Experiment 20000437 PARAMETER Experiment Name: At_Drought_P Parameter: Tissue Value: Whole Plant
  misc_feature: MA Experiment 20000437 PARAMETER Experiment Name: At_Drought_P Parameter: Treatment Value: Drought vs. No Drought
  misc_feature: MA Experiment ID: 20000794 Result: Down-regulated in Transcription
  misc_feature: MA Experiment 20000794 PARAMETER Experiment Name: At_Petals_P Parameter: Age (day) Value: 23-25 days
  misc_feature: MA Experiment 20000794 PARAMETER Experiment Name: At_Petals_P Parameter: Plant Line Value: WS
  misc_feature: MA Experiment 20000794 PARAMETER Experiment Name: At_Petals_P Parameter: Tissue Value: Petals vs. Whole plant
  misc_feature: MA Experiment ID: 20001558 Result: Up-regulated in Transcription
  misc_feature: MA Experiment 20001558 PARAMETER Experiment Name: At_Drought_Soil_Dry_P Parameter: Age (day) Value: 27
  misc_feature: MA Experiment 20001558 PARAMETER Experiment Name: At_Drought_Soil_Dry_P Parameter: Organism Value: A. thaliana
  misc_feature: MA Experiment 20001558 PARAMETER Experiment Name: At_Drought_Soil_Dry_P Parameter: Plant Line Value: WS
  misc_feature: MA Experiment 20001558 PARAMETER Experiment Name: At_Drought_Soil_Dry_P Parameter: Post Timepoint (hr) Value: 6
  misc_feature: MA Experiment 20001558 PARAMETER Experiment Name: At_Drought_Soil_Dry_P Parameter: Post-Treatment Value: Re-Water vs. No Drought
  misc_feature: MA Experiment 20001558 PARAMETER Experiment Name: At_Drought_Soil_Dry_P Parameter: Timepoint (day) Value: 13
  misc_feature: MA Experiment 20001558 PARAMETER Experiment Name: At_Drought_Soil_Dry_P Parameter: Treatment Value: Drought vs. No Drought
  misc_feature: MA Experiment ID: 20001560 Result: Up-regulated in Transcription
  misc_feature: MA Experiment 20001560 PARAMETER Experiment Name: At_Drought_Soil_Dry_P Parameter: Age (day) Value: 28
  misc_feature: MA Experiment 20001560 PARAMETER Experiment Name: At_Drought_Soil_Dry_P Parameter: Organism Value: A. thaliana
  misc_feature: MA Experiment 20001560 PARAMETER Experiment Name: At_Drought_Soil_Dry_P Parameter: Plant Line Value: WS
  misc_feature: MA Experiment 20001560 PARAMETER Experiment Name: At_Drought_Soil_Dry_P Parameter: Post Timepoint (hr) Value: None
  misc_feature: MA Experiment 20001560 PARAMETER Experiment Name: At_Drought_Soil_Dry_P Parameter: Post-Treatment Value: None
  misc_feature: MA Experiment 20001560 PARAMETER Experiment Name: At_Drought_Soil_Dry_P Parameter: Timepoint (day) Value: 14
  misc_feature: MA Experiment 20001560 PARAMETER Experiment Name: At_Drought_Soil_Dry_P Parameter: Treatment Value: Drought vs. No Drought
  misc_feature: MA Experiment ID: 20001757 Result: Up-regulated in Transcription
  misc_feature: MA Experiment 20001757 PARAMETER Experiment Name: At_50mM_NH4NO3_L-to-H_P Parameter: Timepoint (hr) Value: 6
  misc_feature: MA Experiment 20001757 PARAMETER Experiment Name: At_50mM_NH4NO3_L-to-H_P Parameter: Tissue Value: Leaf
  misc_feature: MA Experiment 20001757 PARAMETER Experiment Name: At_50mM_NH4NO3_L-to-H_P Parameter: Treatment Value: 50mM NH4NO3 vs 100mM Mannitol
atccgcagaaaaccctattgctcccctttgctcaagctcagtgcctctttgcagcgaaagctcaaccaacaagacgatgattatctcagagaacaatcgcagagagatctgcaaataccttttcaaagagggagtatgctttgctaagaaggatttcaatctcccaaagcatccgttgattgatgtaccaaacctgcaagtgattaagctcatgcagagtttcaagtccaaggagtacgttagggagacatttgcgtggatgcattattattggtttctgactaatgaaggaattgagttcttgagaacttatcttaaccttccttccgatgttgtccctgctactttgaagaagtctgctaagcccggtggtcgtccctttggtggcccacctggtgatcgccaaagaggaccacctcgctctgatggagaccgtcccagatttggtgaccgtgatggataccgtggaggcccacgtggtggtgatgagaagggtggagctccagctgatttccagccgtctttccaaggaggtggtggtaggcctggttttggccgtggtgcaggcggttacagtgcagcagcaccatctggttcagggttcccttgaaaaatttgttgtcatattgcgacgatggaaggacagttttgttttttgttctagttctgtttgtgtaatgcaaatctggaatctataatctatctattaccttcaccttggtttaaacgaacaaatcctgtagtttcaggattagtg

SEQ ID NO: 74647 - protein, 202 aa, Arabidopsis thaliana; identical to SEQ ID NO: 28486
  peptide (1)..(202): Ceres Seq. ID no. 5678852
  misc_feature (28)..(123): Pfam Name: Plectin/S10 domain Pfam Description: Plectin/S10 domain
  misc_feature (26)..(202): Homolog of NCBI NO: 15235985 NR Description: putative ribosomal protein S10; protein id: supported by cDNA: gi_14334535, supported by cDNA: gi_21281206 thaliana] >gi|20139845|sp|Q9SW09|R101_ARATH 40S putative
  misc_feature (26)..(202): Homolog of NCBI NO: 15237217 NR Description: putative protein; protein id: At5g52650.1, by cDNA: 91769., supported by cDNA: gi_17528965 [Arabidopsis >gi|17528966|gb|AAL38693.1| unknown protein [Arabidopsis
  misc_feature (26)..(202): Homolog of NCBI NO: 20139798 NR Description: 40S ribosomal protein S10-3 contains similarity to 40S ribosomal protein S10~gene_id:F6N7.14
  misc_feature (26)..(199): Homolog of NCBI NO: 34897532 NR Description: OSJNBa0042L16.3 [Oryza sativa (japonica
  misc_feature (26)..(199): Homolog of NCBI NO: 20140213 NR Description: 40S ribosomal protein S10
  misc_feature (26)..(202): Homolog of NCBI NO: 15238099 NR Description: putative protein; protein id: At5g41520.1, by cDNA: gi_14030698, supported by cDNA: gi_14335121, supported cDNA: gi_16974520 [Arabidopsis thaliana]
  misc_feature (26)..(197): Homolog of NCBI NO: 34905824 NR Description: putative ribosomal protein S10 [Oryza sativa
  misc_feature (26)..(196): Homolog of NCBI NO: 40642980 NR Description: ribosomal protein S10 [Crassostrea gigas]
  misc_feature (26)..(188): Homolog of NCBI NO: 24266976 NR Description: ribosomal protein S10 [Branchiostoma belcheri]
  misc_feature (26)..(188): Homolog of NCBI NO: 28200289 NR Description: ribosomal protein S10 [Branchiostoma belcheri

SEQ ID NO: 74648 - protein, 177 aa, Arabidopsis thaliana; identical to SEQ ID NO: 28487
  peptide (1)..(177): Ceres Seq. ID no. 5678853
  misc_feature (3)..(98): Pfam Name: Plectin/S10 domain Pfam Description: Plectin/S10 domain
  misc_feature (1)..(177): Homolog of NCBI NO: 15235985 NR Description: putative ribosomal protein S10; protein id: supported by cDNA: gi_14334535, supported by cDNA: gi_21281206 thaliana] >gi|20139845|sp|Q9SW09|R101_ARATH 40S putative
  misc_feature (1)..(177): Homolog of NCBI NO: 15237217 NR Description: putative protein; protein id: At5g52650.1, by cDNA: 91769., supported by cDNA: gi_17528965 [Arabidopsis >gi|17528966|gb|AAL38693.1| unknown protein [Arabidopsis
  misc_feature (1)..(177): Homolog of NCBI NO: 20139798 NR Description: 40S ribosomal protein S10-3 contains similarity to 40S ribosomal protein S10~gene_id:F6N7.14
  misc_feature (1)..(174): Homolog of NCBI NO: 34897532 NR Description: OSJNBa0042L16.3 [Oryza sativa (japonica
  misc_feature (1)..(174): Homolog of NCBI NO: 20140213 NR Description: 40S ribosomal protein S10
  misc_feature (1)..(177): Homolog of NCBI NO: 15238099 NR Description: putative protein; protein id: At5g41520.1, by cDNA: gi_14030698, supported by cDNA: gi_14335121, supported cDNA: gi_16974520 [Arabidopsis thaliana]
  misc_feature (1)..(172): Homolog of NCBI NO: 34905824 NR Description: putative ribosomal protein S10 [Oryza sativa
  misc_feature (1)..(171): Homolog of NCBI NO: 40642980 NR Description: ribosomal protein S10 [Crassostrea gigas]
  misc_feature (1)..(163): Homolog of NCBI NO: 24266976 NR Description: ribosomal protein S10 [Branchiostoma belcheri]
  misc_feature (1)..(163): Homolog of NCBI NO: 28200289 NR Description: ribosomal protein S10 [Branchiostoma belcheri

SEQ ID NO: 74649 - protein, 132 aa, Arabidopsis thaliana; identical to SEQ ID NO: 28488
  peptide (1)..(132): Ceres Seq. ID no. 5678854
  misc_feature (1)..(53): Pfam Name: Plectin/S10 domain Pfam Description: Plectin/S10 domain
  misc_feature (1)..(132): Homolog of NCBI NO: 15235985 NR Description: putative ribosomal protein S10; protein id: supported by cDNA: gi_14334535, supported by cDNA: gi_21281206 thaliana] >gi|20139845|sp|Q9SW09|R101_ARATH 40S putative
  misc_feature (1)..(132): Homolog of NCBI NO: 15237217 NR Description: putative protein; protein id: At5g52650.1, by cDNA: 91769., supported by cDNA: gi_17528965 [Arabidopsis >gi|17528966|gb|AAL38693.1| unknown protein [Arabidopsis
  misc_feature (1)..(132): Homolog of NCBI NO: 20139798 NR Description: 40S ribosomal protein S10-3 contains similarity to 40S ribosomal protein S10~gene_id:F6N7.14
  misc_feature (1)..(129): Homolog of NCBI NO: 34897532 NR Description: OSJNBa0042L16.3 [Oryza sativa (japonica
  misc_feature (1)..(129): Homolog of NCBI NO: 20140213 NR Description: 40S ribosomal protein S10
  misc_feature (1)..(132): Homolog of NCBI NO: 15238099 NR Description: putative protein; protein id: At5g41520.1, by cDNA: gi_14030698, supported by cDNA: gi_14335121, supported cDNA: gi_16974520 [Arabidopsis thaliana]
  misc_feature (1)..(127): Homolog of NCBI NO: 34905824 NR Description: putative ribosomal protein S10 [Oryza sativa
  misc_feature (1)..(126): Homolog of NCBI NO: 40642980 NR Description: ribosomal protein S10 [Crassostrea gigas]
  misc_feature (1)..(118): Homolog of NCBI NO: 24266976 NR Description: ribosomal protein S10 [Branchiostoma belcheri]
  misc_feature (1)..(118): Homolog of NCBI NO: 28200289 NR Description: ribosomal protein S10 [Branchiostoma belcheri

SEQ ID NO: 74650 - DNA, 1675 bp, Arabidopsis thaliana
  misc_feature (1)..(1675): Ceres Seq. ID no. 5678877
  misc_feature: MA Experiment ID: 108462 Result: Up-regulated in Transcription
  misc_feature: MA Experiment 108462 PARAMETER Experiment Name: At_Germinating_Seeds_cDNA_P Parameter: Age (day) Value: 2 vs. 0
  misc_feature: MA Experiment 108462 PARAMETER Experiment Name: At_Germinating_Seeds_cDNA_P Parameter: Tissue Value: Germinating Seeds
  misc_feature: MA Experiment ID: 108463 Result: Up-regulated in Transcription
  misc_feature: MA Experiment 108463 PARAMETER Experiment Name: At_Germinating_Seeds_cDNA_P Parameter: Age (day) Value: 3 vs. 0
  misc_feature: MA Experiment 108463 PARAMETER Experiment Name: At_Germinating_Seeds_cDNA_P Parameter: Tissue Value: Germinating Seeds
  misc_feature: MA Experiment ID: 108576 Result: Down-regulated in Transcription
  misc_feature: MA Experiment 108576 PARAMETER Experiment Name: At_42deg_Heat_cDNA_P Parameter: Temperature (deg C) Value: 42 vs. 22
  misc_feature: MA Experiment 108576 PARAMETER Experiment Name: At_42deg_Heat_cDNA_P Parameter: Timepoint (hr) Value: 1
  misc_feature: MA Experiment 108576 PARAMETER Experiment Name: At_42deg_Heat_cDNA_P Parameter: Tissue Value: Aerial
  misc_feature: MA Experiment ID: 108585 Result: Down-regulated in Transcription
  misc_feature: MA Experiment 108585 PARAMETER Experiment Name: At_5mM_NaNP_cDNA_P Parameter: Timepoint (hr) Value: 6
  misc_feature: MA Experiment 108585 PARAMETER Experiment Name: At_5mM_NaNP_cDNA_P Parameter: Tissue Value: Aerial
  misc_feature: MA Experiment 108585 PARAMETER Experiment Name: At_5mM_NaNP_cDNA_P Parameter: Treatment Value: null
  misc_feature: MA Experiment ID: 108595 Result: Down-regulated in Transcription
  misc_feature: MA Experiment 108595 PARAMETER Experiment Name: At_Ler-pi_Ovule_cDNA_P Parameter: Plant Line Value: null
  misc_feature: MA Experiment ID: 20000089 Result: Down-regulated in Transcription
  misc_feature: MA Experiment ID: 20000090 Result: Down-regulated in Transcription
  misc_feature: MA Experiment ID: 20000166 Result: Up-regulated in Transcription
  misc_feature: MA Experiment 20000166 PARAMETER Experiment Name: At_100uM_ABA_P Parameter: Age (day) Value: 14
  misc_feature: MA Experiment 20000166 PARAMETER Experiment Name: At_100uM_ABA_P Parameter: Organism Value: A. thaliana
  misc_feature: MA Experiment 20000166 PARAMETER Experiment Name: At_100uM_ABA_P Parameter: Plant Line Value: WS
  misc_feature: MA Experiment 20000166 PARAMETER Experiment Name: At_100uM_ABA_P Parameter: Timepoint (hr) Value: 1
  misc_feature: MA Experiment 20000166 PARAMETER Experiment Name: At_100uM_ABA_P Parameter: Tissue Value: Aerial
  misc_feature: MA Experiment 20000166 PARAMETER Experiment Name: At_100uM_ABA_P Parameter: Treatment Value: 100uM ABA vs. No Treatment
  misc_feature: MA Experiment ID: 20000184 Result: Up-regulated in Transcription
  misc_feature: MA Experiment 20000184 PARAMETER Experiment Name: At_Shoots__P Parameter: Age (day) Value: 7
  misc_feature: MA Experiment 20000184 PARAMETER Experiment Name: At_Shoots__P Parameter: Tissue Value: Shoots vs. Whole Plant
  misc_feature: MA Experiment ID: 20000224 Result: Down-regulated in Transcription
  misc_feature: MA Experiment ID: 20000227 Result: Down-regulated in Transcription
  misc_feature: MA Experiment 20000227 PARAMETER Experiment Name: At_Root-Tips-vs-Tops_P Parameter: Tissue Value: Root Tips vs. Root Tops
  misc_feature: MA Experiment ID: 20000438 Result: Up-regulated in Transcription
  misc_feature: MA Experiment 20000438 PARAMETER Experiment Name: At_Shoots__P Parameter: Age (day) Value: 14
  misc_feature: MA Experiment 20000438 PARAMETER Experiment Name: At_Shoots__P Parameter: Tissue Value: Shoots vs. Whole Plant
  misc_feature: MA Experiment ID: 20001247 Result: Up-regulated in Transcription
  misc_feature: MA Experiment 20001247 PARAMETER Experiment Name: At_Far-red-induction_P Parameter: Age (day) Value: 7
  misc_feature: MA Experiment 20001247 PARAMETER Experiment Name: At_Far-red-induction_P Parameter: Light Value: Far-red vs. White
  misc_feature: MA Experiment 20001247 PARAMETER Experiment Name: At_Far-red-induction_P Parameter: Organism Value: A. thaliana
  misc_feature: MA Experiment 20001247 PARAMETER Experiment Name: At_Far-red-induction_P Parameter: Plant Line Value: Columbia
  misc_feature: MA Experiment 20001247 PARAMETER Experiment Name: At_Far-red-induction_P Parameter: Timepoint (hr) Value: 1
  misc_feature: MA Experiment 20001247 PARAMETER Experiment Name: At_Far-red-induction_P Parameter: Tissue Value: Whole Plant
  misc_feature: MA Experiment ID: 20001450 Result: Up-regulated in Transcription
  misc_feature: MA Experiment 20001450 PARAMETER Experiment Name: At_Far-red-induction_P Parameter: Age (day) Value: 7
  misc_feature: MA Experiment 20001450 PARAMETER Experiment Name: At_Far-red-induction_P Parameter: Light Value: Far-red vs. White
  misc_feature: MA Experiment 20001450 PARAMETER Experiment Name: At_Far-red-induction_P Parameter: Organism Value: A. thaliana
  misc_feature: MA Experiment 20001450 PARAMETER Experiment Name: At_Far-red-induction_P Parameter: Plant Line Value: Columbia
  misc_feature: MA Experiment 20001450 PARAMETER Experiment Name: At_Far-red-induction_P Parameter: Timepoint (hr) Value: 8
  misc_feature: MA Experiment 20001450 PARAMETER Experiment Name: At_Far-red-induction_P Parameter: Tissue Value: Whole Plant
  misc_feature: MA Experiment ID: 20001557 Result: Down-regulated in Transcription
  misc_feature: MA Experiment 20001557 PARAMETER Experiment Name: At_Drought_Soil_Dry_P Parameter: Age (day) Value: 27
  misc_feature: MA Experiment 20001557 PARAMETER Experiment Name: At_Drought_Soil_Dry_P Parameter: Organism Value: A. thaliana
  misc_feature: MA Experiment 20001557 PARAMETER Experiment Name: At_Drought_Soil_Dry_P Parameter: Plant Line Value: WS
  misc_feature: MA Experiment 20001557 PARAMETER Experiment Name: At_Drought_Soil_Dry_P Parameter: Post Timepoint (hr) Value: 3
  misc_feature: MA Experiment 20001557 PARAMETER Experiment Name: At_Drought_Soil_Dry_P Parameter: Post-Treatment Value: Re-Water vs. No Drought
  misc_feature: MA Experiment 20001557 PARAMETER Experiment Name: At_Drought_Soil_Dry_P Parameter: Timepoint (day) Value: 13
  misc_feature: MA Experiment 20001557 PARAMETER Experiment Name: At_Drought_Soil_Dry_P Parameter: Treatment Value: Drought vs. No Drought
  misc_feature: MA Experiment ID: 20001905 Result: Down-regulated in Transcription
  misc_feature: MA Experiment 20001905 PARAMETER Experiment Name: At_Drought_Reproduction_P Parameter: Age (day) Value: 40
  misc_feature: MA Experiment 20001905 PARAMETER Experiment Name: At_Drought_Reproduction_P Parameter: Organism Value: A. thaliana
  misc_feature: MA Experiment 20001905 PARAMETER Experiment Name: At_Drought_Reproduction_P Parameter: Plant Line Value: WS
  misc_feature: MA Experiment 20001905 PARAMETER Experiment Name: At_Drought_Reproduction_P Parameter: Timepoint (day) Value: 10
  misc_feature: MA Experiment 20001905 PARAMETER Experiment Name: At_Drought_Reproduction_P Parameter: Tissue Value: Rosettes
  misc_feature: MA Experiment 20001905 PARAMETER Experiment Name: At_Drought_Reproduction_P Parameter: Treatment Value: Drought vs. No Drought
  misc_feature: Pfam Name: Pkinase Pfam Description: Protein kinase domain
agatgtaatttgtataattttagtaactcttcagtttttttttgttttaaaaatatattttctctctctctgtcttcctgcaatctatcgccggccgattcaataatttcgctttactctgccaaaaaagtttgttcttttgttttctgggattatccaaagagaagaaacagaggaaatcaatctcttttttagtttcagaccctaaatcctaggttttgaagttttgtttctttagtaattttgtcaggttttgtgtctggtgttgggatttttcggagcttggtttcttgaaccagctccattttctaaaaattccttctttaaatccccattgttgtaagtcttaaagaaaaaagaagatgacttgttgtttctcttgtttgaatcctcgaaccaaggacataagagtcgacattgataacgctcgatgcaactctcgttaccaaaccgattcatcagttcatggaagtgatacaacaggaacagagtcgatttcgggtatcttagtaaatggtaaagtgaatagtccgatacctggtggtggagctcggagcttcacgttcaaggagttagctgcagctacaagaaacttccgggaagttaatttgctcggagaaggaggttttggcagagtttataagggacgtttagattcaggacaagtagtggctattaagcaattgaatccagatgggcttcaagggaaccgagagtttatagtagaagttcttatgcttagcttattgcatcatcccaatctcgttacattgatcggttactgtacttctggtgatcaaagacttcttgtctatgaatacatgccaatgggaagcttagaagatcacctttttgatcttgagtctaatcaagaaccattaagctggaatactcgaatgaaaatcgcggttggtgcagctcgaggaatagagtatcttcactgcacagctaacccgccagtgatttaccgtgatttgaaatccgcaaacatattgttagataaagagttcagtccaaaactctcggatttcggattggcgaaactcggtccagttggtgatcgaactcatgtatcgactcgtgtcatgggaacttacggttactgtgctcctgaatacgcaatgagcgggaaattaactgttaaatcggatatctactgcttcggtgtagtgttgcttgagctgattactgggagaaaagctattgatttaggtcaaaagcaaggcgagcagaatcttgttacttggtcacgtccatacctcaaggatcagaagaagtttggacatttagtggatccgtctctacgaggaaaatacccaagacggtgtttaaactatgcgattgcgattattgcaatgtgtcttaatgaagaagctcattatcgaccgttcataggtgacatagttgtggcactagagtacttagccgcacagagcagatctcatgaagctcgaaacgtctcatcaccgtcaccagagatttcaagaacgccgcgacgagacttgtaaaaactcaaaaacagcttttaagaatttcagtttggtgttgtgtaaaaatggttttttttgtttctttctcagaaaacaatatatgtttggtaaatgtttcgttattagtctcttttacttgatgtatatggcaattatggaaacaattaaagttcttttatatgtgt

SEQ ID NO: 74651 - protein, 381 aa, Arabidopsis thaliana; identical to SEQ ID NO: 36777
  peptide (1)..(381): Ceres Seq. ID no. 5678878
  misc_feature: Pfam Name: Pkinase Pfam Description: Protein kinase domain
  misc_feature (1)..(381): Homolog of NCBI NO: 8778594 NR Description: F5M15.3 [Arabidopsis thaliana]
  misc_feature (33)..(381): Homolog of NCBI NO: 15217992 NR Description: protein kinase, putative; protein id: At1g20650.1
  misc_feature (4)..(378): Homolog of NCBI NO: 15223033 NR Description: putative protein kinase; protein id: At1g76370.1
  misc_feature (12)..(381): Homolog of NCBI NO: 34907210 NR Description: putative serine/threonine kinase PBS1 protein
  misc_feature (1)..(381): Homolog of NCBI NO: 15238886 NR Description: protein kinase -like protein; protein id:
  misc_feature (4)..(376): Homolog of NCBI NO: 34395193 NR Description: putative protein serine/threonine kinase [Oryza
  misc_feature (4)..(358): Homolog of NCBI NO: 15240038 NR Description: protein kinase-like; protein id: At5g13160.1, by cDNA: gi_11559837, supported by cDNA: gi_13937146, supported
  misc_feature (1)..(370): Homolog of NCBI NO: 34394036 NR Description: putative protein serine/threonine kinase BNK1
  misc_feature (61)..(376): Homolog of NCBI NO: 34899302 NR Description: putative protein serine/threonine kinase [Oryza
  misc_feature (63)..(357): Homolog of NCBI NO: 11259782 NR Description: protein kinase-like - Arabidopsis thaliana

SEQ ID NO: 74652 - protein, 257 aa, Arabidopsis thaliana; identical to SEQ ID NO: 36778
  peptide (1)..(257): Ceres Seq. ID no. 5678879
  misc_feature: Pfam Name: Pkinase Pfam Description: Protein kinase domain
  misc_feature (1)..(257): Homolog of NCBI NO: 8778594 NR Description: F5M15.3 [Arabidopsis thaliana]
  misc_feature (1)..(257): Homolog of NCBI NO: 15217992 NR Description: protein kinase, putative; protein id: At1g20650.1
  misc_feature (1)..(254): Homolog of NCBI NO: 15223033 NR Description: putative protein kinase; protein id: At1g76370.1
  misc_feature (1)..(257): Homolog of NCBI NO: 34907210 NR Description: putative serine/threonine kinase PBS1 protein
  misc_feature (1)..(257): Homolog of NCBI NO: 15238886 NR Description: protein kinase -like protein; protein id:
  misc_feature (1)..(252): Homolog of NCBI NO: 34395193 NR Description: putative protein serine/threonine kinase [Oryza
  misc_feature (1)..(234): Homolog of NCBI NO: 15240038 NR Description: protein kinase-like; protein id: At5g13160.1, by cDNA: gi_11559837, supported by cDNA: gi_13937146, supported
  misc_feature (1)..(246): Homolog of NCBI NO: 34394036 NR Description: putative protein serine/threonine kinase BNK1
  misc_feature (1)..(252): Homolog of NCBI NO: 34899302 NR Description: putative protein serine/threonine kinase [Oryza
  misc_feature (1)..(233): Homolog of NCBI NO: 11259782 NR Description: protein kinase-like - Arabidopsis thaliana

SEQ ID NO: 74653 - protein, 228 aa, Arabidopsis thaliana; identical to SEQ ID NO: 36779
  peptide (1)..(228): Ceres Seq. ID no. 5678880
  misc_feature: Pfam Name: Pkinase Pfam Description: Protein kinase domain
  misc_feature (1)..(228): Homolog of NCBI NO: 8778594 NR Description: F5M15.3 [Arabidopsis thaliana]
  misc_feature (1)..(228): Homolog of NCBI NO: 15217992 NR Description: protein kinase, putative; protein id: At1g20650.1
  misc_feature (1)..(225): Homolog of NCBI NO: 15223033 NR Description: putative protein kinase; protein id: At1g76370.1
  misc_feature (1)..(228): Homolog of NCBI NO: 34907210 NR Description: putative serine/threonine kinase PBS1 protein
  misc_feature (1)..(228): Homolog of NCBI NO: 15238886 NR Description: protein kinase -like protein; protein id:
  misc_feature (1)..(223): Homolog of NCBI NO: 34395193 NR Description: putative protein serine/threonine kinase [Oryza
  misc_feature (1)..(205): Homolog of NCBI NO: 15240038 NR Description: protein kinase-like; protein id: At5g13160.1, by cDNA: gi_11559837, supported by cDNA: gi_13937146, supported
  misc_feature (1)..(217): Homolog of NCBI NO: 34394036 NR Description: putative protein serine/threonine kinase BNK1
  misc_feature (1)..(223): Homolog of NCBI NO: 34899302 NR Description: putative protein serine/threonine kinase [Oryza
  misc_feature (1)..(204): Homolog of NCBI NO: 11259782 NR Description: protein kinase-like - Arabidopsis thaliana

SEQ ID NO: 74654 - DNA, 990 bp, Arabidopsis thaliana
  misc_feature (1)..(990): Ceres Seq. ID no. 5678897
  misc_feature: MA Experiment ID: 108434 Result: Down-regulated in Transcription
  misc_feature: MA Experiment 108434 PARAMETER Experiment Name: At_Root_Tips_cDNA_P Parameter: Tissue Value: Root Tips
  misc_feature: MA Experiment ID: 108462 Result: Down-regulated in Transcription
  misc_feature: MA Experiment 108462 PARAMETER Experiment Name: At_Germinating_Seeds_cDNA_P Parameter: Age (day) Value: 2 vs. 0
  misc_feature: MA Experiment 108462 PARAMETER Experiment Name: At_Germinating_Seeds_cDNA_P Parameter: Tissue Value: Germinating Seeds
  misc_feature: MA Experiment ID: 108463 Result: Down-regulated in Transcription
  misc_feature: MA Experiment 108463 PARAMETER Experiment Name: At_Germinating_Seeds_cDNA_P Parameter: Age (day) Value: 3 vs. 0
  misc_feature: MA Experiment 108463 PARAMETER Experiment Name: At_Germinating_Seeds_cDNA_P Parameter: Tissue Value: Germinating Seeds
  misc_feature: MA Experiment ID: 108464 Result: Down-regulated in Transcription
  misc_feature: MA Experiment 108464 PARAMETER Experiment Name: At_Germinating_Seeds_cDNA_P Parameter: Age (day) Value: 4 vs. 0
  misc_feature: MA Experiment 108464 PARAMETER Experiment Name: At_Germinating_Seeds_cDNA_P Parameter: Tissue Value: Germinating Seeds
  misc_feature: MA Experiment ID: 108488 Result: Up-regulated in Transcription
  misc_feature: MA Experiment ID: 108501 Result: Down-regulated in Transcription
  misc_feature: MA Experiment 108501 PARAMETER Experiment Name: At_ap2_floral_buds_cDNA_P Parameter: Plant Line Value: ap2 (Ler.)
  misc_feature: MA Experiment 108501 PARAMETER Experiment Name: At_ap2_floral_buds_cDNA_P Parameter: Tissue Value: Closed Flower
  misc_feature: MA Experiment ID: 108573 Result: Up-regulated in Transcription
  misc_feature: MA Experiment 108573 PARAMETER Experiment Name: At_Drought_cDNA_P Parameter: Timepoint (hr) Value: 6
  misc_feature: MA Experiment 108573 PARAMETER Experiment Name: At_Drought_cDNA_P Parameter: Tissue Value: Aerial
  misc_feature: MA Experiment 108573 PARAMETER Experiment Name: At_Drought_cDNA_P Parameter: Treatment Value: Drought vs. No Drought
  misc_feature: MA Experiment ID: 108576 Result: Up-regulated in Transcription
  misc_feature: MA Experiment 108576 PARAMETER Experiment Name: At_42deg_Heat_cDNA_P Parameter: Temperature (deg C) Value: 42 vs. 22
  misc_feature: MA Experiment 108576 PARAMETER Experiment Name: At_42deg_Heat_cDNA_P Parameter: Timepoint (hr) Value: 1
  misc_feature: MA Experiment 108576 PARAMETER Experiment Name: At_42deg_Heat_cDNA_P Parameter: Tissue Value: Aerial
  misc_feature: MA Experiment ID: 108577 Result: Up-regulated in Transcription
  misc_feature: MA Experiment 108577 PARAMETER Experiment Name: At_42deg_Heat_cDNA_P Parameter: Temperature (deg C) Value: 42 vs. 22
  misc_feature: MA Experiment 108577 PARAMETER Experiment Name: At_42deg_Heat_cDNA_P Parameter: Timepoint (hr) Value: 6
  misc_feature: MA Experiment 108577 PARAMETER Experiment Name: At_42deg_Heat_cDNA_P Parameter: Tissue Value: Aerial
  misc_feature: MA Experiment ID: 108595 Result: Up-regulated in Transcription
  misc_feature: MA Experiment 108595 PARAMETER Experiment Name: At_Ler-pi_Ovule_cDNA_P Parameter: Plant Line Value: null
  misc_feature: MA Experiment ID: 20000070 Result: Up-regulated in Transcription
  misc_feature: MA Experiment 20000070 PARAMETER Experiment Name: At_100uM_ABA_Mutants_cDNA_P Parameter: Plant Line Value: CS24
  misc_feature: MA Experiment 20000070 PARAMETER Experiment Name: At_100uM_ABA_Mutants_cDNA_P Parameter: Timepoint (hr) Value: 6
  misc_feature: MA Experiment 20000070 PARAMETER Experiment Name: At_100uM_ABA_Mutants_cDNA_P Parameter: Tissue Value: Aerial
  misc_feature: MA Experiment 20000070 PARAMETER Experiment Name: At_100uM_ABA_Mutants_cDNA_P Parameter: Treatment Value: 100uM ABA vs. No Treatment
  misc_feature: MA Experiment ID: 20000088 Result: Up-regulated in Transcription
  misc_feature: MA Experiment 20000088 PARAMETER Experiment Name: At_100uM_ABA_Mutants_cDNA_P Parameter: Plant Line Value: Landsberg
  misc_feature: MA Experiment 20000088 PARAMETER Experiment Name: At_100uM_ABA_Mutants_cDNA_P Parameter: Timepoint (hr) Value: 6
  misc_feature: MA Experiment 20000088 PARAMETER Experiment Name: At_100uM_ABA_Mutants_cDNA_P Parameter: Tissue Value: Aerial
  misc_feature: MA Experiment 20000088 PARAMETER Experiment Name: At_100uM_ABA_Mutants_cDNA_P Parameter: Treatment Value: 100uM ABA vs. No Treatment
  misc_feature: MA Experiment ID: 20000093 Result: Up-regulated in Transcription
  misc_feature: MA Experiment 20000093 PARAMETER Experiment Name: At_42deg_Heat_cDNA_P Parameter: Temperature (deg C) Value: 42 vs. 22
  misc_feature: MA Experiment 20000093 PARAMETER Experiment Name: At_42deg_Heat_cDNA_P Parameter: Timepoint (hr) Value: 0.5
  misc_feature: MA Experiment 20000093 PARAMETER Experiment Name: At_42deg_Heat_cDNA_P Parameter: Tissue Value: Aerial
  misc_feature: MA Experiment ID: 20000111 Result: Up-regulated in Transcription
  misc_feature: MA Experiment 20000111 PARAMETER Experiment Name: At_42deg_Heat_cDNA_P Parameter: Temperature (deg C) Value: 42 vs. 22
  misc_feature: MA Experiment 20000111 PARAMETER Experiment Name: At_42deg_Heat_cDNA_P Parameter: Timepoint (hr) Value: 6
  misc_feature: MA Experiment 20000111 PARAMETER Experiment Name: At_42deg_Heat_cDNA_P Parameter: Tissue Value: Aerial
  misc_feature: MA Experiment ID: 20000112 Result: Up-regulated in Transcription
  misc_feature: MA Experiment 20000112 PARAMETER Experiment Name: At_42deg_Heat_cDNA_P Parameter: Temperature (deg C) Value: 42 vs. 22
  misc_feature: MA Experiment 20000112 PARAMETER Experiment Name: At_42deg_Heat_cDNA_P Parameter: Timepoint (hr) Value: 2
  misc_feature: MA Experiment 20000112 PARAMETER Experiment Name: At_42deg_Heat_cDNA_P Parameter: Tissue Value: Aerial
  misc_feature: MA Experiment ID: 20000113 Result: Up-regulated in Transcription
  misc_feature: MA Experiment 20000113 PARAMETER Experiment Name: At_42deg_Heat_cDNA_P Parameter: Temperature (deg C) Value: 42 vs. 22
  misc_feature: MA Experiment 20000113 PARAMETER Experiment Name: At_42deg_Heat_cDNA_P Parameter: Timepoint (hr) Value: 8
  misc_feature: MA Experiment 20000113 PARAMETER Experiment Name: At_42deg_Heat_cDNA_P Parameter: Tissue Value: Aerial
  misc_feature: MA Experiment ID: 20000144 Result: Up-regulated in Transcription
  misc_feature: MA Experiment 20000144 PARAMETER Experiment Name: At_42deg_Heat_cDNA_P Parameter: Temperature (deg C) Value: 42 vs. 22
  misc_feature: MA Experiment 20000144 PARAMETER Experiment Name: At_42deg_Heat_cDNA_P Parameter: Timepoint (hr) Value: 1
  misc_feature: MA Experiment 20000144 PARAMETER Experiment Name: At_42deg_Heat_cDNA_P Parameter: Tissue Value: Aerial
  misc_feature: MA Experiment ID: 20000171 Result: Up-regulated in Transcription
  misc_feature: MA Experiment 20000171 PARAMETER Experiment Name: At_42deg_Heat_P Parameter: Age (day) Value: 14
  misc_feature: MA Experiment 20000171 PARAMETER Experiment Name: At_42deg_Heat_P Parameter: Organism Value: A. thaliana
  misc_feature: MA Experiment 20000171 PARAMETER Experiment Name: At_42deg_Heat_P Parameter: Plant Line Value: WS
  misc_feature: MA Experiment 20000171 PARAMETER Experiment Name: At_42deg_Heat_P Parameter: Temperature (deg C) Value: 42 vs. 22
  misc_feature: MA Experiment 20000171 PARAMETER Experiment Name: At_42deg_Heat_P Parameter: Timepoint (hr) Value: 1
  misc_feature: MA Experiment 20000171 PARAMETER Experiment Name: At_42deg_Heat_P Parameter: Tissue Value: Aerial
  misc_feature: MA Experiment ID: 20000173 Result: Up-regulated in Transcription
  misc_feature: MA Experiment 20000173 PARAMETER Experiment Name: At_42deg_Heat_P Parameter: Age (day) Value: 14
  misc_feature: MA Experiment 20000173 PARAMETER Experiment Name: At_42deg_Heat_P Parameter: Organism Value: A. thaliana
  misc_feature: MA Experiment 20000173 PARAMETER Experiment Name: At_42deg_Heat_P Parameter: Plant Line Value: WS
  misc_feature: MA Experiment 20000173 PARAMETER Experiment Name: At_42deg_Heat_P Parameter: Temperature (deg C) Value: 42 vs. 22
  misc_feature: MA Experiment 20000173 PARAMETER Experiment Name: At_42deg_Heat_P Parameter: Timepoint (hr) Value: 6
  misc_feature: MA Experiment 20000173 PARAMETER Experiment Name: At_42deg_Heat_P Parameter: Tissue Value: Aerial
  misc_feature: MA Experiment ID: 20000184 Result: Down-regulated in Transcription
  misc_feature: MA Experiment 20000184 PARAMETER Experiment Name: At_Shoots__P Parameter: Age (day) Value: 7
  misc_feature: MA Experiment 20000184 PARAMETER Experiment Name: At_Shoots__P Parameter: Tissue Value: Shoots vs. Whole Plant
  misc_feature: MA Experiment ID: 20000264 Result: Up-regulated in Transcription
  misc_feature: MA Experiment 20000264 PARAMETER Experiment Name: At_Open_Flower_P Parameter: Age (day) Value: 21
  misc_feature: MA Experiment 20000264 PARAMETER Experiment Name: At_Open_Flower_P Parameter: Plant Line Value: WS
  misc_feature: MA Experiment 20000264 PARAMETER Experiment Name: At_Open_Flower_P Parameter: Tissue Value: Open Flower vs. Whole Plant
  misc_feature: MA Experiment ID: 20000265 Result: Up-regulated in Transcription
  misc_feature: MA Experiment 20000265 PARAMETER Experiment Name: At_Open_Flower_P Parameter: Age (day) Value: 21
  misc_feature: MA Experiment 20000265 PARAMETER Experiment Name: At_Open_Flower_P Parameter: Plant Line Value: WS
  misc_feature: MA Experiment 20000265 PARAMETER Experiment Name: At_Open_Flower_P Parameter: Tissue Value: Closed Flower vs. Whole Plant
  misc_feature: MA Experiment ID: 20000267 Result: Up-regulated in Transcription
  misc_feature: MA Experiment 20000267 PARAMETER Experiment Name: At_Drought_P Parameter: Age (day) Value: 7
  misc_feature: MA Experiment 20000267 PARAMETER Experiment Name: At_Drought_P Parameter: Organism Value: A. thaliana
  misc_feature: MA Experiment 20000267 PARAMETER Experiment Name: At_Drought_P Parameter: Plant Line Value: WS
  misc_feature: MA Experiment 20000267 PARAMETER Experiment Name: At_Drought_P Parameter: Timepoint (hr) Value: 6
  misc_feature: MA Experiment 20000267 PARAMETER Experiment Name: At_Drought_P Parameter: Tissue Value: Whole Plant
  misc_feature: MA Experiment 20000267 PARAMETER Experiment Name: At_Drought_P Parameter: Treatment Value: Drought vs. No Drought
  misc_feature: MA Experiment ID: 20000268 Result: Up-regulated in Transcription
  misc_feature: MA Experiment 20000268 PARAMETER Experiment Name: At_100mM_NaCl__P Parameter: Age (day) Value: 14
  misc_feature: MA Experiment 20000268 PARAMETER Experiment Name: At_100mM_NaCl__P Parameter: Organism Value: A. thaliana
  misc_feature: MA Experiment 20000268 PARAMETER Experiment Name: At_100mM_NaCl__P Parameter: Plant Line Value: WS
  misc_feature: MA Experiment 20000268 PARAMETER Experiment Name: At_100mM_NaCl__P Parameter: Timepoint (hr) Value: 6
  misc_feature: MA Experiment 20000268 PARAMETER Experiment Name: At_100mM_NaCl__P Parameter: Tissue Value: Whole Plant
  misc_feature: MA Experiment 20000268 PARAMETER Experiment Name: At_100mM_NaCl__P Parameter: Treatment Value: 100mM NaCl vs. No Treatment
  misc_feature: MA Experiment ID: 20000286 Result: Up-regulated in Transcription
  misc_feature: MA Experiment 20000286 PARAMETER Experiment Name: At_Open_Flower_P Parameter: Age (day) Value: 21
  misc_feature: MA Experiment 20000286 PARAMETER Experiment Name: At_Open_Flower_P Parameter: Plant Line Value: WS
  misc_feature: MA Experiment 20000286 PARAMETER Experiment Name: At_Open_Flower_P Parameter: Tissue Value: Half Open vs. Whole Plant
  misc_feature: MA Experiment ID: 20000436 Result: Up-regulated in Transcription
  misc_feature: MA Experiment 20000436 PARAMETER Experiment Name: At_Drought_P Parameter: Age (day) Value: 7
  misc_feature: MA Experiment 20000436 PARAMETER Experiment Name: At_Drought_P Parameter: Organism Value: A. thaliana
  misc_feature: MA Experiment 20000436 PARAMETER Experiment Name: At_Drought_P Parameter: Plant Line Value: WS
  misc_feature: MA Experiment 20000436 PARAMETER Experiment Name: At_Drought_P Parameter: Timepoint (hr) Value: 12
  misc_feature: MA Experiment 20000436 PARAMETER Experiment Name: At_Drought_P Parameter: Tissue Value: Whole Plant
  misc_feature: MA Experiment 20000436 PARAMETER Experiment Name: At_Drought_P Parameter: Treatment Value: Drought vs. No Drought
  misc_feature: MA Experiment ID: 20000437 Result: Up-regulated in Transcription
  misc_feature: MA Experiment 20000437 PARAMETER Experiment Name: At_Drought_P Parameter: Age (day) Value: 8
  misc_feature: MA Experiment 20000437 PARAMETER Experiment Name: At_Drought_P Parameter: Organism Value: A. thaliana
  misc_feature: MA Experiment 20000437 PARAMETER Experiment Name: At_Drought_P Parameter: Plant Line Value: WS
  misc_feature: MA Experiment 20000437 PARAMETER Experiment Name: At_Drought_P Parameter: Timepoint (hr) Value: 24
  misc_feature: MA Experiment 20000437 PARAMETER Experiment Name: At_Drought_P Parameter: Tissue Value: Whole Plant
  misc_feature: MA Experiment 20000437 PARAMETER Experiment Name: At_Drought_P Parameter: Treatment Value: Drought vs. No Drought
  misc_feature: MA Experiment ID: 20000439 Result: Down-regulated in Transcription
  misc_feature: MA Experiment 20000439 PARAMETER Experiment Name: At_Roots__P Parameter: Age (day) Value: 14 vs. 21
  misc_feature: MA Experiment 20000439 PARAMETER Experiment Name: At_Roots__P Parameter: Organism Value: A. thaliana
  misc_feature: MA Experiment 20000439 PARAMETER Experiment Name: At_Roots__P Parameter: Tissue Value: Roots vs. Whole Plant
  misc_feature: MA Experiment ID: 20000573 Result: Up-regulated in Transcription
  misc_feature: MA Experiment 20000573 PARAMETER Experiment Name: At_100uM_ABA_Mutants__P Parameter: Organism Value: A. thaliana
  misc_feature: MA Experiment 20000573 PARAMETER Experiment Name: At_100uM_ABA_Mutants__P Parameter: Plant Line Value: CS22 vs. Ler wt
  misc_feature: MA Experiment 20000573 PARAMETER Experiment Name: At_100uM_ABA_Mutants__P Parameter: Timepoint (hr) Value: N/A
  misc_feature: MA Experiment 20000573 PARAMETER Experiment Name: At_100uM_ABA_Mutants__P Parameter: Tissue Value: Whole Plant
  misc_feature: MA Experiment 20000573 PARAMETER Experiment Name: At_100uM_ABA_Mutants__P Parameter: Treatment Value: None
  misc_feature: MA Experiment ID: 20000794 Result: Up-regulated in Transcription
  misc_feature: MA Experiment 20000794 PARAMETER Experiment Name: At_Petals_P Parameter: Age (day) Value: 23-25 days
  misc_feature: MA Experiment 20000794 PARAMETER Experiment Name: At_Petals_P Parameter: Plant Line Value: WS
  misc_feature: MA Experiment 20000794 PARAMETER Experiment Name: At_Petals_P Parameter: Tissue Value: Petals vs. Whole plant
  misc_feature: MA Experiment ID: 20001554 Result: Up-regulated in Transcription
  misc_feature: MA Experiment 20001554 PARAMETER Experiment Name: At_Drought_Soil_Dry_P Parameter: Age (day) Value: 21
  misc_feature: MA Experiment 20001554 PARAMETER Experiment Name: At_Drought_Soil_Dry_P Parameter: Organism Value: A. thaliana
  misc_feature: MA Experiment 20001554 PARAMETER Experiment Name: At_Drought_Soil_Dry_P Parameter: Plant Line Value: WS
  misc_feature: MA Experiment 20001554 PARAMETER Experiment Name: At_Drought_Soil_Dry_P Parameter: Post Timepoint (hr) Value: None
  misc_feature: MA Experiment 20001554 PARAMETER Experiment Name: At_Drought_Soil_Dry_P Parameter: Post-Treatment Value: None
  misc_feature: MA Experiment 20001554 PARAMETER Experiment Name: At_Drought_Soil_Dry_P Parameter: Timepoint (day) Value: 7
  misc_feature: MA Experiment 20001554 PARAMETER Experiment Name: At_Drought_Soil_Dry_P Parameter: Treatment Value: Drought vs. No Drought
  misc_feature: MA Experiment ID: 20001555 Result: Up-regulated in Transcription
  misc_feature: MA Experiment 20001555 PARAMETER Experiment Name: At_Drought_Soil_Dry_P Parameter: Age (day) Value: 24
  misc_feature: MA Experiment 20001555 PARAMETER Experiment Name: At_Drought_Soil_Dry_P Parameter: Organism Value: A. thaliana
  misc_feature: MA Experiment 20001555 PARAMETER Experiment Name: At_Drought_Soil_Dry_P Parameter: Plant Line Value: WS
  misc_feature: MA Experiment 20001555 PARAMETER Experiment Name: At_Drought_Soil_Dry_P Parameter: Post Timepoint (hr) Value: None
  misc_feature: MA Experiment 20001555 PARAMETER Experiment Name: At_Drought_Soil_Dry_P Parameter: Post-Treatment Value: None
  misc_feature: MA Experiment 20001555 PARAMETER Experiment Name: At_Drought_Soil_Dry_P Parameter: Timepoint (day) Value: 10
  misc_feature: MA Experiment 20001555 PARAMETER Experiment Name: At_Drought_Soil_Dry_P Parameter: Treatment Value: Drought vs. No Drought
  misc_feature: MA Experiment ID: 20001556 Result: Up-regulated in Transcription
  misc_feature: MA Experiment 20001556 PARAMETER Experiment Name: At_Drought_Soil_Dry_P Parameter: Age (day) Value: 26
  misc_feature: MA Experiment 20001556 PARAMETER Experiment Name: At_Drought_Soil_Dry_P Parameter: Organism Value: A. thaliana
  misc_feature: MA Experiment 20001556 PARAMETER Experiment Name: At_Drought_Soil_Dry_P Parameter: Plant Line Value: WS
  misc_feature: MA Experiment 20001556 PARAMETER Experiment Name: At_Drought_Soil_Dry_P Parameter: Post Timepoint (hr) Value: None
  misc_feature: MA Experiment 20001556 PARAMETER Experiment Name: At_Drought_Soil_Dry_P Parameter: Post-Treatment Value: None
  misc_feature: MA Experiment 20001556 PARAMETER Experiment Name: At_Drought_Soil_Dry_P Parameter: Timepoint (day) Value: 12
  misc_feature: MA Experiment 20001556 PARAMETER Experiment Name: At_Drought_Soil_Dry_P Parameter: Treatment Value: Drought vs. No Drought
  misc_feature: MA Experiment ID: 20001559 Result: Up-regulated in Transcription
  misc_feature: MA Experiment 20001559 PARAMETER Experiment Name: At_Drought_Soil_Dry_P Parameter: Age (day) Value: 28
  misc_feature: MA Experiment 20001559 PARAMETER Experiment Name: At_Drought_Soil_Dry_P Parameter: Organism Value: A. thaliana
  misc_feature: MA Experiment 20001559 PARAMETER Experiment Name: At_Drought_Soil_Dry_P Parameter: Plant Line Value: WS
  misc_feature: MA Experiment 20001559 PARAMETER Experiment Name: At_Drought_Soil_Dry_P Parameter: Post Timepoint (hr) Value: 29
  misc_feature: MA Experiment 20001559 PARAMETER Experiment Name: At_Drought_Soil_Dry_P Parameter: Post-Treatment Value: Re-Water vs. No Drought
  misc_feature: MA Experiment 20001559 PARAMETER Experiment Name: At_Drought_Soil_Dry_P Parameter: Timepoint (day) Value: 14
  misc_feature: MA Experiment 20001559 PARAMETER Experiment Name: At_Drought_Soil_Dry_P Parameter: Treatment Value: Drought vs. No Drought
  misc_feature: MA Experiment ID: 20001904 Result: Up-regulated in Transcription
  misc_feature: MA Experiment 20001904 PARAMETER Experiment Name: At_Drought_Reproduction_P Parameter: Age (day) Value: 37
  misc_feature: MA Experiment 20001904 PARAMETER Experiment Name: At_Drought_Reproduction_P Parameter: Organism Value: A. thaliana
  misc_feature: MA Experiment 20001904 PARAMETER Experiment Name: At_Drought_Reproduction_P Parameter: Plant Line Value: WS
  misc_feature: MA Experiment 20001904 PARAMETER Experiment Name: At_Drought_Reproduction_P Parameter: Timepoint (day) Value: 7
  misc_feature: MA Experiment 20001904 PARAMETER Experiment Name: At_Drought_Reproduction_P Parameter: Tissue Value: Rosettes
  misc_feature: MA Experiment 20001904 PARAMETER Experiment Name: At_Drought_Reproduction_P Parameter: Treatment Value: Drought vs. No Drought
  misc_feature: MA Experiment ID: 20001911 Result: Down-regulated in Transcription
  misc_feature: MA Experiment 20001911 PARAMETER Experiment Name: At_Drought_Reproduction_P Parameter: Age (day) Value: 40
  misc_feature: MA Experiment 20001911 PARAMETER Experiment Name: At_Drought_Reproduction_P Parameter: Organism Value: A. thaliana
  misc_feature: MA Experiment 20001911 PARAMETER Experiment Name: At_Drought_Reproduction_P Parameter: Plant Line Value: WS
  misc_feature: MA Experiment 20001911 PARAMETER Experiment Name: At_Drought_Reproduction_P Parameter: Timepoint (day) Value: 10
  misc_feature: MA Experiment 20001911 PARAMETER Experiment Name: At_Drought_Reproduction_P Parameter: Tissue Value: Flowers
  misc_feature: MA Experiment 20001911 PARAMETER Experiment Name: At_Drought_Reproduction_P Parameter: Treatment Value: Drought vs. No Drought
tcatattctctcactttctctctcagcttacgaacaagaaaaaaagaagaatctttagccacctttgagatcaaaagatgaacatcgctcacactatcttcggcgttttcggaaatgcaactgctctgtttcttttcttggctccttcgataacattcaagagaatcatcaagaacaaatccactgaacaattctctggtatcccttatccaatgactctcctcaactgtctcctctctgcttggtatggacttccctttgtgtcaaaagacaacacacttgtgagcacaatcaatggcacaggagcagtgatcgaaacagtctacgtgttaatctttcttttctacgcaccaaagaaggagaaaattaagatctttggtatcttctcttgcgttttggctgtattcgcaacagtagctctcgtctctctctttgctcttcaaggaaacggtagaaaactcttttgtggtctcgcagctactgttttctccatcatcatgtacgcttctccactctccatcatgagattggtggtaaagacgaagagtgtagagtttatgccattctttttgtcactctttgtcttcctctgtggtacttcgtggttcgtctatggtctaatcggtcgtgacccttttgttgcaatcccaaatgggtttggatgtgcattagggacactgcaattgatactatacttcatctactgtggaaacaaaggagagaaatctgcagatgctcagaaagatgagaagtcagtggagatgaaagatgatgagaagaagcagaatgtggttaatggaaagcaagaccttcaagtttaaaagagcttttgaggatgatttggttatgtgatttcgtattaactctgcttaactagagttttccttttcgtttcgttggaatgtaaaaaaaatgatgctgaaaaatgtaacgtttcctagtttcgtactgatacactagtgattgatgaagaatgacgatgccttttgt

SEQ ID NO: 74655 - protein, 247 aa, Arabidopsis thaliana; identical to SEQ ID NO: 27403
  peptide (1)..(247): Ceres Seq. ID no. 5678898
  misc_feature (6)..(95): Pfam Name: MtN3/saliva family Pfam Description: MtN3/saliva family
  misc_feature (1)..(247): Homolog of NCBI NO: 18394992 NR Description: expressed protein; protein id: At1g21460.1, by cDNA: 6411. [Arabidopsis thaliana] >gi|21594011|gb|AAM65929.1| [Arabidopsis thaliana] >gi|28393568|gb|AAO42204.1| unknown
  misc_feature (46)..(247): Homolog of NCBI NO: 25518644 NR Description: hypothetical protein F24J8.9 - Arabidopsis >gi|9454576|gb|AAF87899.1|AC015447_9 Unknown protein [Arabidopsis
  misc_feature (2)..(234): Homolog of NCBI NO: 34907420 NR Description: P0018C10.36 [Oryza sativa (japonica
  misc_feature (1)..(225): Homolog of NCBI NO: 18413388 NR Description: putative protein; protein id: At4g10850.1, by cDNA: 33161. [Arabidopsis thaliana] contains similarity to Medicago truncatula MtN3 (GB:Y08726)
  misc_feature (9)..(213): Homolog of NCBI NO: 34146818 NR Description: At5g53190 [Arabidopsis thaliana]
  misc_feature (1)..(216): Homolog of NCBI NO: 18400517 NR Description: expressed protein; protein id: At3g14770.1, by cDNA: gi_15809922, supported by cDNA: gi_17978878 [Arabidopsis
  misc_feature (1)..(209): Homolog of NCBI NO: 15219732 NR Description: hypothetical protein; protein id: At1g66770.1 thaliana] >gi|12597757|gb|AAG60070.1|AC013288_4 hypothetical
  misc_feature (9)..(213): Homolog of NCBI NO: 15238678 NR Description: MtN3 protein-like; protein id: At5g53190.1
  misc_feature (4)..(229): Homolog of NCBI NO: 34912454 NR Description: P0681B11.31 [Oryza sativa (japonica
  misc_feature (4)..(229): Homolog of NCBI NO: 34912462 NR Description: MtN3-like protein [Oryza sativa (japonica

SEQ ID NO: 74656 - protein, 202 aa, Arabidopsis thaliana; identical to SEQ ID NO: 27404
  peptide (1)..(202): Ceres Seq. ID no. 5678899
  misc_feature (1)..(202): Homolog of NCBI NO: 18394992 NR Description: expressed protein; protein id: At1g21460.1, by cDNA: 6411. [Arabidopsis thaliana] >gi|21594011|gb|AAM65929.1| [Arabidopsis thaliana] >gi|28393568|gb|AAO42204.1| unknown
  misc_feature (1)..(202): Homolog of NCBI NO: 25518644 NR Description: hypothetical protein F24J8.9 - Arabidopsis >gi|9454576|gb|AAF87899.1|AC015447_9 Unknown protein [Arabidopsis
  misc_feature (1)..(189): Homolog of NCBI NO: 34907420 NR Description: P0018C10.36 [Oryza sativa (japonica
  misc_feature (1)..(180): Homolog of NCBI NO: 18413388 NR Description: putative protein; protein id: At4g10850.1, by cDNA: 33161. [Arabidopsis thaliana] contains similarity to Medicago truncatula MtN3 (GB:Y08726)
  misc_feature (1)..(168): Homolog of NCBI NO: 34146818 NR Description: At5g53190 [Arabidopsis thaliana]
  misc_feature (1)..(171): Homolog of NCBI NO: 18400517 NR Description: expressed protein; protein id: At3g14770.1, by cDNA: gi_15809922, supported by cDNA: gi_17978878 [Arabidopsis
  misc_feature (1)..(164): Homolog of NCBI NO: 15219732 NR Description: hypothetical protein; protein id: At1g66770.1 thaliana] >gi|12597757|gb|AAG60070.1|AC013288_4 hypothetical
  misc_feature (1)..(168): Homolog of NCBI NO: 15238678 NR Description: MtN3 protein-like; protein id: At5g53190.1
  misc_feature (1)..(184): Homolog of NCBI NO: 34912454 NR Description: P0681B11.31 [Oryza sativa (japonica
  misc_feature (1)..(184): Homolog of NCBI NO: 34912462 NR Description: MtN3-like protein [Oryza sativa (japonica

SEQ ID NO: 74657 - DNA, 1169 bp, Arabidopsis thaliana
  misc_feature (1)..(1169): Ceres Seq. ID no. 5678921
  misc_feature: MA Experiment ID: 108579 Result: Down-regulated in Transcription
  misc_feature: MA Experiment 108579 PARAMETER Experiment Name: At_4deg_Cold_cDNA_P Parameter: Temperature (deg C) Value: 4 vs. 22
  misc_feature: MA Experiment 108579 PARAMETER Experiment Name: At_4deg_Cold_cDNA_P Parameter: Timepoint (hr) Value: 6
  misc_feature: MA Experiment 108579 PARAMETER Experiment Name: At_4deg_Cold_cDNA_P Parameter: Tissue Value: Aerial
  misc_feature: MA Experiment ID: 20000214 Result: Down-regulated in Transcription
  misc_feature: MA Experiment 20000214 PARAMETER Experiment Name: At_4deg_Cold_P Parameter: Timepoint (hr) Value: 6
  misc_feature: MA Experiment ID: 20000265 Result: Down-regulated in Transcription
  misc_feature: MA Experiment 20000265 PARAMETER Experiment Name: At_Open_Flower_P Parameter: Age (day) Value: 21
  misc_feature: MA Experiment 20000265 PARAMETER Experiment Name: At_Open_Flower_P Parameter: Plant Line Value: WS
  misc_feature: MA Experiment 20000265 PARAMETER Experiment Name: At_Open_Flower_P Parameter: Tissue Value: Closed Flower vs. Whole Plant
  misc_feature: MA Experiment ID: 20001557 Result: Down-regulated in Transcription
  misc_feature: MA Experiment 20001557 PARAMETER Experiment Name: At_Drought_Soil_Dry_P Parameter: Age (day) Value: 27
  misc_feature: MA Experiment 20001557 PARAMETER Experiment Name: At_Drought_Soil_Dry_P Parameter: Organism Value: A. thaliana
  misc_feature: MA Experiment 20001557 PARAMETER Experiment Name: At_Drought_Soil_Dry_P Parameter: Plant Line Value: WS
  misc_feature: MA Experiment 20001557 PARAMETER Experiment Name: At_Drought_Soil_Dry_P Parameter: Post Timepoint (hr) Value: 3
  misc_feature: MA Experiment 20001557 PARAMETER Experiment Name: At_Drought_Soil_Dry_P Parameter: Post-Treatment Value: Re-Water vs. No Drought
  misc_feature: MA Experiment 20001557 PARAMETER Experiment Name: At_Drought_Soil_Dry_P Parameter: Timepoint (day) Value: 13
  misc_feature: MA Experiment 20001557 PARAMETER Experiment Name: At_Drought_Soil_Dry_P Parameter: Treatment Value: Drought vs. No Drought
atctttttgtaatcgatttgcaatttcaatttcgcaaagttggatcatgggcaatgtcataagcggtggaagccgcccggaaaatcatcgggaccgtacttcgccgccgtatccaaaccctaatgctcagtaccaaggcaattatccgtcgccgtaccaagattgtgctaggtatccgtatggagagatggcgtctccagtgcaatacgtagagcatcaggaagcagtgactataaggaacgacatcaatctgaagaaagaaactttgagacttgagcctgatgaacagaaccctggcaagtttttgctctccttcacttttgacgcctctgttcctggaagcatcactgtaatgttctttgctaaagaaggcaaagactgtaaccttattgcgacaaaggaggatctttttccatccactcaagttagttttgcaaaaggtctggaacagagattcaagcaggcttgtgggacagggattgatttctcagatatgtcagaggcagatttggttgaggcaaacgagacagatgtgtatcatgtggcagtgaaagcagaggtagtatcagaagatgatcatcctgagtctgggacaccaaacagacagataactcatgtggttttagagaaagatcataagggtgagtacaaggcgagagtggtgaagcagatcctgtgggtgaatgggaataggtatgttcttcaagagatttatgggattggtaatacagttgatgataatggagaagatgcgaatgaaagaggaaaagaatgcgtcatctgcttatctgagccacgggataccactgttctcccttgcaggcacatgtgtatgtgtagcggttgtgcaaagcttttgaggtttcagacaaacctctgccccatctgtagacaaccggtggataggcttttggagataacagtgaacaacaacgacaggaactagtgagccttgctacgttactcttctcctgtttttatataaagactgcttcccaatgttcttgtttgtggtatcggtatatatgcaggcattagaactcaagttactaacttacatatgccaaatgacacttaaattccgggttttacttccaagtgttttgtaaatcatcatgctactttgtctagcggtcttcgttgttaatgaagtgaacaacttttgcagt

SEQ ID NO: 74658 - protein, 314 aa, Arabidopsis thaliana; identical to SEQ ID NO: 39826
  peptide (1)..(314): Ceres Seq. ID no. 5678922
  misc_feature (258)..(296): Pfam Name: Zinc finger, C3HC4 type (RING finger) Pfam Description: Zinc finger, C3HC4 type (RING finger)
  misc_feature (16)..(314): Homolog of NCBI NO: 15231808 NR Description: putative protein; protein id: At3g53410.1, by cDNA: 110247. [Arabidopsis thaliana] >gi|11357789|pir||T45881
  misc_feature (26)..(312): Homolog of NCBI NO: 18398633 NR Description: expressed protein; protein id: At3g09770.1, by cDNA: 38757., supported by cDNA: gi_18377643 [Arabidopsis >gi|6681341|gb|AAF23258.1|AC015985_16 putative RING zinc finger
  misc_feature (40)..(310): Homolog of NCBI NO: 37532246 NR Description: putative hydroxyproline-rich glycoprotein [Oryza
  misc_feature (37)..(309): Homolog of NCBI NO: 15242675 NR Description: expressed protein; protein id: At5g03200.1, by cDNA: 98672. [Arabidopsis thaliana] >gi|11357455|pir||T48341
  misc_feature (37)..(309): Homolog of NCBI NO: 21618140 NR Description: putative RING zinc finger protein [Arabidopsis
  misc_feature (37)..(309): Homolog of NCBI NO: 26449588 NR Description: unknown protein [Arabidopsis thaliana]
  misc_feature (26)..(276): Homolog of NCBI NO: 30681003 NR Description: putative RING zinc finger protein [Arabidopsis
  misc_feature (59)..(312): Homolog of NCBI NO: 15239642 NR Description: unknown protein; protein id: At5g19080.1
  misc_feature (16)..(310): Homolog of NCBI NO: 34914816 NR Description: B1045D11.20 [Oryza sativa (japonica
  misc_feature (59)..(312): Homolog of NCBI NO: 21928149 NR Description: AT5g19080/T16G12_120 [Arabidopsis thaliana]

SEQ ID NO: 74659 - protein, 299 aa, Arabidopsis thaliana; identical to SEQ ID NO: 39827
  peptide (1)..(299): Ceres Seq. ID no. 5678923
  misc_feature (243)..(281): Pfam Name: Zinc finger, C3HC4 type (RING finger) Pfam Description: Zinc finger, C3HC4 type (RING finger)
  misc_feature (1)..(299): Homolog of NCBI NO: 15231808 NR Description: putative protein; protein id: At3g53410.1, by cDNA: 110247. [Arabidopsis thaliana] >gi|11357789|pir||T45881
  misc_feature (11)..(297): Homolog of NCBI NO: 18398633 NR Description: expressed protein; protein id: At3g09770.1, by cDNA: 38757., supported by cDNA: gi_18377643 [Arabidopsis >gi|6681341|gb|AAF23258.1|AC015985_16 putative RING zinc finger
  misc_feature (25)..(295): Homolog of NCBI NO: 37532246 NR Description: putative hydroxyproline-rich glycoprotein [Oryza
  misc_feature (22)..(294): Homolog of NCBI NO: 15242675 NR Description: expressed protein; protein id: At5g03200.1, by cDNA: 98672. [Arabidopsis thaliana] >gi|11357455|pir||T48341
  misc_feature (22)..(294): Homolog of NCBI NO: 21618140 NR Description: putative RING zinc finger protein [Arabidopsis
  misc_feature (22)..(294): Homolog of NCBI NO: 26449588 NR Description: unknown protein [Arabidopsis thaliana]
  misc_feature (11)..(261): Homolog of NCBI NO: 30681003 NR Description: putative RING zinc finger protein [Arabidopsis
  misc_feature (44)..(297): Homolog of NCBI NO: 15239642 NR Description: unknown protein; protein id: At5g19080.1
  misc_feature (1)..(295): Homolog of NCBI NO: 34914816 NR Description: B1045D11.20 [Oryza sativa (japonica
  misc_feature (44)..(297): Homolog of NCBI NO: 21928149 NR Description: AT5g19080/T16G12_120 [Arabidopsis thaliana]

SEQ ID NO: 74660 - protein, 252 aa, Arabidopsis thaliana; identical to SEQ ID NO: 39828
  peptide (1)..(252): Ceres Seq. ID no. 5678924
  misc_feature (196)..(234): Pfam Name: Zinc finger, C3HC4 type (RING finger) Pfam Description: Zinc finger, C3HC4 type (RING finger)
  misc_feature (1)..(252): Homolog of NCBI NO: 15231808 NR Description: putative protein; protein id: At3g53410.1, by cDNA: 110247. [Arabidopsis thaliana] >gi|11357789|pir||T45881
  misc_feature (1)..(250): Homolog of NCBI NO: 18398633 NR Description: expressed protein; protein id: At3g09770.1, by cDNA: 38757., supported by cDNA: gi_18377643 [Arabidopsis >gi|6681341|gb|AAF23258.1|AC015985_16 putative RING zinc finger
  misc_feature (1)..(248): Homolog of NCBI NO: 37532246 NR Description: putative hydroxyproline-rich glycoprotein [Oryza
  misc_feature (1)..(247): Homolog of NCBI NO: 15242675 NR Description: expressed protein; protein id: At5g03200.1, by cDNA: 98672. [Arabidopsis thaliana] >gi|11357455|pir||T48341
  misc_feature (1)..(247): Homolog of NCBI NO: 21618140 NR Description: putative RING zinc finger protein [Arabidopsis
  misc_feature (1)..(247): Homolog of NCBI NO: 26449588 NR Description: unknown protein [Arabidopsis thaliana]
  misc_feature (1)..(214): Homolog of NCBI NO: 30681003 NR Description: putative RING zinc finger protein [Arabidopsis
  misc_feature (1)..(250): Homolog of NCBI NO: 15239642 NR Description: unknown protein; protein id: At5g19080.1
  misc_feature (1)..(248): Homolog of NCBI NO: 34914816 NR Description: B1045D11.20 [Oryza sativa (japonica
  misc_feature (1)..(250): Homolog of NCBI NO: 21928149 NR Description: AT5g19080/T16G12_120 [Arabidopsis thaliana]

SEQ ID NO: 74661 - DNA, 655 bp, Arabidopsis thaliana
  misc_feature (1)..(655): Ceres Seq. ID no. 5678925
  misc_feature: MA Experiment ID: 108569 Result: Down-regulated in Transcription
  misc_feature: MA Experiment 108569 PARAMETER Experiment Name: At_0.001%_MeJA__cDNA_P Parameter: Timepoint (hr) Value: 6
  misc_feature: MA Experiment 108569 PARAMETER Experiment Name: At_0.001%_MeJA__cDNA_P Parameter: Tissue Value: Aerial
  misc_feature: MA Experiment 108569 PARAMETER Experiment Name: At_0.001%_MeJA__cDNA_P Parameter: Treatment Value: 0.001% MeJA vs. No Treatment
  misc_feature: MA Experiment ID: 20000173 Result: Down-regulated in Transcription
  misc_feature: MA Experiment 20000173 PARAMETER Experiment Name: At_42deg_Heat_P Parameter: Age (day) Value: 14
  misc_feature: MA Experiment 20000173 PARAMETER Experiment Name: At_42deg_Heat_P Parameter: Organism Value: A. thaliana
  misc_feature: MA Experiment 20000173 PARAMETER Experiment Name: At_42deg_Heat_P Parameter: Plant Line Value: WS
  misc_feature: MA Experiment 20000173 PARAMETER Experiment Name: At_42deg_Heat_P Parameter: Temperature (deg C) Value: 42 vs. 22
  misc_feature: MA Experiment 20000173 PARAMETER Experiment Name: At_42deg_Heat_P Parameter: Timepoint (hr) Value: 6
  misc_feature: MA Experiment 20000173 PARAMETER Experiment Name: At_42deg_Heat_P Parameter: Tissue Value: Aerial
  misc_feature: MA Experiment ID: 20001560 Result: Up-regulated in Transcription
  misc_feature: MA Experiment 20001560 PARAMETER Experiment Name: At_Drought_Soil_Dry_P Parameter: Age (day) Value: 28
  misc_feature: MA Experiment 20001560 PARAMETER Experiment Name: At_Drought_Soil_Dry_P Parameter: Organism Value: A. thaliana
  misc_feature: MA Experiment 20001560 PARAMETER Experiment Name: At_Drought_Soil_Dry_P Parameter: Plant Line Value: WS
  misc_feature: MA Experiment 20001560 PARAMETER Experiment Name: At_Drought_Soil_Dry_P Parameter: Post Timepoint (hr) Value: None
  misc_feature: MA Experiment 20001560 PARAMETER Experiment Name: At_Drought_Soil_Dry_P Parameter: Post-Treatment Value: None
  misc_feature: MA Experiment 20001560 PARAMETER Experiment Name: At_Drought_Soil_Dry_P Parameter: Timepoint (day) Value: 14
  misc_feature: MA Experiment 20001560 PARAMETER Experiment Name: At_Drought_Soil_Dry_P Parameter: Treatment Value: Drought vs. No Drought
  misc_feature: MA Experiment ID: 20001911 Result: Down-regulated in Transcription
  misc_feature: MA Experiment 20001911 PARAMETER Experiment Name: At_Drought_Reproduction_P Parameter: Age (day) Value: 40
  misc_feature: MA Experiment 20001911 PARAMETER Experiment Name: At_Drought_Reproduction_P Parameter: Organism Value: A. thaliana
  misc_feature: MA Experiment 20001911 PARAMETER Experiment Name: At_Drought_Reproduction_P Parameter: Plant Line Value: WS
  misc_feature: MA Experiment 20001911 PARAMETER Experiment Name: At_Drought_Reproduction_P Parameter: Timepoint (day) Value: 10
  misc_feature: MA Experiment 20001911 PARAMETER Experiment Name: At_Drought_Reproduction_P Parameter: Tissue Value: Flowers
  misc_feature: MA Experiment 20001911 PARAMETER Experiment Name: At_Drought_Reproduction_P Parameter: Treatment Value: Drought vs. No Drought
agatcgaaaaaaaatcgagaagcgaatagcggaagaacagaaaaagggaaattctgagaatcaaatcggaaaggtagaagaatcgagtcggaaaaatggaaacgacgaagagtaacagcagcgagtccgatgtcaacgccaaatgggacgcttgtctcgatctcactgctcgtcgctttgtctactcttccctcggcggcgctttcgccggtcttctcttcttcaggagtccggttacgagatgggcgtcgattgcttttggtgctggaattggtattggttctgcatacacagattgttctcgtgtttttgatgcgtcttcttcaacttcagctactttattagcagctcccaagagtacggagacttctgtatctcaggcagcagaagagtgaagacaacgaggaagcttggaggtaaaaaaccaaacattgatagagttacattacgaaatggtaattgatcttgcaggacaaggcttttgagataacgccattgttaaaaaaaaacttttgcttctcagtgtggttttgtacactgatgtcaaaattgttaatgacccactcattttttttgttttgaaaaatcttatgttcttttacttgagaaataattcctccggtttgatttgtttgcctctactgttccttcattc

SEQ ID NO: 74662 - protein, 99 aa, Arabidopsis thaliana; identical to SEQ ID NO: 24405
  peptide (1)..(99): Ceres Seq. ID no. 5678926
  misc_feature (1)..(73): Pfam Name: Domain of unknown function (DUF543) Pfam Description: Domain of unknown function (DUF543)
  misc_feature (1)..(99): Homolog of NCBI NO: 18395129 NR Description: expressed protein; protein id: At1g22520.1, by cDNA: 38293. [Arabidopsis thaliana]
  misc_feature (2)..(99): Homolog of NCBI NO: 18410008 NR Description: unknown protein; protein id: At1g72170.1, by cDNA: 14775. [Arabidopsis thaliana] unknown protein [Arabidopsis thaliana]
  misc_feature (2)..(99): Homolog of NCBI NO: 21553491 NR Description: unknown [Arabidopsis thaliana]
  misc_feature (2)..(95): Homolog of NCBI NO: 25406151 NR Description: unknown protein T9N14.2 [imported] - Arabidopsis

SEQ ID NO: 74663 - protein, 71 aa, Arabidopsis thaliana; identical to SEQ ID NO: 24406
  peptide (1)..(71): Ceres Seq. ID no. 5678927

SEQ ID NO: 74664 - protein, 56 aa, Arabidopsis thaliana; identical to SEQ ID NO: 24407
  peptide (1)..(56): Ceres Seq. ID no. 5678928

SEQ ID NO: 74665 - DNA, 850 bp, Arabidopsis thaliana
  misc_feature (1)..(850): Ceres Seq. ID no. 5678948
  misc_feature: MA Experiment ID: 108435 Result: Down-regulated in Transcription
  misc_feature: MA Experiment 108435 PARAMETER Experiment Name: At_stm_Mutants_cDNA_P Parameter: Plant Line Value: wt Landsburg vs stm
  misc_feature: MA Experiment 108435 PARAMETER Experiment Name: At_stm_Mutants_cDNA_P Parameter: Tissue Value: Shoot Apical Meristem Region
  misc_feature: MA Experiment ID: 108461 Result: Up-regulated in Transcription
  misc_feature: MA Experiment 108461 PARAMETER Experiment Name: At_Germinating_Seeds_cDNA_P Parameter: Age (day) Value: 1 vs. 0
  misc_feature: MA Experiment 108461 PARAMETER Experiment Name: At_Germinating_Seeds_cDNA_P Parameter: Tissue Value: Germinating Seeds
  misc_feature: MA Experiment ID: 108462 Result: Up-regulated in Transcription
  misc_feature: MA Experiment 108462 PARAMETER Experiment Name: At_Germinating_Seeds_cDNA_P Parameter: Age (day) Value: 2 vs. 0
  misc_feature: MA Experiment 108462 PARAMETER Experiment Name: At_Germinating_Seeds_cDNA_P Parameter: Tissue Value: Germinating Seeds
  misc_feature: MA Experiment ID: 108463 Result: Up-regulated in Transcription
  misc_feature: MA Experiment 108463 PARAMETER Experiment Name: At_Germinating_Seeds_cDNA_P Parameter: Age (day) Value: 3 vs. 0
  misc_feature: MA Experiment 108463 PARAMETER Experiment Name: At_Germinating_Seeds_cDNA_P Parameter: Tissue Value: Germinating Seeds
  misc_feature: MA Experiment ID: 108464 Result: Up-regulated in Transcription
  misc_feature: MA Experiment 108464 PARAMETER Experiment Name: At_Germinating_Seeds_cDNA_P Parameter: Age (day) Value: 4 vs. 0
  misc_feature: MA Experiment 108464 PARAMETER Experiment Name: At_Germinating_Seeds_cDNA_P Parameter: Tissue Value: Germinating Seeds
  misc_feature: MA Experiment ID: 108488 Result: Down-regulated in Transcription
  misc_feature: MA Experiment ID: 108595 Result: Up-regulated in Transcription
  misc_feature: MA Experiment 108595 PARAMETER Experiment Name: At_Ler-pi_Ovule_cDNA_P Parameter: Plant Line Value: null
  misc_feature: MA Experiment ID: 108608 Result: Up-regulated in Transcription
  misc_feature: MA Experiment 108608 PARAMETER Experiment Name: At_100uM_ABA_cDNA_P Parameter: Timepoint (hr) Value: 1
  misc_feature: MA Experiment 108608 PARAMETER Experiment Name: At_100uM_ABA_cDNA_P Parameter: Tissue Value: Aerial
  misc_feature: MA Experiment 108608 PARAMETER Experiment Name: At_100uM_ABA_cDNA_P Parameter: Treatment Value: 100uM ABA vs. No Treatment
  misc_feature: MA Experiment ID: 108609 Result: Up-regulated in Transcription
  misc_feature: MA Experiment 108609 PARAMETER Experiment Name: At_100uM_ABA_cDNA_P Parameter: Timepoint (hr) Value: 24
  misc_feature: MA Experiment 108609 PARAMETER Experiment Name: At_100uM_ABA_cDNA_P Parameter: Tissue Value: Aerial
  misc_feature: MA Experiment 108609 PARAMETER Experiment Name: At_100uM_ABA_cDNA_P Parameter: Treatment Value: 100uM ABA vs. No Treatment
  misc_feature: MA Experiment ID: 20000069 Result: Up-regulated in Transcription
  misc_feature: MA Experiment 20000069 PARAMETER Experiment Name: At_100uM_ABA_Mutants_cDNA_P Parameter: Plant Line Value: CS23
  misc_feature: MA Experiment 20000069 PARAMETER Experiment Name: At_100uM_ABA_Mutants_cDNA_P Parameter: Timepoint (hr) Value: 6
  misc_feature: MA Experiment 20000069 PARAMETER Experiment Name: At_100uM_ABA_Mutants_cDNA_P Parameter: Tissue Value: Aerial
  misc_feature: MA Experiment 20000069 PARAMETER Experiment Name: At_100uM_ABA_Mutants_cDNA_P Parameter: Treatment Value: 100uM ABA vs. No Treatment
  misc_feature: MA Experiment ID: 20000070 Result: Up-regulated in Transcription
  misc_feature: MA Experiment 20000070 PARAMETER Experiment Name: At_100uM_ABA_Mutants_cDNA_P Parameter: Plant Line Value: CS24
  misc_feature: MA Experiment 20000070 PARAMETER Experiment Name: At_100uM_ABA_Mutants_cDNA_P Parameter: Timepoint (hr) Value: 6
  misc_feature: MA Experiment 20000070 PARAMETER Experiment Name: At_100uM_ABA_Mutants_cDNA_P Parameter: Tissue Value: Aerial
  misc_feature: MA Experiment 20000070 PARAMETER Experiment Name: At_100uM_ABA_Mutants_cDNA_P Parameter: Treatment Value: 100uM ABA vs. No Treatment
  misc_feature: MA Experiment ID: 20000071 Result: Up-regulated in Transcription
  misc_feature: MA Experiment 20000071 PARAMETER Experiment Name: At_100uM_ABA_Mutants_cDNA_P Parameter: Plant Line Value: CS8104
  misc_feature: MA Experiment 20000071 PARAMETER Experiment Name: At_100uM_ABA_Mutants_cDNA_P Parameter: Timepoint (hr) Value: 6
  misc_feature: MA Experiment 20000071 PARAMETER Experiment Name: At_100uM_ABA_Mutants_cDNA_P Parameter: Tissue Value: Aerial
  misc_feature: MA Experiment 20000071 PARAMETER Experiment Name: At_100uM_ABA_Mutants_cDNA_P Parameter: Treatment Value: 100uM ABA vs. No Treatment
  misc_feature: MA Experiment ID: 20000072 Result: Up-regulated in Transcription
  misc_feature: MA Experiment 20000072 PARAMETER Experiment Name: At_100uM_ABA_Mutants_cDNA_P Parameter: Plant Line Value: CS8105
  misc_feature: MA Experiment 20000072 PARAMETER Experiment Name: At_100uM_ABA_Mutants_cDNA_P Parameter: Timepoint (hr) Value: 6
  misc_feature: MA Experiment 20000072 PARAMETER Experiment Name: At_100uM_ABA_Mutants_cDNA_P Parameter: Tissue Value: Aerial
  misc_feature: MA Experiment 20000072 PARAMETER Experiment Name: At_100uM_ABA_Mutants_cDNA_P Parameter: Treatment Value: 100uM ABA vs. No Treatment
  misc_feature: MA Experiment ID: 20000086 Result: Up-regulated in Transcription
  misc_feature: MA Experiment 20000086 PARAMETER Experiment Name: At_100uM_ABA_Mutants_cDNA_P Parameter: Plant Line Value: CS22
  misc_feature: MA Experiment 20000086 PARAMETER Experiment Name: At_100uM_ABA_Mutants_cDNA_P Parameter: Timepoint (hr) Value: 6
  misc_feature: MA Experiment 20000086 PARAMETER Experiment Name: At_100uM_ABA_Mutants_cDNA_P Parameter: Tissue Value: Aerial
  misc_feature: MA Experiment 20000086 PARAMETER Experiment Name: At_100uM_ABA_Mutants_cDNA_P Parameter: Treatment Value: 100uM ABA vs. No Treatment
  misc_feature: MA Experiment ID: 20000087 Result: Up-regulated in Transcription
  misc_feature: MA Experiment 20000087 PARAMETER Experiment Name: At_100uM_ABA_Mutants_cDNA_P Parameter: Plant Line Value: WS
  misc_feature: MA Experiment 20000087 PARAMETER Experiment Name: At_100uM_ABA_Mutants_cDNA_P Parameter: Timepoint (hr) Value: 6
  misc_feature: MA Experiment 20000087 PARAMETER Experiment Name: At_100uM_ABA_Mutants_cDNA_P Parameter: Tissue Value: Aerial
  misc_feature: MA Experiment 20000087 PARAMETER Experiment Name: At_100uM_ABA_Mutants_cDNA_P Parameter: Treatment Value: 100uM ABA vs. No Treatment
  misc_feature: MA Experiment ID: 20000088 Result: Up-regulated in Transcription
  misc_feature: MA Experiment 20000088 PARAMETER Experiment Name: At_100uM_ABA_Mutants_cDNA_P Parameter: Plant Line Value: Landsberg
  misc_feature: MA Experiment 20000088 PARAMETER Experiment Name: At_100uM_ABA_Mutants_cDNA_P Parameter: Timepoint (hr) Value: 6
  misc_feature: MA Experiment 20000088 PARAMETER Experiment Name: At_100uM_ABA_Mutants_cDNA_P Parameter: Tissue Value: Aerial
  misc_feature: MA Experiment 20000088 PARAMETER Experiment Name: At_100uM_ABA_Mutants_cDNA_P Parameter: Treatment Value: 100uM ABA vs. No Treatment
  misc_feature: MA Experiment ID: 20000089 Result: Up-regulated in Transcription
  misc_feature: MA Experiment ID: 20000090 Result: Up-regulated in Transcription
  misc_feature: MA Experiment ID: 20000113 Result: Up-regulated in Transcription
  misc_feature: MA Experiment 20000113 PARAMETER Experiment Name: At_42deg_Heat_cDNA_P Parameter: Temperature (deg C) Value: 42 vs. 22
  misc_feature: MA Experiment 20000113 PARAMETER Experiment Name: At_42deg_Heat_cDNA_P Parameter: Timepoint (hr) Value: 8
  misc_feature: MA Experiment 20000113 PARAMETER Experiment Name: At_42deg_Heat_cDNA_P Parameter: Tissue Value: Aerial
  misc_feature: MA Experiment ID: 20000117 Result: Up-regulated in Transcription
  misc_feature: MA Experiment 20000117 PARAMETER Experiment Name: At_100uM_ABA_Mutants_cDNA_P Parameter: Plant Line Value: Columbia
  misc_feature: MA Experiment 20000117 PARAMETER Experiment Name: At_100uM_ABA_Mutants_cDNA_P Parameter: Timepoint (hr) Value: 6
  misc_feature: MA Experiment 20000117 PARAMETER Experiment Name: At_100uM_ABA_Mutants_cDNA_P Parameter: Tissue Value: Aerial
  misc_feature: MA Experiment 20000117 PARAMETER Experiment Name: At_100uM_ABA_Mutants_cDNA_P Parameter: Treatment Value: 100uM ABA vs. No Treatment
  misc_feature: MA Experiment ID: 20000166 Result: Up-regulated in Transcription
  misc_feature: MA Experiment 20000166 PARAMETER Experiment Name: At_100uM_ABA_P Parameter: Age (day) Value: 14
  misc_feature: MA Experiment 20000166 PARAMETER Experiment Name: At_100uM_ABA_P Parameter: Organism Value: A. thaliana
  misc_feature: MA Experiment 20000166 PARAMETER Experiment Name: At_100uM_ABA_P Parameter: Plant Line Value: WS
  misc_feature: MA Experiment 20000166 PARAMETER Experiment Name: At_100uM_ABA_P Parameter: Timepoint (hr) Value: 1
  misc_feature: MA Experiment 20000166 PARAMETER Experiment Name: At_100uM_ABA_P Parameter: Tissue Value: Aerial
  misc_feature: MA Experiment 20000166 PARAMETER Experiment Name: At_100uM_ABA_P Parameter: Treatment Value: 100uM ABA vs. No Treatment
  misc_feature: MA Experiment ID: 20000180 Result: Up-regulated in Transcription
  misc_feature: MA Experiment 20000180 PARAMETER Experiment Name: At_Germinating_Seeds_P Parameter: Age (hr) Value: 24 vs. 0
  misc_feature: MA Experiment 20000180 PARAMETER Experiment Name: At_Germinating_Seeds_P Parameter: Tissue Value: Germinating Seeds
  misc_feature: MA Experiment ID: 20000184 Result: Down-regulated in Transcription
  misc_feature: MA Experiment 20000184 PARAMETER Experiment Name: At_Shoots__P Parameter: Age (day) Value: 7
  misc_feature: MA Experiment 20000184 PARAMETER Experiment Name: At_Shoots__P Parameter: Tissue Value: Shoots vs. Whole Plant
  misc_feature: MA Experiment ID: 20000227 Result: Up-regulated in Transcription
  misc_feature: MA Experiment 20000227 PARAMETER Experiment Name: At_Root-Tips-vs-Tops_P Parameter: Tissue Value: Root Tips vs. Root Tops
  misc_feature: MA Experiment ID: 20000437 Result: Up-regulated in Transcription
  misc_feature: MA Experiment 20000437 PARAMETER Experiment Name: At_Drought_P Parameter: Age (day) Value: 8
  misc_feature: MA Experiment 20000437 PARAMETER Experiment Name: At_Drought_P Parameter: Organism Value: A. thaliana
  misc_feature: MA Experiment 20000437 PARAMETER Experiment Name: At_Drought_P Parameter: Plant Line Value: WS
  misc_feature: MA Experiment 20000437 PARAMETER Experiment Name: At_Drought_P Parameter: Timepoint (hr) Value: 24
  misc_feature: MA Experiment 20000437 PARAMETER Experiment Name: At_Drought_P Parameter: Tissue Value: Whole Plant
  misc_feature: MA Experiment 20000437 PARAMETER Experiment Name: At_Drought_P Parameter: Treatment Value: Drought vs. No Drought
  misc_feature: MA Experiment ID: 20000453 Result: Up-regulated in Transcription
  misc_feature: MA Experiment 20000453 PARAMETER Experiment Name: At_100uM_ABA_P Parameter: Age (day) Value: 15
  misc_feature: MA Experiment 20000453 PARAMETER Experiment Name: At_100uM_ABA_P Parameter: Organism Value: A. thaliana
  misc_feature: MA Experiment 20000453 PARAMETER Experiment Name: At_100uM_ABA_P Parameter: Plant Line Value: WS
  misc_feature: MA Experiment 20000453 PARAMETER Experiment Name: At_100uM_ABA_P Parameter: Timepoint (hr) Value: 24
  misc_feature: MA Experiment 20000453 PARAMETER Experiment Name: At_100uM_ABA_P Parameter: Tissue Value: Aerial
  misc_feature: MA Experiment 20000453 PARAMETER Experiment Name: At_100uM_ABA_P Parameter: Treatment Value: 100uM ABA vs. No Treatment
  misc_feature: MA Experiment ID: 20000496 Result: Down-regulated in Transcription
  misc_feature: MA Experiment 20000496 PARAMETER Experiment Name: At_Guard_Cells_P Parameter: Harvest Date Value: 7/19/2002
  misc_feature: MA Experiment 20000496 PARAMETER Experiment Name: At_Guard_Cells_P Parameter: Organism Value: Canola
  misc_feature: MA Experiment 20000496 PARAMETER Experiment Name: At_Guard_Cells_P Parameter: Tissue Value: Guard Cells vs. Leaves
  misc_feature: MA Experiment ID: 20001248 Result: Up-regulated in Transcription
  misc_feature: MA Experiment 20001248 PARAMETER Experiment Name: At_Far-red-induction_P Parameter: Age (day) Value: 7
  misc_feature: MA Experiment 20001248 PARAMETER Experiment Name: At_Far-red-induction_P Parameter: Light Value: Far-red vs. White
  misc_feature: MA Experiment 20001248 PARAMETER Experiment Name: At_Far-red-induction_P Parameter: Organism Value: A. thaliana
  misc_feature: MA Experiment 20001248 PARAMETER Experiment Name: At_Far-red-induction_P Parameter: Plant Line Value: Columbia
  misc_feature: MA Experiment 20001248 PARAMETER Experiment Name: At_Far-red-induction_P Parameter: Timepoint (hr) Value: 4
  misc_feature: MA Experiment 20001248 PARAMETER Experiment Name: At_Far-red-induction_P Parameter: Tissue Value: Whole Plant
  misc_feature: MA Experiment ID: 20001451 Result: Up-regulated in Transcription
  misc_feature: MA Experiment 20001451 PARAMETER Experiment Name: At_Far-red-induction_P Parameter: Age (day) Value: 7
  misc_feature: MA Experiment 20001451 PARAMETER Experiment Name: At_Far-red-induction_P Parameter: Light Value: Far-red vs. White
  misc_feature: MA Experiment 20001451 PARAMETER Experiment Name: At_Far-red-induction_P Parameter: Organism Value: A. thaliana
  misc_feature: MA Experiment 20001451 PARAMETER Experiment Name: At_Far-red-induction_P Parameter: Plant Line Value: Columbia
  misc_feature: MA Experiment 20001451 PARAMETER Experiment Name: At_Far-red-induction_P Parameter: Timepoint (hr) Value: 24
  misc_feature: MA Experiment 20001451 PARAMETER Experiment Name: At_Far-red-induction_P Parameter: Tissue Value: Whole Plant
  misc_feature: MA Experiment ID: 20001557 Result: Down-regulated in Transcription
  misc_feature: MA Experiment 20001557 PARAMETER Experiment Name: At_Drought_Soil_Dry_P Parameter: Age (day) Value: 27
  misc_feature: MA Experiment 20001557 PARAMETER Experiment Name: At_Drought_Soil_Dry_P Parameter: Organism Value: A. thaliana
  misc_feature: MA Experiment 20001557 PARAMETER Experiment Name: At_Drought_Soil_Dry_P Parameter: Plant Line Value: WS
  misc_feature: MA Experiment 20001557 PARAMETER Experiment Name: At_Drought_Soil_Dry_P Parameter: Post Timepoint (hr) Value: 3
  misc_feature: MA Experiment 20001557 PARAMETER Experiment Name: At_Drought_Soil_Dry_P Parameter: Post-Treatment Value: Re-Water vs. No Drought
  misc_feature: MA Experiment 20001557 PARAMETER Experiment Name: At_Drought_Soil_Dry_P Parameter: Timepoint (day) Value: 13
  misc_feature: MA Experiment 20001557 PARAMETER Experiment Name: At_Drought_Soil_Dry_P Parameter: Treatment Value: Drought vs. No Drought
  misc_feature: MA Experiment ID: 20001558 Result: Down-regulated in Transcription
  misc_feature: MA Experiment 20001558 PARAMETER Experiment Name: At_Drought_Soil_Dry_P Parameter: Age (day) Value: 27
  misc_feature: MA Experiment 20001558 PARAMETER Experiment Name: At_Drought_Soil_Dry_P Parameter: Organism Value: A. thaliana
  misc_feature: MA Experiment 20001558 PARAMETER Experiment Name: At_Drought_Soil_Dry_P Parameter: Plant Line Value: WS
  misc_feature: MA Experiment 20001558 PARAMETER Experiment Name: At_Drought_Soil_Dry_P Parameter: Post Timepoint (hr) Value: 6
  misc_feature: MA Experiment 20001558 PARAMETER Experiment Name: At_Drought_Soil_Dry_P Parameter: Post-Treatment Value: Re-Water vs. No Drought
  misc_feature: MA Experiment 20001558 PARAMETER Experiment Name: At_Drought_Soil_Dry_P Parameter: Timepoint (day) Value: 13
  misc_feature: MA Experiment 20001558 PARAMETER Experiment Name: At_Drought_Soil_Dry_P Parameter: Treatment Value: Drought vs. No Drought
  misc_feature: MA Experiment ID: 20001911 Result: Up-regulated in Transcription
  misc_feature: MA Experiment 20001911 PARAMETER Experiment Name: At_Drought_Reproduction_P Parameter: Age (day) Value: 40
  misc_feature: MA Experiment 20001911 PARAMETER Experiment Name: At_Drought_Reproduction_P Parameter: Organism Value: A. thaliana
  misc_feature: MA Experiment 20001911 PARAMETER Experiment Name: At_Drought_Reproduction_P Parameter: Plant Line Value: WS
  misc_feature: MA Experiment 20001911 PARAMETER Experiment Name: At_Drought_Reproduction_P Parameter: Timepoint (day) Value: 10
  misc_feature: MA Experiment 20001911 PARAMETER Experiment Name: At_Drought_Reproduction_P Parameter: Tissue Value: Flowers
  misc_feature: MA Experiment 20001911 PARAMETER Experiment Name: At_Drought_Reproduction_P Parameter: Treatment Value: Drought vs. No Drought
acaagtcaccaccatttctctctagaaaatatcagaaaaacaaaaccatctcaaagtttcttgagaagaaaaaaagggtcaagaaagatgcctaaagacaggaatatcggaatcgccatggatttctcagagagcagcaagaacgctctgaaatgggcgatcgagaacttagcagacaaaggagacacgatttacatcatccacactctaccactctctggcgatgaatctcgtaactccctctggttcaaatccggttctcctctcataccgttggcagagtttagggaaccggagattatggagaaatacggtgtcaaaaccgacatcgcatgtcttgatatgctcgacactggttcgaggcagaaagaggtttttatccgaatcaacaatacatttttgttcaaagactctttggcaaagacaataactaatggtggttttgttgaaataaaaaggtgcatgtagtgaccaagttatactggggagatgcaagagagaagcttgttgatgctgttaaagatcttaaactcgattctattgtcatgggaagcagaggactcagtgctcttcaaaggataataatgggaagcgtgagcagctttgtgatccaacacgcgccttgccctgtcaccgttgtcaaggataacgaataaacgattctcactacaaaaaaaaaaaaaaaaaaaaactgtctttatcttataagtcctaccaaataatcatcgcaatttatgctttttagtttttattaataaaagaatctttatgttggttttatttgtaatttgactacaacaaaaaaagaacccagagtgttttcatcttctagttttgagagtttcttgct

SEQ ID NO: 74666 - protein, 155 aa, Arabidopsis thaliana
  peptide (1)..(155): Ceres Seq. ID no. 5678949
  misc_feature (33)..(127): Pfam Name: Universal stress protein family Pfam Description: Universal stress protein family
  misc_feature (30)..(127): Homolog of NCBI NO: 30693971 NR Description: expressed protein [Arabidopsis thaliana]
  misc_feature (30)..(155): Homolog of NCBI NO: 21555070 NR Description: unknown [Arabidopsis thaliana]
  misc_feature (32)..(127): Homolog of NCBI NO: 11602751 NR Description: ENOD18 protein [Vicia faba]
  misc_feature (30)..(127): Homolog of NCBI NO: 11602747 NR Description: early nodulin ENOD18 [Vicia faba]
  misc_feature (30)..(127): Homolog of NCBI NO: 11602749 NR Description: early nodulin ENOD18 [Vicia faba]
  misc_feature (26)..(127): Homolog of NCBI NO: 32352136 NR Description: hypothetical protein [Oryza sativa (japonica
  misc_feature (30)..(125): Homolog of NCBI NO: 30678807 NR Description: expressed protein [Arabidopsis thaliana]
  misc_feature (33)..(127): Homolog of NCBI NO: 20160561 NR Description: P0414E03.3 [Oryza sativa (japonica
  misc_feature (30)..(125): Homolog of NCBI NO: 18396497 NR Description: expressed protein; protein id: At3g03270.1, by cDNA: 118261. [Arabidopsis thaliana] unknown [Arabidopsis thaliana] >gi|27754280|gb|AAO22593.1|
  misc_feature (34)..(127): Homolog of NCBI NO: 18401345 NR Description: expressed protein; protein id: At3g17020.1, by cDNA: gi_14190420, supported by cDNA: gi_15215898 [Arabidopsis >gi|7670026|dbj|BAA94980.1|
TSHHHFSLENIRKTKPSQSFLRRKKGSRKMPKDRNIGIAMDFSESSKNALKWAIENLADKGDTIYIIHTLPLSGDESRNSLWFKSGSPLIPLAEFREPEIMEKYGVKTDIACLDMLDTGSRQKEVFIRINNTFLFKDSLAKTITNGGFVEIKRCM

SEQ ID NO: 74667 - protein, 126 aa, Arabidopsis thaliana; identical to SEQ ID NO: 37313
  peptide (1)..(126): Ceres Seq. ID no. 5678950
  misc_feature (4)..(98): Pfam Name: Universal stress protein family Pfam Description: Universal stress protein family
  misc_feature (1)..(98): Homolog of NCBI NO: 30693971 NR Description: expressed protein [Arabidopsis thaliana]
  misc_feature (1)..(126): Homolog of NCBI NO: 21555070 NR Description: unknown [Arabidopsis thaliana]
  misc_feature (3)..(98): Homolog of NCBI NO: 11602751 NR Description: ENOD18 protein [Vicia faba]
  misc_feature (1)..(98): Homolog of NCBI NO: 11602747 NR Description: early nodulin ENOD18 [Vicia faba]
  misc_feature (1)..(98): Homolog of NCBI NO: 11602749 NR Description: early nodulin ENOD18 [Vicia faba]
  misc_feature (1)..(98): Homolog of NCBI NO: 32352136 NR Description: hypothetical protein [Oryza sativa (japonica
  misc_feature (1)..(96): Homolog of NCBI NO: 30678807 NR Description: expressed protein [Arabidopsis thaliana]
  misc_feature (4)..(98): Homolog of NCBI NO: 20160561 NR Description: P0414E03.3 [Oryza sativa (japonica
  misc_feature (1)..(96): Homolog of NCBI NO: 18396497 NR Description: expressed protein; protein id: At3g03270.1, by cDNA: 118261. [Arabidopsis thaliana] unknown [Arabidopsis thaliana] >gi|27754280|gb|AAO22593.1|
  misc_feature (5)..(98): Homolog of NCBI NO: 18401345 NR Description: expressed protein; protein id: At3g17020.1, by cDNA: gi_14190420, supported by cDNA: gi_15215898 [Arabidopsis >gi|7670026|dbj|BAA94980.1|

SEQ ID NO: 74668 - protein, 116 aa, Arabidopsis thaliana; identical to SEQ ID NO: 37314
  peptide (1)..(116): Ceres Seq. ID no. 5678951
  misc_feature (1)..(88): Pfam Name: Universal stress protein family Pfam Description: Universal stress protein family
  misc_feature (1)..(88): Homolog of NCBI NO: 30693971 NR Description: expressed protein [Arabidopsis thaliana]
  misc_feature (1)..(116): Homolog of NCBI NO: 21555070 NR Description: unknown [Arabidopsis thaliana]
  misc_feature (1)..(88): Homolog of NCBI NO: 11602751 NR Description: ENOD18 protein [Vicia faba]
  misc_feature (1)..(88): Homolog of NCBI NO: 11602747 NR Description: early nodulin ENOD18 [Vicia faba]
  misc_feature (1)..(88): Homolog of NCBI NO: 11602749 NR Description: early nodulin ENOD18 [Vicia faba]
  misc_feature (1)..(88): Homolog of NCBI NO: 32352136 NR Description: hypothetical protein [Oryza sativa (japonica
  misc_feature (1)..(86): Homolog of NCBI NO: 30678807 NR Description: expressed protein [Arabidopsis thaliana]
  misc_feature (1)..(88): Homolog of NCBI NO: 20160561 NR Description: P0414E03.3 [Oryza sativa (japonica
  misc_feature (1)..(86): Homolog of NCBI NO: 18396497 NR Description: expressed protein; protein id: At3g03270.1, by cDNA: 118261. [Arabidopsis thaliana] unknown [Arabidopsis thaliana] >gi|27754280|gb|AAO22593.1|
  misc_feature (1)..(88): Homolog of NCBI NO: 18401345 NR Description: expressed protein; protein id: At3g17020.1, by cDNA: gi_14190420, supported by cDNA: gi_15215898 [Arabidopsis >gi|7670026|dbj|BAA94980.1|

SEQ ID NO: 74669 - DNA, 1245 bp, Arabidopsis thaliana
  misc_feature (1)..(1245): Ceres Seq. ID no. 5678956
  misc_feature: MA Experiment ID: 108474 Result: Down-regulated in Transcription
  misc_feature: MA Experiment 108474 PARAMETER Experiment Name: At_Drought_Flowers_cDNA_P Parameter: Timepoint (hr) Value: null
  misc_feature: MA Experiment 108474 PARAMETER Experiment Name: At_Drought_Flowers_cDNA_P Parameter: Treatment Value: Drought vs. No Drought
  misc_feature: MA Experiment ID: 108501 Result: Down-regulated in Transcription
  misc_feature: MA Experiment 108501 PARAMETER Experiment Name: At_ap2_floral_buds_cDNA_P Parameter: Plant Line Value: ap2 (Ler.)
  misc_feature: MA Experiment 108501 PARAMETER Experiment Name: At_ap2_floral_buds_cDNA_P Parameter: Tissue Value: Closed Flower
  misc_feature: MA Experiment ID: 20000440 Result: Up-regulated in Transcription
  misc_feature: MA Experiment 20000440 PARAMETER Experiment Name: At_Closed-Flower__Sub_P Parameter: Tissue Value: Closed Flower vs. Whole Plant
  misc_feature: Pfam Name: DUF220 Pfam Description: Domain of unknown function DUF220
gccgttgacttcttttcctctgtaagtcaactctctgtttgtctctacatacatccatccatctatctttggatcgtcattttctctttgtggactaaagtttaagagagaacatgggtgtatttcctggatttggtagctggatcaatcaaaacactcaacagcttcctcacaaggcagagtccgagagatctgagaatgcgaaatttaagtcaaagtcagagacaaacactcatgaggcgagagatgaaatgaaacagcaattaaaactttggagagatacagagaagaaggaacaatggaatgatgctcctcctaatgtgaaggtggaaagaagaaatgatctagaatggggtatgtcaactatagaaatgcaatttacattaggattgcctcctcaagcagcttacaacgttttaactaatccagacaaccaaccatacttcagaatcatcaaaggacgccaacttttggtttcttcttttaacttatcatttcattgattcaaataaaataatgataacaagatttgagagtgtgtcatagttttcttcttatgaaaggaaaacatatcaagaaaagttgtgtcgccggataccgggaaagggcagcttgtggacaccaagaaagctgtggcctggaacttcctttggttatctggaactatcccgataattgcaaattttatcgaacaccgacaagtccttaccgtacaatatacggtaaagaataagatgttcataaacatgtttgtcagtataaagtggagccgctatacgtagattcagaacgcttgtgcaaacaaaagaagccgaagagtacagaagaatacgaaagatgtagccgcggacaaggaaggattgggtcgaaagtgacattggaccagatgtttaagccttcttttatttttaatctgccaccgatttcttggtacgttcgtcggataaccatcaagaccatgaaaactctgatcgaagatcttcaaattacaagtgccatgatccgaggtatttgaaacgtcccaaatccgctacaaattgatagaacatcaaataaagttataaaatcactttttataaatttaaatagcagaatattacatatgactttagaagtgtatgttcttatggtcactttataacatcaaattaaatgtatagaaaatgtttctaaccaatagttcttaattagacgattatacatagtcaatttgtgtcttttcatattttttaatatcatatattt

SEQ ID NO: 74670 - protein, 129 aa, Arabidopsis thaliana; identical to SEQ ID NO: 39116
  peptide (1)..(129): Ceres Seq. ID no. 5678957
  misc_feature: Pfam Name: DUF220 Pfam Description: Domain of unknown function DUF220
  misc_feature (1)..(120): Homolog of NCBI NO: 8778586 NR Description: F28C11.14 [Arabidopsis thaliana]
  misc_feature (1)..(120): Homolog of NCBI NO: 25373400 NR Description: hypothetical protein F5O8.7 [imported] - thaliana >gi|4056434|gb|AAC98007.1| Similar to OBP32pep protein
  misc_feature (1)..(123): Homolog of NCBI NO: 15220781 NR Description: OBP32pep protein, putative; protein id: [Arabidopsis thaliana] >gi|25373401|pir||H86368 hypothetical
  misc_feature (1)..(129): Homolog of NCBI NO: 18395251 NR Description: putative OBP32pep protein; protein id:
  misc_feature (1)..(123): Homolog of NCBI NO: 25373395 NR Description: hypothetical protein F5O8.22 - Arabidopsis >gi|4056449|gb|AAC98022.1| Similar to OBP32pep protein gb|U37698
  misc_feature (1)..(129): Homolog of NCBI NO: 8778583 NR Description: F28C11.19 [Arabidopsis thaliana]
  misc_feature (1)..(120): Homolog of NCBI NO: 15220821 NR Description: hypothetical protein; protein id: At1g23660.1
  misc_feature (3)..(111): Homolog of NCBI NO: 25373403 NR Description: hypothetical protein F5O8.13 - Arabidopsis >gi|4056440|gb|AAC98013.1| Similar to OBP32pep protein gb|U37698
  misc_feature (1)..(71): Homolog of NCBI NO: 21536644 NR Description: OBP32pep protein, putative [Arabidopsis thaliana]
  misc_feature (1)..(71): Homolog of NCBI NO: 18395270 NR Description: OBP32pep protein, putative; protein id:

SEQ ID NO: 74671 - protein, 83 aa, Arabidopsis thaliana; identical to SEQ ID NO: 39117
  peptide (1)..(83): Ceres Seq. ID no. 5678958
  misc_feature: Pfam Name: DUF220 Pfam Description: Domain of unknown function DUF220
  misc_feature (1)..(74): Homolog of NCBI NO: 8778586 NR Description: F28C11.14 [Arabidopsis thaliana]
  misc_feature (1)..(74): Homolog of NCBI NO: 25373400 NR Description: hypothetical protein F5O8.7 [imported] - thaliana >gi|4056434|gb|AAC98007.1| Similar to OBP32pep protein
  misc_feature (1)..(77): Homolog of NCBI NO: 15220781 NR Description: OBP32pep protein, putative; protein id: [Arabidopsis thaliana] >gi|25373401|pir||H86368 hypothetical
  misc_feature (1)..(83): Homolog of NCBI NO: 18395251 NR Description: putative OBP32pep protein; protein id:
  misc_feature (1)..(77): Homolog of NCBI NO: 25373395 NR Description: hypothetical protein F5O8.22 - Arabidopsis >gi|4056449|gb|AAC98022.1| Similar to OBP32pep protein gb|U37698
  misc_feature (1)..(83): Homolog of NCBI NO: 8778583 NR Description: F28C11.19 [Arabidopsis thaliana]
  misc_feature (1)..(74): Homolog of NCBI NO: 15220821 NR Description: hypothetical protein; protein id: At1g23660.1
  misc_feature (1)..(65): Homolog of NCBI NO: 25373403 NR Description: hypothetical protein F5O8.13 - Arabidopsis >gi|4056440|gb|AAC98013.1| Similar to OBP32pep protein gb|U37698
  misc_feature (1)..(25): Homolog of NCBI NO: 21536644 NR Description: OBP32pep protein, putative [Arabidopsis thaliana]
  misc_feature (1)..(25): Homolog of NCBI NO: 18395270 NR Description: OBP32pep protein, putative; protein id:

SEQ ID NO: 74672 - DNA, 1541 bp, Arabidopsis thaliana
  misc_feature (1)..(1541): Ceres Seq. ID no. 5678976
  misc_feature: MA Experiment ID: 108434 Result: Up-regulated in Transcription
  misc_feature: MA Experiment 108434 PARAMETER Experiment Name: At_Root_Tips_cDNA_P Parameter: Tissue Value: Root Tips
  misc_feature: MA Experiment ID: 108461 Result: Up-regulated in Transcription
  misc_feature: MA Experiment 108461 PARAMETER Experiment Name: At_Germinating_Seeds_cDNA_P Parameter: Age (day) Value: 1 vs. 0
  misc_feature: MA Experiment 108461 PARAMETER Experiment Name: At_Germinating_Seeds_cDNA_P Parameter: Tissue Value: Germinating Seeds
  misc_feature: MA Experiment ID: 108462 Result: Up-regulated in Transcription
  misc_feature: MA Experiment 108462 PARAMETER Experiment Name: At_Germinating_Seeds_cDNA_P Parameter: Age (day) Value: 2 vs. 0
  misc_feature: MA Experiment 108462 PARAMETER Experiment Name: At_Germinating_Seeds_cDNA_P Parameter: Tissue Value: Germinating Seeds
  misc_feature: MA Experiment ID: 108463 Result: Up-regulated in Transcription
  misc_feature: MA Experiment 108463 PARAMETER Experiment Name: At_Germinating_Seeds_cDNA_P Parameter: Age (day) Value: 3 vs. 0
  misc_feature: MA Experiment 108463 PARAMETER Experiment Name: At_Germinating_Seeds_cDNA_P Parameter: Tissue Value: Germinating Seeds
  misc_feature: MA Experiment ID: 108573 Result: Up-regulated in Transcription
  misc_feature: MA Experiment 108573 PARAMETER Experiment Name: At_Drought_cDNA_P Parameter: Timepoint (hr) Value: 6
  misc_feature: MA Experiment 108573 PARAMETER Experiment Name: At_Drought_cDNA_P Parameter: Tissue Value: Aerial
  misc_feature: MA Experiment 108573 PARAMETER Experiment Name: At_Drought_cDNA_P Parameter: Treatment Value: Drought vs. No Drought
  misc_feature: MA Experiment ID: 108579 Result: Down-regulated in Transcription
  misc_feature: MA Experiment 108579 PARAMETER Experiment Name: At_4deg_Cold_cDNA_P Parameter: Temperature (deg C) Value: 4 vs. 22
  misc_feature: MA Experiment 108579 PARAMETER Experiment Name: At_4deg_Cold_cDNA_P Parameter: Timepoint (hr) Value: 6
  misc_feature: MA Experiment 108579 PARAMETER Experiment Name: At_4deg_Cold_cDNA_P Parameter: Tissue Value: Aerial
  misc_feature: MA Experiment ID: 20000113 Result: Down-regulated in Transcription
  misc_feature: MA Experiment 20000113 PARAMETER Experiment Name: At_42deg_Heat_cDNA_P Parameter: Temperature (deg C) Value: 42 vs. 22
  misc_feature: MA Experiment 20000113 PARAMETER Experiment Name: At_42deg_Heat_cDNA_P Parameter: Timepoint (hr) Value: 8
  misc_feature: MA Experiment 20000113 PARAMETER Experiment Name: At_42deg_Heat_cDNA_P Parameter: Tissue Value: Aerial
  misc_feature: MA Experiment ID: 20000180 Result: Up-regulated in Transcription
  misc_feature: MA Experiment 20000180 PARAMETER Experiment Name: At_Germinating_Seeds_P Parameter: Age (hr) Value: 24 vs. 0
  misc_feature: MA Experiment 20000180 PARAMETER Experiment Name: At_Germinating_Seeds_P Parameter: Tissue Value: Germinating Seeds
  misc_feature: Pfam Name: GHMP_kinases_C Pfam Description: GHMP kinases C terminal
ctctttcgaactctccgtcacttccatttcatttctatttgaatcttctcaaagctacacagatctctgaaatcgaaaaagcttgagctgtgttaatggcggaggagaaatgggtggtgatggtgacggcgcagactccaacgaatatcgccgtgattaagtattggggaaagagagatgaggttcggattcttcccattaatgatagcattagcgtcacgcttgatcctgatcacctctgtactctcaccaccgtcgctgttagtccttcctttgatcgagatcgaatgtggctcaatggcaaggaaatctcgctttctggaagtaggtaccagaattgcttgagggaaattcgaagtcgtgctgatgatgtagaagataaagaaaagggtatcaagattgcgaagaaagattgggagaagctgcatctgcacattgcttctcataacaacttccctactgctgctggcttagcatcttctgctgctggttttgcttgcttagtttttgctcttgccaagttgatgaatgtaaatgaagatccaagccaactttctgctatagcaaggcaaggttcaggaagtgcttgccgtagtttatttgggggatttgtcaagtggaatatgggaaacaaagaagatggaagtgacagtgttgcagttcaactggtagatgataagcactgggatgatcttgttatcattattgctgtggttagttcacgacagaaggaaacaagcagcacctcgggaatgcgtgagagtgttgagacaagtttgcttttacagcatagagcaaaggaagttgtcccagtacggattttgcaaatggaagaagctataaagaatcgagatttcacatcttttacaaaattgacgtgttcagacagtaatcagtttcatgctgtttgtatggatacatctccacccatattctacatgaatgacacctcccacaggataatcagcttagttgaaaagtggaaccgttctgccggtacaccagagattgcttatacatttgatgctggcccaaatgcagtcatgattgcaagaaacaggaaagtagcagttgaattgctgcaggggctgctctactgcttccctcctaagcctgacacagacatgaagagttacgtactgggggatacatcgatagtaaaagaggcaggcttggaaggagagcttccacaaggaattaaagacaaaattggaagtcaggatcaaaaaggtgaagtgagttattttatatgcagcagacctggaagaggtcctgtggtgcttcaagaccaaactcaagctcttctccatcctcaaactggcctccccaaataaccatttctatgtcttgttgttacttcaactctgagatttgcaacagcttcatcttttgctttgccagctccaactcttgtcctaagagagcactcttctgaatcttttcccaattatttgtgtttacgtacaattcttctgcatcgggtgcaaaaaacaaaacaatcaatattgcaaacgaataagatcttgatgctaaatctgagt

SEQ ID NO: 74673 - protein, 412 aa, Arabidopsis thaliana; identical to SEQ ID NO: 23100
  peptide (1)..(412): Ceres Seq. ID no. 5678977
  misc_feature: Pfam Name: GHMP_kinases_C Pfam Description: GHMP kinases C terminal
  misc_feature (1)..(412): Homolog of NCBI NO: 15224931 NR Description: mevalonate diphosphate decarboxylase; protein id: supported by cDNA: 35493. [Arabidopsis thaliana]
  misc_feature (9)..(412): Homolog of NCBI NO: 21593039 NR Description: mevalonate diphosphate decarboxylase [Arabidopsis
  misc_feature (1)..(412): Homolog of NCBI NO: 18410026 NR Description: DIPHOSPHOMEVALONATE DECARBOXYLASE - like protein;
  misc_feature (1)..(412): Homolog of NCBI NO: 21593243 NR Description: diphosphomevalonate decarboxylase-like protein
  misc_feature (1)..(412): Homolog of NCBI NO: 11281655 NR Description: diphosphomevalonate decarboxylase (EC 4.1.1.33)
  misc_feature (4)..(412): Homolog of NCBI NO: 16417950 NR Description: mevalonate disphosphate decarboxylase [Hevea
  misc_feature (1)..(412): Homolog of NCBI NO: 4505289 NR Description: diphosphomevalonate decarboxylase; mevalonate decarboxylase [Homo sapiens] >gi|1706681|sp|P53602|ER19_HUMAN decarboxylase (Mevalonate pyrophosphate decarboxylase)
  misc_feature (1)..(412): Homolog of NCBI NO: 30584105 NR Description: Homo sapiens mevalonate (diphospho) decarboxylase
  misc_feature (1)..(412): Homolog of NCBI NO: 20149736 NR Description: mevalonate (diphospho) decarboxylase; decarboxylase [Mus musculus] >gi|14250208|gb|AAH08526.1| Unknown
  misc_feature (1)..(412): Homolog of NCBI NO: 26354448 NR Description: unnamed protein product [Mus musculus]

SEQ ID NO: 74674 - protein, 404 aa, Arabidopsis thaliana; identical to SEQ ID NO: 23101
  peptide (1)..(404): Ceres Seq. ID no. 5678978
  misc_feature: Pfam Name: GHMP_kinases_C Pfam Description: GHMP kinases C terminal
  misc_feature (1)..(404): Homolog of NCBI NO: 15224931 NR Description: mevalonate diphosphate decarboxylase; protein id: supported by cDNA: 35493. [Arabidopsis thaliana]
  misc_feature (1)..(404): Homolog of NCBI NO: 21593039 NR Description: mevalonate diphosphate decarboxylase [Arabidopsis
  misc_feature (1)..(404): Homolog of NCBI NO: 18410026 NR Description: DIPHOSPHOMEVALONATE DECARBOXYLASE - like protein;
  misc_feature (1)..(404): Homolog of NCBI NO: 21593243 NR Description: diphosphomevalonate decarboxylase-like protein
  misc_feature (1)..(404): Homolog of NCBI NO: 11281655 NR Description: diphosphomevalonate decarboxylase (EC 4.1.1.33)
  misc_feature (1)..(404): Homolog of NCBI NO: 16417950 NR Description: mevalonate disphosphate decarboxylase [Hevea
  misc_feature (1)..(404): Homolog of NCBI NO: 4505289 NR Description: diphosphomevalonate decarboxylase; mevalonate decarboxylase [Homo sapiens] >gi|1706681|sp|P53602|ER19_HUMAN decarboxylase (Mevalonate pyrophosphate decarboxylase)
  misc_feature (1)..(404): Homolog of NCBI NO: 30584105 NR Description: Homo sapiens mevalonate (diphospho) decarboxylase
  misc_feature (1)..(404): Homolog of NCBI NO: 20149736 NR Description: mevalonate (diphospho) decarboxylase; decarboxylase [Mus musculus] >gi|14250208|gb|AAH08526.1| Unknown
  misc_feature (1)..(404): Homolog of NCBI NO: 26354448 NR Description: unnamed protein product [Mus musculus]

SEQ ID NO: 74675 - protein, 348 aa, Arabidopsis thaliana; identical to SEQ ID NO: 23102
  peptide (1)..(348): Ceres Seq. ID no. 5678979
  misc_feature: Pfam Name: GHMP_kinases_C Pfam Description: GHMP kinases C terminal
  misc_feature (1)..(348): Homolog of NCBI NO: 15224931 NR Description: mevalonate diphosphate decarboxylase; protein id: supported by cDNA: 35493. [Arabidopsis thaliana]
  misc_feature (1)..(348): Homolog of NCBI NO: 21593039 NR Description: mevalonate diphosphate decarboxylase [Arabidopsis
  misc_feature (1)..(348): Homolog of NCBI NO: 18410026 NR Description: DIPHOSPHOMEVALONATE DECARBOXYLASE - like protein;
  misc_feature (1)..(348): Homolog of NCBI NO: 21593243 NR Description: diphosphomevalonate decarboxylase-like protein
  misc_feature (1)..(348): Homolog of NCBI NO: 11281655 NR Description: diphosphomevalonate decarboxylase (EC 4.1.1.33)
  misc_feature (1)..(348): Homolog of NCBI NO: 16417950 NR Description: mevalonate disphosphate decarboxylase [Hevea
  misc_feature (1)..(348): Homolog of NCBI NO: 4505289 NR Description: diphosphomevalonate decarboxylase; mevalonate decarboxylase [Homo sapiens] >gi|1706681|sp|P53602|ER19_HUMAN decarboxylase (Mevalonate pyrophosphate decarboxylase)
  misc_feature (1)..(348): Homolog of NCBI NO: 30584105 NR Description: Homo sapiens mevalonate (diphospho) decarboxylase
  misc_feature (1)..(348): Homolog of NCBI NO: 20149736 NR Description: mevalonate (diphospho) decarboxylase; decarboxylase [Mus musculus] >gi|14250208|gb|AAH08526.1| Unknown
  misc_feature (1)..(348): Homolog of NCBI NO: 26354448 NR Description: unnamed protein product [Mus musculus]

SEQ ID NO: 74676 - DNA, 1005 bp, Arabidopsis thaliana
  misc_feature (1)..(1005): Ceres Seq. ID no. 5679035
  misc_feature: MA Experiment ID: 108461 Result: Up-regulated in Transcription
  misc_feature: MA Experiment 108461 PARAMETER Experiment Name: At_Germinating_Seeds_cDNA_P Parameter: Age (day) Value: 1 vs. 0
  misc_feature: MA Experiment 108461 PARAMETER Experiment Name: At_Germinating_Seeds_cDNA_P Parameter: Tissue Value: Germinating Seeds
  misc_feature: MA Experiment ID: 20000111 Result: Down-regulated in Transcription
  misc_feature: MA Experiment 20000111 PARAMETER Experiment Name: At_42deg_Heat_cDNA_P Parameter: Temperature (deg C) Value: 42 vs. 22
  misc_feature: MA Experiment 20000111 PARAMETER Experiment Name: At_42deg_Heat_cDNA_P Parameter: Timepoint (hr) Value: 6
  misc_feature: MA Experiment 20000111 PARAMETER Experiment Name: At_42deg_Heat_cDNA_P Parameter: Tissue Value: Aerial
  misc_feature: MA Experiment ID: 20000112 Result: Down-regulated in Transcription
  misc_feature: MA Experiment 20000112 PARAMETER Experiment Name: At_42deg_Heat_cDNA_P Parameter: Temperature (deg C) Value: 42 vs. 22
  misc_feature: MA Experiment 20000112 PARAMETER Experiment Name: At_42deg_Heat_cDNA_P Parameter: Timepoint (hr) Value: 2
  misc_feature: MA Experiment 20000112 PARAMETER Experiment Name: At_42deg_Heat_cDNA_P Parameter: Tissue Value: Aerial
  misc_feature: MA Experiment ID: 20000113 Result: Down-regulated in Transcription
  misc_feature: MA Experiment 20000113 PARAMETER Experiment Name: At_42deg_Heat_cDNA_P Parameter: Temperature (deg C) Value: 42 vs. 22
  misc_feature: MA Experiment 20000113 PARAMETER Experiment Name: At_42deg_Heat_cDNA_P Parameter: Timepoint (hr) Value: 8
  misc_feature: MA Experiment 20000113 PARAMETER Experiment Name: At_42deg_Heat_cDNA_P Parameter: Tissue Value: Aerial
  misc_feature: MA Experiment ID: 20000144 Result: Down-regulated in Transcription
  misc_feature: MA Experiment 20000144 PARAMETER Experiment Name: At_42deg_Heat_cDNA_P Parameter: Temperature (deg C) Value: 42 vs. 22
  misc_feature: MA Experiment 20000144 PARAMETER Experiment Name: At_42deg_Heat_cDNA_P Parameter: Timepoint (hr) Value: 1
  misc_feature: MA Experiment 20000144 PARAMETER Experiment Name: At_42deg_Heat_cDNA_P Parameter: Tissue Value: Aerial
  misc_feature: MA Experiment ID: 20000171 Result: Down-regulated in Transcription
  misc_feature: MA Experiment 20000171 PARAMETER Experiment Name: At_42deg_Heat_P Parameter: Age (day) Value: 14
  misc_feature: MA Experiment 20000171 PARAMETER Experiment Name: At_42deg_Heat_P Parameter: Organism Value: A. thaliana
  misc_feature: MA Experiment 20000171 PARAMETER Experiment Name: At_42deg_Heat_P Parameter: Plant Line Value: WS
  misc_feature: MA Experiment 20000171 PARAMETER Experiment Name: At_42deg_Heat_P Parameter: Temperature (deg C) Value: 42 vs. 22
  misc_feature: MA Experiment 20000171 PARAMETER Experiment Name: At_42deg_Heat_P Parameter: Timepoint (hr) Value: 1
  misc_feature: MA Experiment 20000171 PARAMETER Experiment Name: At_42deg_Heat_P Parameter: Tissue Value: Aerial
  misc_feature: MA Experiment ID: 20000173 Result: Down-regulated in Transcription
  misc_feature: MA Experiment 20000173 PARAMETER Experiment Name: At_42deg_Heat_P Parameter: Age (day) Value: 14
  misc_feature: MA Experiment 20000173 PARAMETER Experiment Name: At_42deg_Heat_P Parameter: Organism Value: A. thaliana
  misc_feature: MA Experiment 20000173 PARAMETER Experiment Name: At_42deg_Heat_P Parameter: Plant Line Value: WS
  misc_feature: MA Experiment 20000173 PARAMETER Experiment Name: At_42deg_Heat_P Parameter: Temperature (deg C) Value: 42 vs. 22
  misc_feature: MA Experiment 20000173 PARAMETER Experiment Name: At_42deg_Heat_P Parameter: Timepoint (hr) Value: 6
  misc_feature: MA Experiment 20000173 PARAMETER Experiment Name: At_42deg_Heat_P Parameter: Tissue Value: Aerial
  misc_feature: MA Experiment ID: 20000179 Result: Up-regulated in Transcription
  misc_feature: MA Experiment 20000179 PARAMETER Experiment Name: At_Germinating_Seeds_P Parameter: Age (hr) Value: 6 vs. 0
  misc_feature: MA Experiment 20000179 PARAMETER Experiment Name: At_Germinating_Seeds_P Parameter: Tissue Value: Germinating Seeds
  misc_feature: MA Experiment ID: 20000180 Result: Up-regulated in Transcription
  misc_feature: MA Experiment 20000180 PARAMETER Experiment Name: At_Germinating_Seeds_P Parameter: Age (hr) Value: 24 vs. 0
  misc_feature: MA Experiment 20000180 PARAMETER Experiment Name: At_Germinating_Seeds_P Parameter: Tissue Value: Germinating Seeds
  misc_feature: MA Experiment ID: 20000185 Result: Up-regulated in Transcription
  misc_feature: MA Experiment 20000185 PARAMETER Experiment Name: At_Roots__P Parameter: Age (day) Value: 7 vs. 21
  misc_feature: MA Experiment 20000185 PARAMETER Experiment Name: At_Roots__P Parameter: Organism Value: A. thaliana
  misc_feature: MA Experiment 20000185 PARAMETER Experiment Name: At_Roots__P Parameter: Tissue Value: Roots vs. Whole Plant
  misc_feature: MA Experiment ID: 20000439 Result: Up-regulated in Transcription
  misc_feature: MA Experiment 20000439 PARAMETER Experiment Name: At_Roots__P Parameter: Age (day) Value: 14 vs. 21
  misc_feature: MA Experiment 20000439 PARAMETER Experiment Name: At_Roots__P Parameter: Organism Value: A. thaliana
  misc_feature: MA Experiment 20000439 PARAMETER Experiment Name: At_Roots__P Parameter: Tissue Value: Roots vs. Whole Plant
  misc_feature: MA Experiment ID: 20000495 Result: Up-regulated in Transcription
  misc_feature: MA Experiment 20000495 PARAMETER Experiment Name: At_Guard_Cells_P Parameter: Harvest Date Value: 8/2/2002
  misc_feature: MA Experiment 20000495 PARAMETER Experiment Name: At_Guard_Cells_P Parameter: Organism Value: A. thaliana
  misc_feature: MA Experiment 20000495 PARAMETER Experiment Name: At_Guard_Cells_P Parameter: Tissue Value: Guard Cells vs. Leaves
  misc_feature: MA Experiment ID: 20001905 Result: Down-regulated in Transcription
  misc_feature: MA Experiment 20001905 PARAMETER Experiment Name: At_Drought_Reproduction_P Parameter: Age (day) Value: 40
  misc_feature: MA Experiment 20001905 PARAMETER Experiment Name: At_Drought_Reproduction_P Parameter: Organism Value: A. thaliana
  misc_feature: MA Experiment 20001905 PARAMETER Experiment Name: At_Drought_Reproduction_P Parameter: Plant Line Value: WS
  misc_feature: MA Experiment 20001905 PARAMETER Experiment Name: At_Drought_Reproduction_P Parameter: Timepoint (day) Value: 10
  misc_feature: MA Experiment 20001905 PARAMETER Experiment Name: At_Drought_Reproduction_P Parameter: Tissue Value: Rosettes
  misc_feature: MA Experiment 20001905 PARAMETER Experiment Name: At_Drought_Reproduction_P Parameter: Treatment Value: Drought vs. No Drought
atataatctcgattctcttcaacggtcctcaattatcctaaattcagatcataaaaacgctaacttttaatttctttctttctgagaaattggttctcatcgttggaatcgaaaaatgggacgaatcggtttagtagtgactgatctggtattgtcgttcatgtggatatgggcaggagttctggtcaacattttagtccatggagttcttggatttagccggaccgatccttccggtgagatcgttcgttatctcttctctatcatctccatgttcatcttcgcctaccttcaacaagccaccaaaggcgggctttataatcctttgaccgctttggctgctggagtctccggtggcttcagcagtttcatcttctccgtcttcgttcgaatccccgtcgaggtaataggatcaattcttgcggttaagcatatcattcacgtattccctgagattgggaaaggacctaaactaaatgtagcaattcaccacggtgctttaacagaagggatactaacattcttcattgtactgctctcaatgggactaacaagaaaaatcccgggaagtttcttcatgaagacttggatcggtagtcttgctaagttaactcttcatattcttggctctgatcttaccggtggatgcatgaaccctgcagctgttatgggatgggcttatgcacgcggtgaacatataacgaaagagcatttacttgtgtattggcttggacctgtgaaggctacgttgcttgcagtttggttcttcaaagttgtgtttaagcctctcaccgaagaacaagagaaacctaaggccaaatctgagtgaggaatgaggaatgagctcagctttcatatttaatcctctctggataaatctcctttacacaagacacagagggtaggattgtttccagggatattttcgtagattttgtaatgtgttttttttttatgttgcaaactcaactgtatcaaccagttcaataaaatctgaaatttaag

SEQ ID NO: 74677 - protein, 237 aa, Arabidopsis thaliana; identical to SEQ ID NO: 21971
  peptide (1)..(237): Ceres Seq. ID no. 5679036
  misc_feature (10)..(216): Pfam Name: Major intrinsic protein Pfam Description: Major intrinsic protein
  misc_feature (1)..(237): Homolog of NCBI NO: 15230175 NR Description: putative protein; protein id: At3g56950.1, by cDNA: 32275., supported by cDNA: gi_14423565 [Arabidopsis
  misc_feature (6)..(231): Homolog of NCBI NO: 13447817 NR Description: small basic membrane integral protein ZmSIP2-1
  misc_feature (10)..(235): Homolog of NCBI NO: 34906220 NR Description: P0666G04.16 [Oryza sativa (japonica
  misc_feature (1)..(235): Homolog of NCBI NO: 13447813 NR Description: small basic membrane integral protein ZmSIP1-1
  misc_feature (1)..(235): Homolog of NCBI NO: 13447815 NR Description: small basic membrane integral protein ZmSIP1-2
  misc_feature (1)..(231): Homolog of NCBI NO: 15238785 NR Description: putative protein; protein id: At5g18290.1 thaliana] >gi|9758911|dbj|BAB09487.1| to unknown protein [Arabidopsis thaliana]
  misc_feature (1)..(233): Homolog of NCBI NO: 15229225 NR Description: hypothetical protein; protein id: At3g04090.1 thaliana] >gi|6721176|gb|AAF26804.1|AC016829_28 hypothetical

SEQ ID NO: 74678 - protein, 222 aa, Arabidopsis thaliana; identical to SEQ ID NO: 21972
  peptide (1)..(222): Ceres Seq. ID no. 5679037
  misc_feature (1)..(201): Pfam Name: Major intrinsic protein Pfam Description: Major intrinsic protein
  misc_feature (1)..(222): Homolog of NCBI NO: 15230175 NR Description: putative protein; protein id: At3g56950.1, by cDNA: 32275., supported by cDNA: gi_14423565 [Arabidopsis
  misc_feature (1)..(216): Homolog of NCBI NO: 13447817 NR Description: small basic membrane integral protein ZmSIP2-1
  misc_feature (1)..(220): Homolog of NCBI NO: 34906220 NR Description: P0666G04.16 [Oryza sativa (japonica
  misc_feature (1)..(220): Homolog of NCBI NO: 13447813 NR Description: small basic membrane integral protein ZmSIP1-1
  misc_feature (1)..(220): Homolog of NCBI NO: 13447815 NR Description: small basic membrane integral protein ZmSIP1-2
  misc_feature (1)..(216): Homolog of NCBI NO: 15238785 NR Description: putative protein; protein id: At5g18290.1 thaliana] >gi|9758911|dbj|BAB09487.1| to unknown protein [Arabidopsis thaliana]
  misc_feature (1)..(218): Homolog of NCBI NO: 15229225 NR Description: hypothetical protein; protein id: At3g04090.1 thaliana] >gi|6721176|gb|AAF26804.1|AC016829_28 hypothetical

SEQ ID NO: 74679 - protein, 185 aa, Arabidopsis thaliana; identical to SEQ ID NO: 21973
  peptide (1)..(185): Ceres Seq. ID no. 5679038
  misc_feature (1)..(164): Pfam Name: Major intrinsic protein Pfam Description: Major intrinsic protein
  misc_feature (1)..(185): Homolog of NCBI NO: 15230175 NR Description: putative protein; protein id: At3g56950.1, by cDNA: 32275., supported by cDNA: gi_14423565 [Arabidopsis
  misc_feature (1)..(179): Homolog of NCBI NO: 13447817 NR Description: small basic membrane integral protein ZmSIP2-1
  misc_feature (1)..(183): Homolog of NCBI NO: 34906220 NR Description: P0666G04.16 [Oryza sativa (japonica
  misc_feature (1)..(183): Homolog of NCBI NO: 13447813 NR Description: small basic membrane integral protein ZmSIP1-1
  misc_feature (1)..(183): Homolog of NCBI NO: 13447815 NR Description: small basic membrane integral protein ZmSIP1-2
  misc_feature (1)..(179): Homolog of NCBI NO: 15238785 NR Description: putative protein; protein id: At5g18290.1 thaliana] >gi|9758911|dbj|BAB09487.1| to unknown protein [Arabidopsis thaliana]
  misc_feature (1)..(181): Homolog of NCBI NO: 15229225 NR Description: hypothetical protein; protein id: At3g04090.1 thaliana] >gi|6721176|gb|AAF26804.1|AC016829_28 hypothetical

SEQ ID NO: 74680 - DNA, 920 bp, Arabidopsis thaliana
  misc_feature (1)..(920): Ceres Seq. ID no. 5679058
  misc_feature: MA Experiment ID: 108462 Result: Down-regulated in Transcription
  misc_feature: MA Experiment 108462 PARAMETER Experiment Name: At_Germinating_Seeds_cDNA_P Parameter: Age (day) Value: 2 vs. 0
  misc_feature: MA Experiment 108462 PARAMETER Experiment Name: At_Germinating_Seeds_cDNA_P Parameter: Tissue Value: Germinating Seeds
  misc_feature: MA Experiment ID: 108463 Result: Down-regulated in Transcription
  misc_feature: MA Experiment 108463 PARAMETER Experiment Name: At_Germinating_Seeds_cDNA_P Parameter: Age (day) Value: 3 vs. 0
  misc_feature: MA Experiment 108463 PARAMETER Experiment Name: At_Germinating_Seeds_cDNA_P Parameter: Tissue Value: Germinating Seeds
  misc_feature: MA Experiment ID: 108464 Result: Down-regulated in Transcription
  misc_feature: MA Experiment 108464 PARAMETER Experiment Name: At_Germinating_Seeds_cDNA_P Parameter: Age (day) Value: 4 vs. 0
  misc_feature: MA Experiment 108464 PARAMETER Experiment Name: At_Germinating_Seeds_cDNA_P Parameter: Tissue Value: Germinating Seeds
  misc_feature: MA Experiment ID: 20000235 Result: Up-regulated in Transcription
  misc_feature: MA Experiment 20000235 PARAMETER Experiment Name: At_Siliques_P Parameter: Age (day) Value: 21
  misc_feature: MA Experiment 20000235 PARAMETER Experiment Name: At_Siliques_P Parameter: Organism Value: A. thaliana
  misc_feature: MA Experiment 20000235 PARAMETER Experiment Name: At_Siliques_P Parameter: Plant Line Value: WS
  misc_feature: MA Experiment 20000235 PARAMETER Experiment Name: At_Siliques_P Parameter: Tissue Value: 5-10mm Siliques vs. Whole Plant
aaaggcgttacagagaagaagaagaaggagaaatgtcagacgacgacgagagaggcgaagagtacctcttcaagattgttatcatcggtgattccgccgtcggcaaatccaatctcctcactcgctacgcccgtaacgagttcaatcccaattccaaagccactatcggcgtcgagtttcagactcagagcatgctcatcgacggcaaagaggtcaaagctcagatttgggataccgccggtcaggaacgcttccgcgccgttacatctgcttattaccgtggcgccgttggagccctcgtcgtctacgatatcactcgtagctccactttcgaaaacgtcggtcgctggctcgatgagctcaacactcattctgatacaacagtagcaaaaatgcttattgggaacaaatgtgatctcgagagcataagagcggtgagtgttgaggaaggcaagagtcttgctgagtctgaaggtttgtttttcatggagacctctgcgttggactcgaccaatgtaaagacggctttcgagatggttattcgggagatctatagcaacattagtcgaaagcaattgaactctgattcttacaaagaggagctgactgtgaatcgtgttagcttggttaagaacgagaacgaagggacaaagacattctcttgctgttcgaggtaacatctttgtaacggtttctctttgtcctgaggattggtttcgggttgaattgtgttcctggtaaacttatagaaaggcagagatatattcttatagttctcagttaaagtaaaagaagaagagagaaagatgttttgagtttctttgttacgcatacagaaaaagtttggttagtgtataagttatgttctcatttgtaacttttgtaaacttatgattgttaaatcaattttgatattttcc

SEQ ID NO: 74681 - protein, 224 aa, Arabidopsis thaliana
  peptide (1)..(224): Ceres Seq. ID no. 5679059
  misc_feature (24)..(185): Pfam Name: Ras family Pfam Description: Ras family
  misc_feature (11)..(224): Homolog of NCBI NO: 15224226 NR Description: Ras-related GTP-binding protein (ARA-4); protein
  misc_feature (11)..(223): Homolog of NCBI NO: 15225121 NR Description: GTP-binding protein, putative; protein id: supported by cDNA: 15416. [Arabidopsis thaliana]
  misc_feature (11)..(223): Homolog of NCBI NO: 18390575 NR Description: RAS-related GTP-binding protein (ARA-1); protein At1g05810.1, supported by cDNA: gi_12083321 [Arabidopsis
  misc_feature (11)..(223): Homolog of NCBI NO: 29893534 NR Description: putative RAS-related protein ARA-1 [Arabidopsis
  misc_feature (11)..(223): Homolog of NCBI NO: 17380746 NR Description: putative RAS-related protein ARA-1 [Arabidopsis
  misc_feature (11)..(223): Homolog of NCBI NO: 21553627 NR Description: putative RAS superfamily GTP-binding protein
  misc_feature (11)..(223): Homolog of NCBI NO: 1076457 NR Description: GTP-binding protein bra - rape
  misc_feature (12)..(223): Homolog of NCBI NO: 1370154 NR Description: RAB11G [Lotus japonicus]
RRYREEEEGEMSDDDERGEEYLFKIVIIGDSAVGKSNLLTRYARNEFNPNSKATIGVEFQTQSMLIDGKEVKAQIWDTAGQERFRAVTSAYYRGAVGALVVYDITRSSTFENVGRWLDELNTHSDTTVAKMLIGNKCDLESIRAVSVEEGKSLAESEGLFFMETSALDSTNVKTAFEMVIREIYSNISRKQLNSDSYKEELTVNRVSLVKNENEGTKTFSCCSR

SEQ ID NO: 74682 - protein, 214 aa, Arabidopsis thaliana; identical to SEQ ID NO: 24892
  peptide (1)..(214): Ceres Seq. ID no. 5679060
  misc_feature (14)..(175): Pfam Name: Ras family Pfam Description: Ras family
  misc_feature (1)..(214): Homolog of NCBI NO: 15224226 NR Description: Ras-related GTP-binding protein (ARA-4); protein
  misc_feature (1)..(213): Homolog of NCBI NO: 15225121 NR Description: GTP-binding protein, putative; protein id: supported by cDNA: 15416. [Arabidopsis thaliana]
  misc_feature (1)..(213): Homolog of NCBI NO: 18390575 NR Description: RAS-related GTP-binding protein (ARA-1); protein At1g05810.1, supported by cDNA: gi_12083321 [Arabidopsis
  misc_feature (1)..(213): Homolog of NCBI NO: 29893534 NR Description: putative RAS-related protein ARA-1 [Arabidopsis
  misc_feature (1)..(213): Homolog of NCBI NO: 17380746 NR Description: putative RAS-related protein ARA-1 [Arabidopsis
  misc_feature (1)..(213): Homolog of NCBI NO: 21553627 NR Description: putative RAS superfamily GTP-binding protein
  misc_feature (1)..(213): Homolog of NCBI NO: 1076457 NR Description: GTP-binding protein bra - rape
  misc_feature (2)..(213): Homolog of NCBI NO: 1370154 NR Description: RAB11G [Lotus japonicus]

SEQ ID NO: 74683 - protein, 161 aa, Arabidopsis thaliana; identical to SEQ ID NO: 24893
  peptide (1)..(161): Ceres Seq. ID no. 5679061
  misc_feature (1)..(122): Pfam Name: Ras family Pfam Description: Ras family
  misc_feature (1)..(161): Homolog of NCBI NO: 15224226 NR Description: Ras-related GTP-binding protein (ARA-4); protein
  misc_feature (1)..(160): Homolog of NCBI NO: 15225121 NR Description: GTP-binding protein, putative; protein id: supported by cDNA: 15416. [Arabidopsis thaliana]
  misc_feature (1)..(160): Homolog of NCBI NO: 18390575 NR Description: RAS-related GTP-binding protein (ARA-1); protein At1g05810.1, supported by cDNA: gi_12083321 [Arabidopsis
  misc_feature (1)..(160): Homolog of NCBI NO: 29893534 NR Description: putative RAS-related protein ARA-1 [Arabidopsis
  misc_feature (1)..(160): Homolog of NCBI NO: 17380746 NR Description: putative RAS-related protein ARA-1 [Arabidopsis
  misc_feature (1)..(160): Homolog of NCBI NO: 21553627 NR Description: putative RAS superfamily GTP-binding protein
  misc_feature (1)..(160): Homolog of NCBI NO: 1076457 NR Description: GTP-binding protein bra - rape
  misc_feature (1)..(160): Homolog of NCBI NO: 1370154 NR Description: RAB11G [Lotus japonicus]

SEQ ID NO: 74684 - DNA, 1220 bp, Arabidopsis thaliana
  misc_feature (1)..(1220): Ceres Seq. ID no. 5679066
  misc_feature: MA Experiment ID: 108434 Result: Up-regulated in Transcription
  misc_feature: MA Experiment 108434 PARAMETER Experiment Name: At_Root_Tips_cDNA_P Parameter: Tissue Value: Root Tips
  misc_feature: MA Experiment ID: 108435 Result: Up-regulated in Transcription
  misc_feature: MA Experiment 108435 PARAMETER Experiment Name: At_stm_Mutants_cDNA_P Parameter: Plant Line Value: wt Landsburg vs stm
  misc_feature: MA Experiment 108435 PARAMETER Experiment Name: At_stm_Mutants_cDNA_P Parameter: Tissue Value: Shoot Apical Meristem Region
  misc_feature: MA Experiment ID: 108462 Result: Down-regulated in Transcription
  misc_feature: MA Experiment 108462 PARAMETER Experiment Name: At_Germinating_Seeds_cDNA_P Parameter: Age (day) Value: 2 vs. 0
  misc_feature: MA Experiment 108462 PARAMETER Experiment Name: At_Germinating_Seeds_cDNA_P Parameter: Tissue Value: Germinating Seeds
  misc_feature: MA Experiment ID: 108463 Result: Down-regulated in Transcription
  misc_feature: MA Experiment 108463 PARAMETER Experiment Name: At_Germinating_Seeds_cDNA_P Parameter: Age (day) Value: 3 vs. 0
  misc_feature: MA Experiment 108463 PARAMETER Experiment Name: At_Germinating_Seeds_cDNA_P Parameter: Tissue Value: Germinating Seeds
  misc_feature: MA Experiment ID: 108464 Result: Down-regulated in Transcription
  misc_feature: MA Experiment 108464 PARAMETER Experiment Name: At_Germinating_Seeds_cDNA_P Parameter: Age (day) Value: 4 vs. 0
  misc_feature: MA Experiment 108464 PARAMETER Experiment Name: At_Germinating_Seeds_cDNA_P Parameter: Tissue Value: Germinating Seeds
  misc_feature: MA Experiment ID: 108488 Result: Up-regulated in Transcription
  misc_feature: MA Experiment ID: 108489 Result: Up-regulated in Transcription
  misc_feature: MA Experiment ID: 108573 Result: Down-regulated in Transcription
  misc_feature: MA Experiment 108573 PARAMETER Experiment Name: At_Drought_cDNA_P Parameter: Timepoint (hr) Value: 6
  misc_feature: MA Experiment 108573 PARAMETER Experiment Name: At_Drought_cDNA_P Parameter: Tissue Value: Aerial
  misc_feature: MA Experiment 108573 PARAMETER Experiment Name: At_Drought_cDNA_P Parameter: Treatment Value: Drought vs. No Drought
  misc_feature: MA Experiment ID: 108595 Result: Down-regulated in Transcription
  misc_feature: MA Experiment 108595 PARAMETER Experiment Name: At_Ler-pi_Ovule_cDNA_P Parameter: Plant Line Value: null
  misc_feature: MA Experiment ID: 20000234 Result: Up-regulated in Transcription
  misc_feature: MA Experiment 20000234 PARAMETER Experiment Name: At_Siliques_P Parameter: Age (day) Value: 21
  misc_feature: MA Experiment 20000234 PARAMETER Experiment Name: At_Siliques_P Parameter: Organism Value: A. thaliana
  misc_feature: MA Experiment 20000234 PARAMETER Experiment Name: At_Siliques_P Parameter: Plant Line Value: WS
  misc_feature: MA Experiment 20000234 PARAMETER Experiment Name: At_Siliques_P Parameter: Tissue Value: Less Than 5mm Siliques vs. Whole Plant
  misc_feature: MA Experiment ID: 20000495 Result: Up-regulated in Transcription
  misc_feature: MA Experiment 20000495 PARAMETER Experiment Name: At_Guard_Cells_P Parameter: Harvest Date Value: 8/2/2002
  misc_feature: MA Experiment 20000495 PARAMETER Experiment Name: At_Guard_Cells_P Parameter: Organism Value: A. thaliana
  misc_feature: MA Experiment 20000495 PARAMETER Experiment Name: At_Guard_Cells_P Parameter: Tissue Value: Guard Cells vs. Leaves
  misc_feature: MA Experiment ID: 20000794 Result: Down-regulated in Transcription
  misc_feature: MA Experiment 20000794 PARAMETER Experiment Name: At_Petals_P Parameter: Age (day) Value: 23-25 days
  misc_feature: MA Experiment 20000794 PARAMETER Experiment Name: At_Petals_P Parameter: Plant Line Value: WS
  misc_feature: MA Experiment 20000794 PARAMETER Experiment Name: At_Petals_P Parameter: Tissue Value: Petals vs. Whole plant
  misc_feature: MA Experiment ID: 20001557 Result: Up-regulated in Transcription
  misc_feature: MA Experiment 20001557 PARAMETER Experiment Name: At_Drought_Soil_Dry_P Parameter: Age (day) Value: 27
  misc_feature: MA Experiment 20001557 PARAMETER Experiment Name: At_Drought_Soil_Dry_P Parameter: Organism Value: A. thaliana
  misc_feature: MA Experiment 20001557 PARAMETER Experiment Name: At_Drought_Soil_Dry_P Parameter: Plant Line Value: WS
  misc_feature: MA Experiment 20001557 PARAMETER Experiment Name: At_Drought_Soil_Dry_P Parameter: Post Timepoint (hr) Value: 3
  misc_feature: MA Experiment 20001557 PARAMETER Experiment Name: At_Drought_Soil_Dry_P Parameter: Post-Treatment Value: Re-Water vs. No Drought
  misc_feature: MA Experiment 20001557 PARAMETER Experiment Name: At_Drought_Soil_Dry_P Parameter: Timepoint (day) Value: 13
  misc_feature: MA Experiment 20001557 PARAMETER Experiment Name: At_Drought_Soil_Dry_P Parameter: Treatment Value: Drought vs. No Drought
  misc_feature: MA Experiment ID: 20001558 Result: Up-regulated in Transcription
  misc_feature: MA Experiment 20001558 PARAMETER Experiment Name: At_Drought_Soil_Dry_P Parameter: Age (day) Value: 27
  misc_feature: MA Experiment 20001558 PARAMETER Experiment Name: At_Drought_Soil_Dry_P Parameter: Organism Value: A. thaliana
  misc_feature: MA Experiment 20001558 PARAMETER Experiment Name: At_Drought_Soil_Dry_P Parameter: Plant Line Value: WS
  misc_feature: MA Experiment 20001558 PARAMETER Experiment Name: At_Drought_Soil_Dry_P Parameter: Post Timepoint (hr) Value: 6
  misc_feature: MA Experiment 20001558 PARAMETER Experiment Name: At_Drought_Soil_Dry_P Parameter: Post-Treatment Value: Re-Water vs. No Drought
  misc_feature: MA Experiment 20001558 PARAMETER Experiment Name: At_Drought_Soil_Dry_P Parameter: Timepoint (day) Value: 13
  misc_feature: MA Experiment 20001558 PARAMETER Experiment Name: At_Drought_Soil_Dry_P Parameter: Treatment Value: Drought vs. No Drought
  misc_feature: MA Experiment ID: 20001560 Result: Up-regulated in Transcription
  misc_feature: MA Experiment 20001560 PARAMETER Experiment Name: At_Drought_Soil_Dry_P Parameter: Age (day) Value: 28
  misc_feature: MA Experiment 20001560 PARAMETER Experiment Name: At_Drought_Soil_Dry_P Parameter: Organism Value: A. thaliana
  misc_feature: MA Experiment 20001560 PARAMETER Experiment Name: At_Drought_Soil_Dry_P Parameter: Plant Line Value: WS
  misc_feature: MA Experiment 20001560 PARAMETER Experiment Name: At_Drought_Soil_Dry_P Parameter: Post Timepoint (hr) Value: None
  misc_feature: MA Experiment 20001560 PARAMETER Experiment Name: At_Drought_Soil_Dry_P Parameter: Post-Treatment Value: None
  misc_feature: MA Experiment 20001560 PARAMETER Experiment Name: At_Drought_Soil_Dry_P Parameter: Timepoint (day) Value: 14
  misc_feature: MA Experiment 20001560 PARAMETER Experiment Name: At_Drought_Soil_Dry_P Parameter: Treatment Value: Drought vs. No Drought
  misc_feature: MA Experiment ID: 20001757 Result: Up-regulated in Transcription
  misc_feature: MA Experiment 20001757 PARAMETER Experiment Name: At_50mM_NH4NO3_L-to-H_P Parameter: Timepoint (hr) Value: 6
  misc_feature: MA Experiment 20001757 PARAMETER Experiment Name: At_50mM_NH4NO3_L-to-H_P Parameter: Tissue Value: Leaf
  misc_feature: MA Experiment 20001757 PARAMETER Experiment Name: At_50mM_NH4NO3_L-to-H_P Parameter: Treatment Value: 50mM NH4NO3 vs 100mM Mannitol
aagttttcttttgattcattataatttgtttgttctgatgtttgtgagatcgataaacccagttgttctagttctattgtagagaaattcactttgattttagatttagaatcgttgcattgagttttccgatcttctataattgctccttttcattttgctgtttggttttaaacattgtcgttgatgttcctgccttgcttctctgtgattaacaatctgttcaatttctcaaaggtgtcttttttatttgattagtatagcttatttttggtttgtttatggcatgctatgtatgtaggagaaatggctgaatccaaggtagtggttccagagtctgtgctaaagaagatcaagaggcaagaggaatgggcattggccaagaaagatgaagctgtagctgctaagaagaagagtgttgaggcccgcaagcttatcttcaagagagctgagcagtatgccaaagaatacgctgagaaggataacgagttgatccgattgaagcgggaggctaagttgaaaggaggtttctacgttgaccctgaggctaagttgctctttatcattcgtatccgtggtatcaatgccattgacccaaaaaccaagaagattctgcagctcctgcgtttgagacagatcttcaatggtgtgtttcttaaggtgaacaaggcaacagtaaacatgctgcgccgagttgaaccatacgtgacttacggatacccaaacttgaagagcgttaaggaactgatctacaaaagaggttatggaaagctgaaccaccagaggatagcacttactgacaactccattgtggatcaggctctcggaaagcatgggatcatctgcgttgaggatctcatccacgagatcatgactgttggacctcacttcaaggaagccaacaacttcctgtggccattccaattgaaggcaccactcggtggccttaagaagaagagaaaccactacgtcgaaggtggtgatgctggaaacagggagaatttcatcaacgagcttgtcaggagaatgaattgatgaaagcttccttctttatctttgcaaatttcaaagattttgggaccgagtttttttttttttgttcaagttatcagagacttgtgatcttttatccgagataggctttttatgactaatcatgttattttccaatggcgggcttttaaattgatcttgaatttttattggctgttagattgttc

SEQ ID NO: 74685 - protein, 247 aa, Arabidopsis thaliana; identical to SEQ ID NO: 23648
  peptide (1)..(247): Ceres Seq. ID no. 5679067
  misc_feature (87)..(139): Pfam Name: Ribosomal protein L30p/L7e Pfam Description: Ribosomal protein L30p/L7e
  misc_feature (1)..(247): Homolog of NCBI NO: 30689623 NR Description: 60S ribosomal protein L7 (RPL7C) [Arabidopsis >gi|6174958|sp|Q42208|RL7_ARATH 60S ribosomal protein L7
  misc_feature (6)..(247): Homolog of NCBI NO: 30689617 NR Description: 60S ribosomal protein L7 (RPL7C) [Arabidopsis >gi|15450713|gb|AAK96628.1| At2g44120/F6E13.25 [Arabidopsis >gi|17386142|gb|AAL38617.1|AF446884_1 At2g44120/F6E13.25
  misc_feature (6)..(247): Homolog of NCBI NO: 27311547 NR Description: Unknown protein [Arabidopsis thaliana]
  misc_feature (6)..(247): Homolog of NCBI NO: 15226212 NR Description: putative ribosomal protein L7; protein id: supported by cDNA: 13298., supported by cDNA: gi_13877566, by cDNA: gi_15028382, supported by cDNA: gi_19310656, supported
  misc_feature (7)..(247): Homolog of NCBI NO: 15231288 NR Description: ribosomal protein, putative; protein id: supported by cDNA: gi_14532551, supported by cDNA: gi_15810195, by cDNA: gi_18655394 [Arabidopsis thaliana]
  misc_feature (6)..(247): Homolog of NCBI NO: 445613 NR Description: ribosomal protein L7
  misc_feature (9)..(247): Homolog of NCBI NO: 38346542 NR Description: OSJNBa0035M09.3 [Oryza sativa (japonica
  misc_feature (5)..(247): Homolog of NCBI NO: 38637548 NR Description: putative 60S ribosomal protein L7 [Oryza sativa
  misc_feature (13)..(246): Homolog of NCBI NO: 28630259 NR Description: ribosomal protein L7 [Branchiostoma lanceolatum]
  misc_feature (1)..(247): Homolog of NCBI NO: 32416114 NR Description: hypothetical protein [Neurospora crassa]

SEQ ID NO: 74686 - protein, 242 aa, Arabidopsis thaliana; identical to SEQ ID NO: 23649
  peptide (1)..(242): Ceres Seq. ID no. 5679068
  misc_feature (82)..(134): Pfam Name: Ribosomal protein L30p/L7e Pfam Description: Ribosomal protein L30p/L7e
  misc_feature (1)..(242): Homolog of NCBI NO: 30689623 NR Description: 60S ribosomal protein L7 (RPL7C) [Arabidopsis >gi|6174958|sp|Q42208|RL7_ARATH 60S ribosomal protein L7
  misc_feature (1)..(242): Homolog of NCBI NO: 30689617 NR Description: 60S ribosomal protein L7 (RPL7C) [Arabidopsis >gi|15450713|gb|AAK96628.1| At2g44120/F6E13.25 [Arabidopsis >gi|17386142|gb|AAL38617.1|AF446884_1 At2g44120/F6E13.25
  misc_feature (1)..(242): Homolog of NCBI NO: 27311547 NR Description: Unknown protein [Arabidopsis thaliana]
  misc_feature (1)..(242): Homolog of NCBI NO: 15226212 NR Description: putative ribosomal protein L7; protein id: supported by cDNA: 13298., supported by cDNA: gi_13877566, by cDNA: gi_15028382, supported by cDNA: gi_19310656, supported
  misc_feature (2)..(242): Homolog of NCBI NO: 15231288 NR Description: ribosomal protein, putative; protein id: supported by cDNA: gi_14532551, supported by cDNA: gi_15810195, by cDNA: gi_18655394 [Arabidopsis thaliana]
  misc_feature (1)..(242): Homolog of NCBI NO: 445613 NR Description: ribosomal protein L7
  misc_feature (4)..(242): Homolog of NCBI NO: 38346542 NR Description: OSJNBa0035M09.3 [Oryza sativa (japonica
  misc_feature (1)..(242): Homolog of NCBI NO: 38637548 NR Description: putative 60S ribosomal protein L7 [Oryza sativa
  misc_feature (8)..(241): Homolog of NCBI NO: 28630259 NR Description: ribosomal protein L7 [Branchiostoma lanceolatum]
  misc_feature (1)..(242): Homolog of NCBI NO: 32416114 NR Description: hypothetical protein [Neurospora crassa]

SEQ ID NO: 74687 - DNA, 1085 bp, Arabidopsis thaliana
  misc_feature (1)..(1085): Ceres Seq. ID no. 5679072
  misc_feature: MA Experiment ID: 108434 Result: Up-regulated in Transcription
  misc_feature: MA Experiment 108434 PARAMETER Experiment Name: At_Root_Tips_cDNA_P Parameter: Tissue Value: Root Tips
  misc_feature: MA Experiment ID: 108435 Result: Up-regulated in Transcription
  misc_feature: MA Experiment 108435 PARAMETER Experiment Name: At_stm_Mutants_cDNA_P Parameter: Plant Line Value: wt Landsburg vs stm
  misc_feature: MA Experiment 108435 PARAMETER Experiment Name: At_stm_Mutants_cDNA_P Parameter: Tissue Value: Shoot Apical Meristem Region
  misc_feature: MA Experiment ID: 108462 Result: Down-regulated in Transcription
  misc_feature: MA Experiment 108462 PARAMETER Experiment Name: At_Germinating_Seeds_cDNA_P Parameter: Age (day) Value: 2 vs. 0
  misc_feature: MA Experiment 108462 PARAMETER Experiment Name: At_Germinating_Seeds_cDNA_P Parameter: Tissue Value: Germinating Seeds
  misc_feature: MA Experiment ID: 108463 Result: Down-regulated in Transcription
  misc_feature: MA Experiment 108463 PARAMETER Experiment Name: At_Germinating_Seeds_cDNA_P Parameter: Age (day) Value: 3 vs. 0
  misc_feature: MA Experiment 108463 PARAMETER Experiment Name: At_Germinating_Seeds_cDNA_P Parameter: Tissue Value: Germinating Seeds
  misc_feature: MA Experiment ID: 108464 Result: Down-regulated in Transcription
  misc_feature: MA Experiment 108464 PARAMETER Experiment Name: At_Germinating_Seeds_cDNA_P Parameter: Age (day) Value: 4 vs. 0
  misc_feature: MA Experiment 108464 PARAMETER Experiment Name: At_Germinating_Seeds_cDNA_P Parameter: Tissue Value: Germinating Seeds
  misc_feature: MA Experiment ID: 108488 Result: Up-regulated in Transcription
  misc_feature: MA Experiment ID: 108573 Result: Down-regulated in Transcription
  misc_feature: MA Experiment 108573 PARAMETER Experiment Name: At_Drought_cDNA_P Parameter: Timepoint (hr) Value: 6
  misc_feature: MA Experiment 108573 PARAMETER Experiment Name: At_Drought_cDNA_P Parameter: Tissue Value: Aerial
  misc_feature: MA Experiment 108573 PARAMETER Experiment Name: At_Drought_cDNA_P Parameter: Treatment Value: Drought vs. No Drought
  misc_feature: MA Experiment ID: 108595 Result: Down-regulated in Transcription
  misc_feature: MA Experiment 108595 PARAMETER Experiment Name: At_Ler-pi_Ovule_cDNA_P Parameter: Plant Line Value: null
  misc_feature: MA Experiment ID: 20000111 Result: Up-regulated in Transcription
  misc_feature: MA Experiment 20000111 PARAMETER Experiment Name: At_42deg_Heat_cDNA_P Parameter: Temperature (deg C) Value: 42 vs. 22
  misc_feature: MA Experiment 20000111 PARAMETER Experiment Name: At_42deg_Heat_cDNA_P Parameter: Timepoint (hr) Value: 6
  misc_feature: MA Experiment 20000111 PARAMETER Experiment Name: At_42deg_Heat_cDNA_P Parameter: Tissue Value: Aerial
  misc_feature: Pfam Name: Ribosomal_L30_N Pfam Description: Ribosomal L30 N-terminal domain
gttttgtcctccttctacgccgcacactatctcttcctctctctcagacgagatttcctcttcatctcaagagaaatggctgaatccaaggtagtggttccagagtctgtgctaaagaagatcaagaggcaagaggaatgggcattggccaagaaagatgaagctgtagctgctaagaagaagagtgttgaggcccgcaagcttatcttcaagagagctgagcagtatgccaaagaatacgctgagaaggataacgagttgatccgattgaagcgggaggctaagttgaaaggaggtttctacgttgaccctgaggctaagttgctctttatcattcgtatccgtggtatcaatgccattgacccaaaaaccaagaagattctgcagctcctgcgtttgagacaggtaggtttcacagtttgttattttcatccagctatattagcctaacatatgattattgattaatatttgttatatgttcaaactaatatgtgatagttgcctgttcatcatttttaaaagagagtagaagactattgcgttgtcaagaagtttactttcgtatacatttgtgcagatcttcaatggtgtgtttcttaaggtgaacaaggcaacagtaaacatgctgcgccgagttgaaccatacgtgacttacggatacccaaacttgaagagcgttaaggaactgatctacaaaagaggttatggaaagctgaaccaccagaggatagcacttactgacaactccattgtggatcaggctctcggaaagcatgggatcatctgcgttgaggatctcatccacgagatcatgactgttggacctcacttcaaggaagccaacaacttcctgtggccattccaattgaaggcaccactcggtggccttaagaagaagagaaaccactacgtcgaaggtggtgatgctggaaacagggagaatttcatcaacgagcttgtcaggagaatgaattgatgaaagcttccttctttatctttgcaaatttcaaagattttgggaccgagtttttttttttttgttcaagttatcagagacttgtgatcttttatccgagataggc

SEQ ID NO: 74688 - protein, 149 aa, Arabidopsis thaliana
  peptide (1)..(149): Ceres Seq. ID no. 5679073
  misc_feature: Pfam Name: Ribosomal_L30_N Pfam Description: Ribosomal L30 N-terminal domain
  misc_feature (25)..(136): Homolog of NCBI NO: 30689623 NR Description: 60S ribosomal protein L7 (RPL7C) [Arabidopsis >gi|6174958|sp|Q42208|RL7_ARATH 60S ribosomal protein L7
  misc_feature (26)..(136): Homolog of NCBI NO: 30689617 NR Description: 60S ribosomal protein L7 (RPL7C) [Arabidopsis >gi|15450713|gb|AAK96628.1| At2g44120/F6E13.25 [Arabidopsis >gi|17386142|gb|AAL38617.1|AF446884_1 At2g44120/F6E13.25
  misc_feature (26)..(136): Homolog of NCBI NO: 27311547 NR Description: Unknown protein [Arabidopsis thaliana]
  misc_feature (26)..(136): Homolog of NCBI NO: 15226212 NR Description: putative ribosomal protein L7; protein id: supported by cDNA: 13298., supported by cDNA: gi_13877566, by cDNA: gi_15028382, supported by cDNA: gi_19310656, supported
  misc_feature (27)..(136): Homolog of NCBI NO: 15231288 NR Description: ribosomal protein, putative; protein id: supported by cDNA: gi_14532551, supported by cDNA: gi_15810195, by cDNA: gi_18655394 [Arabidopsis thaliana]
  misc_feature (26)..(136): Homolog of NCBI NO: 445613 NR Description: ribosomal protein L7
  misc_feature (22)..(136): Homolog of NCBI NO: 38637548 NR Description: putative 60S ribosomal protein L7 [Oryza sativa
  misc_feature (29)..(136): Homolog of NCBI NO: 38346542 NR Description: OSJNBa0035M09.3 [Oryza sativa (japonica
  misc_feature (33)..(136): Homolog of NCBI NO: 28630259 NR Description: ribosomal protein L7 [Branchiostoma lanceolatum]
  misc_feature (28)..(136): Homolog of NCBI NO: 32416114 NR Description: hypothetical protein [Neurospora crassa]
VLSSFYAAHYLFLSLRRDFLFISREMAESKVVVPESVLKKIKRQEEWALAKKDEAVAAKKKSVEARKLIFKRAEQYAKEYAEKDNELIRLKREAKLKGGFYVDPEAKLLFIIRIRGINAIDPKTKKILQLLRLRQVGFTVCYFHPAILA

SEQ ID NO: 74689 - protein, 124 aa, Arabidopsis thaliana; identical to SEQ ID NO: 21660
  peptide (1)..(124): Ceres Seq. ID no. 5679074
  misc_feature: Pfam Name: Ribosomal_L30_N Pfam Description: Ribosomal L30 N-terminal domain
  misc_feature (1)..(111): Homolog of NCBI NO: 30689623 NR Description: 60S ribosomal protein L7 (RPL7C) [Arabidopsis >gi|6174958|sp|Q42208|RL7_ARATH 60S ribosomal protein L7
  misc_feature (1)..(111): Homolog of NCBI NO: 30689617 NR Description: 60S ribosomal protein L7 (RPL7C) [Arabidopsis >gi|15450713|gb|AAK96628.1| At2g44120/F6E13.25 [Arabidopsis >gi|17386142|gb|AAL38617.1|AF446884_1 At2g44120/F6E13.25
  misc_feature (1)..(111): Homolog of NCBI NO: 27311547 NR Description: Unknown protein [Arabidopsis thaliana]
  misc_feature (1)..(111): Homolog of NCBI NO: 15226212 NR Description: putative ribosomal protein L7; protein id: supported by cDNA: 13298., supported by cDNA: gi_13877566, by cDNA: gi_15028382, supported by cDNA: gi_19310656, supported
  misc_feature (2)..(111): Homolog of NCBI NO: 15231288 NR Description: ribosomal protein, putative; protein id: supported by cDNA: gi_14532551, supported by cDNA: gi_15810195, by cDNA: gi_18655394 [Arabidopsis thaliana]
  misc_feature (1)..(111): Homolog of NCBI NO: 445613 NR Description: ribosomal protein L7
  misc_feature (1)..(111): Homolog of NCBI NO: 38637548 NR Description: putative 60S ribosomal protein L7 [Oryza sativa
  misc_feature (4)..(111): Homolog of NCBI NO: 38346542 NR Description: OSJNBa0035M09.3 [Oryza sativa (japonica
  misc_feature (8)..(111): Homolog of NCBI NO: 28630259 NR Description: ribosomal protein L7 [Branchiostoma lanceolatum]
  misc_feature (3)..(111): Homolog of NCBI NO: 32416114 NR Description: hypothetical protein [Neurospora crassa]

SEQ ID NO: 74690 - protein, 117 aa, Arabidopsis thaliana; identical to SEQ ID NO: 21661
  peptide (1)..(117): Ceres Seq. ID no. 5679075
  misc_feature: Pfam Name: Ribosomal_L30_N Pfam Description: Ribosomal L30 N-terminal domain
  misc_feature (1)..(117): Homolog of NCBI NO: 30689623 NR Description: 60S ribosomal protein L7 (RPL7C) [Arabidopsis >gi|6174958|sp|Q42208|RL7_ARATH 60S ribosomal protein L7
  misc_feature (1)..(117): Homolog of NCBI NO: 30689617 NR Description: 60S ribosomal protein L7 (RPL7C) [Arabidopsis >gi|15450713|gb|AAK96628.1| At2g44120/F6E13.25 [Arabidopsis >gi|17386142|gb|AAL38617.1|AF446884_1 At2g44120/F6E13.25
  misc_feature (1)..(117): Homolog of NCBI NO: 27311547 NR Description: Unknown protein [Arabidopsis thaliana]
  misc_feature (1)..(117): Homolog of NCBI NO: 15226212 NR Description: putative ribosomal protein L7; protein id: supported by cDNA: 13298., supported by cDNA: gi_13877566, by cDNA: gi_15028382, supported by cDNA: gi_19310656, supported
  misc_feature (1)..(117): Homolog of NCBI NO: 15231288 NR Description: ribosomal protein, putative; protein id: supported by cDNA: gi_14532551, supported by cDNA: gi_15810195, by cDNA: gi_18655394 [Arabidopsis thaliana]
  misc_feature (1)..(117): Homolog of NCBI NO: 445613 NR Description: ribosomal protein L7
  misc_feature (1)..(117): Homolog of NCBI NO: 38346542 NR Description: OSJNBa0035M09.3 [Oryza sativa (japonica
  misc_feature (1)..(117): Homolog of NCBI NO: 38637548 NR Description: putative 60S ribosomal protein L7 [Oryza sativa
  misc_feature (1)..(116): Homolog of NCBI NO: 28630259 NR Description: ribosomal protein L7 [Branchiostoma lanceolatum]
  misc_feature (1)..(117): Homolog of NCBI NO: 32416114 NR Description: hypothetical protein [Neurospora crassa]

SEQ ID NO: 74691 - DNA, 1355 bp, Arabidopsis thaliana
  misc_feature (1)..(1355): Ceres Seq. ID no. 5679154
  misc_feature: MA Experiment ID: 108434 Result: Down-regulated in Transcription
  misc_feature: MA Experiment 108434 PARAMETER Experiment Name: At_Root_Tips_cDNA_P Parameter: Tissue Value: Root Tips
  misc_feature: MA Experiment ID: 108435 Result: Down-regulated in Transcription
  misc_feature: MA Experiment 108435 PARAMETER Experiment Name: At_stm_Mutants_cDNA_P Parameter: Plant Line Value: wt Landsburg vs stm
  misc_feature: MA Experiment 108435 PARAMETER Experiment Name: At_stm_Mutants_cDNA_P Parameter: Tissue Value: Shoot Apical Meristem Region
  misc_feature: MA Experiment ID: 108461 Result: Down-regulated in Transcription
  misc_feature: MA Experiment 108461 PARAMETER Experiment Name: At_Germinating_Seeds_cDNA_P Parameter: Age (day) Value: 1 vs. 0
  misc_feature: MA Experiment 108461 PARAMETER Experiment Name: At_Germinating_Seeds_cDNA_P Parameter: Tissue Value: Germinating Seeds
  misc_feature: MA Experiment ID: 108462 Result: Down-regulated in Transcription
  misc_feature: MA Experiment 108462 PARAMETER Experiment Name: At_Germinating_Seeds_cDNA_P Parameter: Age (day) Value: 2 vs. 0
  misc_feature: MA Experiment 108462 PARAMETER Experiment Name: At_Germinating_Seeds_cDNA_P Parameter: Tissue Value: Germinating Seeds
  misc_feature: MA Experiment ID: 108488 Result: Down-regulated in Transcription
  misc_feature: MA Experiment ID: 108577 Result: Down-regulated in Transcription
  misc_feature: MA Experiment 108577 PARAMETER Experiment Name: At_42deg_Heat_cDNA_P Parameter: Temperature (deg C) Value: 42 vs. 22
  misc_feature: MA Experiment 108577 PARAMETER Experiment Name: At_42deg_Heat_cDNA_P Parameter: Timepoint (hr) Value: 6
  misc_feature: MA Experiment 108577 PARAMETER Experiment Name: At_42deg_Heat_cDNA_P Parameter: Tissue Value: Aerial
  misc_feature: MA Experiment ID: 108607 Result: Up-regulated in Transcription
  misc_feature: MA Experiment 108607 PARAMETER Experiment Name: At_100uM_ABA_cDNA_P Parameter: Timepoint (hr) Value: 4
  misc_feature: MA Experiment 108607 PARAMETER Experiment Name: At_100uM_ABA_cDNA_P Parameter: Tissue Value: Aerial
  misc_feature: MA Experiment 108607 PARAMETER Experiment Name: At_100uM_ABA_cDNA_P Parameter: Treatment Value: 100uM ABA vs. No Treatment
  misc_feature: MA Experiment ID: 20000069 Result: Up-regulated in Transcription
  misc_feature: MA Experiment 20000069 PARAMETER Experiment Name: At_100uM_ABA_Mutants_cDNA_P Parameter: Plant Line Value: CS23
  misc_feature: MA Experiment 20000069 PARAMETER Experiment Name: At_100uM_ABA_Mutants_cDNA_P Parameter: Timepoint (hr) Value: 6
  misc_feature: MA Experiment 20000069 PARAMETER Experiment Name: At_100uM_ABA_Mutants_cDNA_P Parameter: Tissue Value: Aerial
  misc_feature: MA Experiment 20000069 PARAMETER Experiment Name: At_100uM_ABA_Mutants_cDNA_P Parameter: Treatment Value: 100uM ABA vs. No Treatment
  misc_feature: MA Experiment ID: 20000070 Result: Up-regulated in Transcription
  misc_feature: MA Experiment 20000070 PARAMETER Experiment Name: At_100uM_ABA_Mutants_cDNA_P Parameter: Plant Line Value: CS24
  misc_feature: MA Experiment 20000070 PARAMETER Experiment Name: At_100uM_ABA_Mutants_cDNA_P Parameter: Timepoint (hr) Value: 6
  misc_feature: MA Experiment 20000070 PARAMETER Experiment Name: At_100uM_ABA_Mutants_cDNA_P Parameter: Tissue Value: Aerial
  misc_feature: MA Experiment 20000070 PARAMETER Experiment Name: At_100uM_ABA_Mutants_cDNA_P Parameter: Treatment Value: 100uM ABA vs. No Treatment
  misc_feature: MA Experiment ID: 20000071 Result: Up-regulated in Transcription
  misc_feature: MA Experiment 20000071 PARAMETER Experiment Name: At_100uM_ABA_Mutants_cDNA_P Parameter: Plant Line Value: CS8104
  misc_feature: MA Experiment 20000071 PARAMETER Experiment Name: At_100uM_ABA_Mutants_cDNA_P Parameter: Timepoint (hr) Value: 6
  misc_feature: MA Experiment 20000071 PARAMETER Experiment Name: At_100uM_ABA_Mutants_cDNA_P Parameter: Tissue Value: Aerial
  misc_feature: MA Experiment 20000071 PARAMETER Experiment Name: At_100uM_ABA_Mutants_cDNA_P Parameter: Treatment Value: 100uM ABA vs. No Treatment
  misc_feature: MA Experiment ID: 20000086 Result: Up-regulated in Transcription
  misc_feature: MA Experiment 20000086 PARAMETER Experiment Name: At_100uM_ABA_Mutants_cDNA_P Parameter: Plant Line Value: CS22
  misc_feature: MA Experiment 20000086 PARAMETER Experiment Name: At_100uM_ABA_Mutants_cDNA_P Parameter: Timepoint (hr) Value: 6
  misc_feature: MA Experiment 20000086 PARAMETER Experiment Name: At_100uM_ABA_Mutants_cDNA_P Parameter: Tissue Value: Aerial
  misc_feature: MA Experiment 20000086 PARAMETER Experiment Name: At_100uM_ABA_Mutants_cDNA_P Parameter: Treatment Value: 100uM ABA vs. No Treatment
  misc_feature: MA Experiment ID: 20000087 Result: Up-regulated in Transcription
  misc_feature: MA Experiment 20000087 PARAMETER Experiment Name: At_100uM_ABA_Mutants_cDNA_P Parameter: Plant Line Value: WS
  misc_feature: MA Experiment 20000087 PARAMETER Experiment Name: At_100uM_ABA_Mutants_cDNA_P Parameter: Timepoint (hr) Value: 6
  misc_feature: MA Experiment 20000087 PARAMETER Experiment Name: At_100uM_ABA_Mutants_cDNA_P Parameter: Tissue Value: Aerial
  misc_feature: MA Experiment 20000087 PARAMETER Experiment Name: At_100uM_ABA_Mutants_cDNA_P Parameter: Treatment Value: 100uM ABA vs. No Treatment
  misc_feature: MA Experiment ID: 20000089 Result: Up-regulated in Transcription
  misc_feature: MA Experiment ID: 20000090 Result: Up-regulated in Transcription
  misc_feature: MA Experiment ID: 20000111 Result: Down-regulated in Transcription
  misc_feature: MA Experiment 20000111 PARAMETER Experiment Name: At_42deg_Heat_cDNA_P Parameter: Temperature (deg C) Value: 42 vs. 22
  misc_feature: MA Experiment 20000111 PARAMETER Experiment Name: At_42deg_Heat_cDNA_P Parameter: Timepoint (hr) Value: 6
  misc_feature: MA Experiment 20000111 PARAMETER Experiment Name: At_42deg_Heat_cDNA_P Parameter: Tissue Value: Aerial
  misc_feature: MA Experiment ID: 20000117 Result: Up-regulated in Transcription
  misc_feature: MA Experiment 20000117 PARAMETER Experiment Name: At_100uM_ABA_Mutants_cDNA_P Parameter: Plant Line Value: Columbia
  misc_feature: MA Experiment 20000117 PARAMETER Experiment Name: At_100uM_ABA_Mutants_cDNA_P Parameter: Timepoint (hr) Value: 6
  misc_feature: MA Experiment 20000117 PARAMETER Experiment Name: At_100uM_ABA_Mutants_cDNA_P Parameter: Tissue Value: Aerial
  misc_feature: MA Experiment 20000117 PARAMETER Experiment Name: At_100uM_ABA_Mutants_cDNA_P Parameter: Treatment Value: 100uM ABA vs. No Treatment
  misc_feature: MA Experiment ID: 20000173 Result: Down-regulated in Transcription
  misc_feature: MA Experiment 20000173 PARAMETER Experiment Name: At_42deg_Heat_P Parameter: Age (day) Value: 14
  misc_feature: MA Experiment 20000173 PARAMETER Experiment Name: At_42deg_Heat_P Parameter: Organism Value: A. thaliana
  misc_feature: MA Experiment 20000173 PARAMETER Experiment Name: At_42deg_Heat_P Parameter: Plant Line Value: WS
  misc_feature: MA Experiment 20000173 PARAMETER Experiment Name: At_42deg_Heat_P Parameter: Temperature (deg C) Value: 42 vs. 22
  misc_feature: MA Experiment 20000173 PARAMETER Experiment Name: At_42deg_Heat_P Parameter: Timepoint (hr) Value: 6
  misc_feature: MA Experiment 20000173 PARAMETER Experiment Name: At_42deg_Heat_P Parameter: Tissue Value: Aerial
  misc_feature: MA Experiment ID: 20000179 Result: Down-regulated in Transcription
  misc_feature: MA Experiment 20000179 PARAMETER Experiment Name: At_Germinating_Seeds_P Parameter: Age (hr) Value: 6 vs. 0
  misc_feature: MA Experiment 20000179 PARAMETER Experiment Name: At_Germinating_Seeds_P Parameter: Tissue Value: Germinating Seeds
  misc_feature: MA Experiment ID: 20000180 Result: Down-regulated in Transcription
  misc_feature: MA Experiment 20000180 PARAMETER Experiment Name: At_Germinating_Seeds_P Parameter: Age (hr) Value: 24 vs. 0
  misc_feature: MA Experiment 20000180 PARAMETER Experiment Name: At_Germinating_Seeds_P Parameter: Tissue Value: Germinating Seeds
  misc_feature: MA Experiment ID: 20000184 Result: Down-regulated in Transcription
  misc_feature: MA Experiment 20000184 PARAMETER Experiment Name: At_Shoots__P Parameter: Age (day) Value: 7
  misc_feature: MA Experiment 20000184 PARAMETER Experiment Name: At_Shoots__P Parameter: Tissue Value: Shoots vs. Whole Plant
  misc_feature: MA Experiment ID: 20000227 Result: Down-regulated in Transcription
  misc_feature: MA Experiment 20000227 PARAMETER Experiment Name: At_Root-Tips-vs-Tops_P Parameter: Tissue Value: Root Tips vs. Root Tops
  misc_feature: MA Experiment ID: 20000437 Result: Up-regulated in Transcription
  misc_feature: MA Experiment 20000437 PARAMETER Experiment Name: At_Drought_P Parameter: Age (day) Value: 8
  misc_feature: MA Experiment 20000437 PARAMETER Experiment Name: At_Drought_P Parameter: Organism Value: A. thaliana
  misc_feature: MA Experiment 20000437 PARAMETER Experiment Name: At_Drought_P Parameter: Plant Line Value: WS
  misc_feature: MA Experiment 20000437 PARAMETER Experiment Name: At_Drought_P Parameter: Timepoint (hr) Value: 24
  misc_feature: MA Experiment 20000437 PARAMETER Experiment Name: At_Drought_P Parameter: Tissue Value: Whole Plant
  misc_feature: MA Experiment 20000437 PARAMETER Experiment Name: At_Drought_P Parameter: Treatment Value: Drought vs. No Drought
  misc_feature: MA Experiment ID: 20000438 Result: Down-regulated in Transcription
  misc_feature: MA Experiment 20000438 PARAMETER Experiment Name: At_Shoots__P Parameter: Age (day) Value: 14
  misc_feature: MA Experiment 20000438 PARAMETER Experiment Name: At_Shoots__P Parameter: Tissue Value: Shoots vs. Whole Plant
  misc_feature: MA Experiment ID: 20000794 Result: Up-regulated in Transcription
  misc_feature: MA Experiment 20000794 PARAMETER Experiment Name: At_Petals_P Parameter: Age (day) Value: 23-25 days
  misc_feature: MA Experiment 20000794 PARAMETER Experiment Name: At_Petals_P Parameter: Plant Line Value: WS
  misc_feature: MA Experiment 20000794 PARAMETER Experiment Name: At_Petals_P Parameter: Tissue Value: Petals vs. Whole plant
  misc_feature: MA Experiment ID: 20001557 Result: Down-regulated in Transcription
  misc_feature: MA Experiment 20001557 PARAMETER Experiment Name: At_Drought_Soil_Dry_P Parameter: Age (day) Value: 27
  misc_feature: MA Experiment 20001557 PARAMETER Experiment Name: At_Drought_Soil_Dry_P Parameter: Organism Value: A. thaliana
  misc_feature: MA Experiment 20001557 PARAMETER Experiment Name: At_Drought_Soil_Dry_P Parameter: Plant Line Value: WS
  misc_feature: MA Experiment 20001557 PARAMETER Experiment Name: At_Drought_Soil_Dry_P Parameter: Post Timepoint (hr) Value: 3
  misc_feature: MA Experiment 20001557 PARAMETER Experiment Name: At_Drought_Soil_Dry_P Parameter: Post-Treatment Value: Re-Water vs. No Drought
  misc_feature: MA Experiment 20001557 PARAMETER Experiment Name: At_Drought_Soil_Dry_P Parameter: Timepoint (day) Value: 13
  misc_feature: MA Experiment 20001557 PARAMETER Experiment Name: At_Drought_Soil_Dry_P Parameter: Treatment Value: Drought vs. No Drought
  misc_feature: MA Experiment ID: 20001558 Result: Down-regulated in Transcription
  misc_feature: MA Experiment 20001558 PARAMETER Experiment Name: At_Drought_Soil_Dry_P Parameter: Age (day) Value: 27
  misc_feature: MA Experiment 20001558 PARAMETER Experiment Name: At_Drought_Soil_Dry_P Parameter: Organism Value: A. thaliana
  misc_feature: MA Experiment 20001558 PARAMETER Experiment Name: At_Drought_Soil_Dry_P Parameter: Plant Line Value: WS
  misc_feature: MA Experiment 20001558 PARAMETER Experiment Name: At_Drought_Soil_Dry_P Parameter: Post Timepoint (hr) Value: 6
  misc_feature: MA Experiment 20001558 PARAMETER Experiment Name: At_Drought_Soil_Dry_P Parameter: Post-Treatment Value: Re-Water vs. No Drought
  misc_feature: MA Experiment 20001558 PARAMETER Experiment Name: At_Drought_Soil_Dry_P Parameter: Timepoint (day) Value: 13
  misc_feature: MA Experiment 20001558 PARAMETER Experiment Name: At_Drought_Soil_Dry_P Parameter: Treatment Value: Drought vs. No Drought
  misc_feature: MA Experiment ID: 20001757 Result: Down-regulated in Transcription
  misc_feature: MA Experiment 20001757 PARAMETER Experiment Name: At_50mM_NH4NO3_L-to-H_P Parameter: Timepoint (hr) Value: 6
  misc_feature: MA Experiment 20001757 PARAMETER Experiment Name: At_50mM_NH4NO3_L-to-H_P Parameter: Tissue Value: Leaf
  misc_feature: MA Experiment 20001757 PARAMETER Experiment Name: At_50mM_NH4NO3_L-to-H_P Parameter: Treatment Value: 50mM NH4NO3 vs 100mM Mannitol
gtcgctttagcttctccggtttttaagcaagtaatcttctttcgtctctatcttctttacttgattgcttattcatctgttgattctgtggttaggtttgattcttctggctctgttttgttctgtttttggtgtttaattcttcttagcaagcaagtaatattcgatcgtcactgtttttgctttgattttgtgatttctctatcaaagattagaactttacgtgaccctttaagcgatcaacaattatctcactgttttttcagataagggtatatgagtttgttggacatgggtggagatatgatggaagatgattgggaatttgcgtcatcatcaaaccctaaaagaaccctagttcttgtgggccgtactggaaacggaaagagtgcgacaggtaacagtatccttgggaggaaagcttttaggtcaagagctagaactgtaggagtgacaagcacgtgcgagtcacagagagttgttcaagaagatggtgatatcattaatgttgttgatactcctggtttgtttgatttgtctactgcagctgattttattggtaaagagattgtgaggtgtataagtttggcagaagatgggattcatgcgatcttgttggtattctctgtgaggcggcttgctgaagaggagcaaactgtgcttagtttcttgcaagcgctattcggcagtaagatcgctgactatatgatcgttgtttttaccggtggcgatgagttggaagagaatgaggagacattggaggagtatttggctgactattgccctgagtttcttaaagaaattcttgggatatgtgacaatcggttggtgttgtttaataacaagactactgataaggtgaagaaagctgagcaagttcagaagcttctctcacttgttgaatctgttgttaaacagaacaatggaaaaccgtattcagatgagttgttccatgagctacaggaagaggctatcaagctaagggaccagaaaaaggaggttgagttacttcagggttactctaataatgagatagatgagttcaagaagcaaatcgatatgtcctatgataggcagcttagccgcatcaccgagatggtggagactaagctgagagacactgctaagagactagagcagcaactaggtgaagagcaagctgcaagacttgaagcggagaagagggcaaacgaagttcagaagcggtcgagcgatgagattaagaagctcagagagaatctggagagggcggaaaaagagacgaaggaacttcagaaaaaactgggaaagtgcatcaatctatgatatgttgagatgttgtagctccagtgaaatctgataagatcattcatgtc

SEQ ID NO: 74692 - protein, 342 aa, Arabidopsis thaliana; identical to SEQ ID NO: 23839
  peptide (1)..(342): Ceres Seq. ID no. 5679155
  misc_feature (25)..(239): Pfam Name: AIG1 family Pfam Description: AIG1 family
  misc_feature (1)..(342): Homolog of NCBI NO: 18399081 NR Description: expressed protein; protein id: At1g33970.1,
  misc_feature (6)..(342): Homolog of NCBI NO: 25373414 NR Description: hypothetical protein F12G12.21 - Arabidopsis >gi|10086478|gb|AAG12538.1|AC015446_19 Similar to AIG1 protein thaliana] >gi|10092443|gb|AAG12846.1|AC079286_3 disease
  misc_feature (6)..(342): Homolog of NCBI NO: 24417378 NR Description: unknown [Arabidopsis thaliana]
  misc_feature (49)..(342): Homolog of NCBI NO: 12324509 NR Description: AIG1-like protein, 5' partial; 1-1205
  misc_feature (6)..(333): Homolog of NCBI NO: 4097585 NR Description: NTGP4 [Nicotiana tabacum]
  misc_feature (3)..(338): Homolog of NCBI NO: 15234871 NR Description: AIG1-like protein; protein id: At4g09950.1
  misc_feature (8)..(330): Homolog of NCBI NO: 15234855 NR Description: AIG1-like protein; protein id: At4g09940.1
  misc_feature (16)..(335): Homolog of NCBI NO: 15217731 NR Description: AIG1; protein id: At1g33960.1, supported by cDNA: [Arabidopsis thaliana] >gi|1703219|sp|P54120|AIG1_ARATH AIG1 >gi|1127804|gb|AAC49282.1| AIG1
  misc_feature (16)..(335): Homolog of NCBI NO: 10092442 NR Description: disease resistance protein AIG1; 916-2572
  misc_feature (11)..(314): Homolog of NCBI NO: 15217719 NR Description: AIG1-like protein; protein id: At1g33900.1

SEQ ID NO: 74693 - protein, 337 aa, Arabidopsis thaliana; identical to SEQ ID NO: 23840
  peptide (1)..(337): Ceres Seq. ID no. 5679156
  misc_feature (20)..(234): Pfam Name: AIG1 family Pfam Description: AIG1 family
  misc_feature (1)..(337): Homolog of NCBI NO: 18399081 NR Description: expressed protein; protein id: At1g33970.1,
  misc_feature (1)..(337): Homolog of NCBI NO: 25373414 NR Description: hypothetical protein F12G12.21 - Arabidopsis >gi|10086478|gb|AAG12538.1|AC015446_19 Similar to AIG1 protein thaliana] >gi|10092443|gb|AAG12846.1|AC079286_3 disease
  misc_feature (1)..(337): Homolog of NCBI NO: 24417378 NR Description: unknown [Arabidopsis thaliana]
  misc_feature (44)..(337): Homolog of NCBI NO: 12324509 NR Description: AIG1-like protein, 5' partial; 1-1205
  misc_feature (1)..(328): Homolog of NCBI NO: 4097585 NR Description: NTGP4 [Nicotiana tabacum]
  misc_feature (1)..(333): Homolog of NCBI NO: 15234871 NR Description: AIG1-like protein; protein id: At4g09950.1
  misc_feature (3)..(325): Homolog of NCBI NO: 15234855 NR Description: AIG1-like protein; protein id: At4g09940.1
  misc_feature (11)..(330): Homolog of NCBI NO: 15217731 NR Description: AIG1; protein id: At1g33960.1, supported by cDNA: [Arabidopsis thaliana] >gi|1703219|sp|P54120|AIG1_ARATH AIG1 >gi|1127804|gb|AAC49282.1| AIG1
  misc_feature (11)..(330): Homolog of NCBI NO: 10092442 NR Description: disease resistance protein AIG1; 916-2572
  misc_feature (6)..(309): Homolog of NCBI NO: 15217719 NR Description: AIG1-like protein; protein id: At1g33900.1

SEQ ID NO: 74694 - protein, 333 aa, Arabidopsis thaliana; identical to SEQ ID NO: 23841
  peptide (1)..(333): Ceres Seq. ID no. 5679157
  misc_feature (16)..(230): Pfam Name: AIG1 family Pfam Description: AIG1 family
  misc_feature (1)..(333): Homolog of NCBI NO: 18399081 NR Description: expressed protein; protein id: At1g33970.1,
  misc_feature (1)..(333): Homolog of NCBI NO: 25373414 NR Description: hypothetical protein F12G12.21 - Arabidopsis >gi|10086478|gb|AAG12538.1|AC015446_19 Similar to AIG1 protein thaliana] >gi|10092443|gb|AAG12846.1|AC079286_3 disease
  misc_feature (1)..(333): Homolog of NCBI NO: 24417378 NR Description: unknown [Arabidopsis thaliana]
  misc_feature (40)..(333): Homolog of NCBI NO: 12324509 NR Description: AIG1-like protein, 5' partial; 1-1205
  misc_feature (1)..(324): Homolog of NCBI NO: 4097585 NR Description: NTGP4 [Nicotiana tabacum]
  misc_feature (1)..(329): Homolog of NCBI NO: 15234871 NR Description: AIG1-like protein; protein id: At4g09950.1
  misc_feature (1)..(321): Homolog of NCBI NO: 15234855 NR Description: AIG1-like protein; protein id: At4g09940.1
  misc_feature (7)..(326): Homolog of NCBI NO: 15217731 NR Description: AIG1; protein id: At1g33960.1, supported by cDNA: [Arabidopsis thaliana] >gi|1703219|sp|P54120|AIG1_ARATH AIG1 >gi|1127804|gb|AAC49282.1| AIG1
  misc_feature (7)..(326): Homolog of NCBI NO: 10092442 NR Description: disease resistance protein AIG1; 916-2572
  misc_feature (2)..(305): Homolog of NCBI NO: 15217719 NR Description: AIG1-like protein; protein id: At1g33900.1

SEQ ID NO: 74695 - DNA, 1014 bp, Arabidopsis thaliana
  misc_feature (1)..(1014): Ceres Seq. ID no. 5679158
  misc_feature: MA Experiment ID: 108462 Result: Down-regulated in Transcription
  misc_feature: MA Experiment 108462 PARAMETER Experiment Name: At_Germinating_Seeds_cDNA_P Parameter: Age (day) Value: 2 vs. 0
  misc_feature: MA Experiment 108462 PARAMETER Experiment Name: At_Germinating_Seeds_cDNA_P Parameter: Tissue Value: Germinating Seeds
  misc_feature: MA Experiment ID: 108463 Result: Down-regulated in Transcription
  misc_feature: MA Experiment 108463 PARAMETER Experiment Name: At_Germinating_Seeds_cDNA_P Parameter: Age (day) Value: 3 vs. 0
  misc_feature: MA Experiment 108463 PARAMETER Experiment Name: At_Germinating_Seeds_cDNA_P Parameter: Tissue Value: Germinating Seeds
  misc_feature: MA Experiment ID: 108464 Result: Down-regulated in Transcription
  misc_feature: MA Experiment 108464 PARAMETER Experiment Name: At_Germinating_Seeds_cDNA_P Parameter: Age (day) Value: 4 vs. 0
  misc_feature: MA Experiment 108464 PARAMETER Experiment Name: At_Germinating_Seeds_cDNA_P Parameter: Tissue Value: Germinating Seeds
  misc_feature: MA Experiment ID: 108488 Result: Down-regulated in Transcription
  misc_feature: MA Experiment ID: 108573 Result: Up-regulated in Transcription
  misc_feature: MA Experiment 108573 PARAMETER Experiment Name: At_Drought_cDNA_P Parameter: Timepoint (hr) Value: 6
  misc_feature: MA Experiment 108573 PARAMETER Experiment Name: At_Drought_cDNA_P Parameter: Tissue Value: Aerial
  misc_feature: MA Experiment 108573 PARAMETER Experiment Name: At_Drought_cDNA_P Parameter: Treatment Value: Drought vs. No Drought
  misc_feature: MA Experiment ID: 108579 Result: Down-regulated in Transcription
  misc_feature: MA Experiment 108579 PARAMETER Experiment Name: At_4deg_Cold_cDNA_P Parameter: Temperature (deg C) Value: 4 vs. 22
  misc_feature: MA Experiment 108579 PARAMETER Experiment Name: At_4deg_Cold_cDNA_P Parameter: Timepoint (hr) Value: 6
  misc_feature: MA Experiment 108579 PARAMETER Experiment Name: At_4deg_Cold_cDNA_P Parameter: Tissue Value: Aerial
  misc_feature: MA Experiment ID: 20000224 Result: Down-regulated in Transcription
  misc_feature: MA Experiment ID: 20000794 Result: Up-regulated in Transcription
  misc_feature: MA Experiment 20000794 PARAMETER Experiment Name: At_Petals_P Parameter: Age (day) Value: 23-25 days
  misc_feature: MA Experiment 20000794 PARAMETER Experiment Name: At_Petals_P Parameter: Plant Line Value: WS
  misc_feature: MA Experiment 20000794 PARAMETER Experiment Name: At_Petals_P Parameter: Tissue Value: Petals vs. Whole plant
aaacacgcctttatcatagtttctatctccgatgacacaaaacgaggaagattatttgacattttaagctgaattgctctgaaatctcaattgtataatcatctcctgggtcgtcgttatcgtgatcatctagaagaaagcatgactacactagatttgaccagagccgagcttgctcttattgttctctatttgaacaaagctgaggctagagataagatatgcagagctatccaatatggttccaaatttttgagcggtggccaacctggtactgctcaaactgtcgacaaaaacaccagcttggcgagaaaagttttccgtcttttcaagtttgtcaatgattttcacggtcttatcagccccgtgcctaaagggactccacttcctcttgtcttactcgggaagtcgaagaatgcgctcttgtctacctttttgtttcttgatcaaatcgtctggcttggtagatccggcatatacaagaacaaagaacgaactgaattgcttggacgtatatcacttttctgctggctgggatcatccgtttgtacaagtgcagtcgagattggtgagcttggaaggctctcttcatctatgaagaagatggaaaaggaactcaaagctgatgatgagctgtatcgtgctaagcttcagaaatcaaacgacagaactctagctttgattaaatcaagcatggacattattgtagccattggtctccttcagttagctccaaagacgattagtcctcgtgtcactggtgctttcgggtttaccacctcacttatctcttgttatcagttgcttccatcgcgccccaagttgaagacaccttgaagaaggaataagcttgttctctagactttcagaataattgtttcatattcatcagtaaacctattgtgttcaggtattctaaggagtctatgttcctcctttgaatgaatttgctgctcttataacgcgtttgcaagaataatgataagttttagaataagattattatgatacatc

SEQ ID NO: 74696 - protein, 231 aa, Arabidopsis thaliana; identical to SEQ ID NO: 23905
  peptide (1)..(231): Ceres Seq. ID no. 5679159
  misc_feature (11)..(222): Pfam Name: Peroxisomal biogenesis factor 11 (PEX11) Pfam Description: Peroxisomal biogenesis factor 11 (PEX11)
  misc_feature (1)..(231): Homolog of NCBI NO: 30695340 NR Description: expressed protein [Arabidopsis thaliana] unknown protein [Arabidopsis thaliana]
  misc_feature (1)..(231): Homolog of NCBI NO: 11358250 NR Description: hypothetical protein T27I15_160 - Arabidopsis >gi|8388623|emb|CAB94143.1| putative protein [Arabidopsis
  misc_feature (2)..(231): Homolog of NCBI NO: 18406877 NR Description: expressed protein; protein id: At2g45740.1, by cDNA: 12250., supported by cDNA: gi_15450879 [Arabidopsis >gi|15450880|gb|AAK96711.1| Unknown protein [Arabidopsis
  misc_feature (1)..(229): Homolog of NCBI NO: 18378887 NR Description: expressed protein; protein id: At1g01820.1, by cDNA: 28475., supported by cDNA: gi_12083289, supported by gi_17381254, supported by cDNA: gi_20453366 [Arabidopsis
  misc_feature (2)..(221): Homolog of NCBI NO: 7486466 NR Description: hypothetical protein At2g45740 [imported] -
  misc_feature (1)..(229): Homolog of NCBI NO: 8489788 NR Description: unknown [Lycopersicon esculentum]
  misc_feature (1)..(229): Homolog of NCBI NO: 25553559 NR Description: OSJNBa0038F22.7 [Oryza sativa (japonica
  misc_feature (1)..(227): Homolog of NCBI NO: 34898026 NR Description: ESTs AU064537(E31904),AU082147(E31904) correspond a region of the predicted gene.~Similar to Arabidopsis thaliana
  misc_feature (131)..(231): Homolog of NCBI NO: 14335058 NR Description: At2g45740/F4I18.28 [Arabidopsis thaliana]

SEQ ID NO: 74697 - DNA, 656 bp, Arabidopsis thaliana
  misc_feature (1)..(656): Ceres Seq. ID no. 5679166
  misc_feature: MA Experiment ID: 108461 Result: Up-regulated in Transcription
  misc_feature: MA Experiment 108461 PARAMETER Experiment Name: At_Germinating_Seeds_cDNA_P Parameter: Age (day) Value: 1 vs. 0
  misc_feature: MA Experiment 108461 PARAMETER Experiment Name: At_Germinating_Seeds_cDNA_P Parameter: Tissue Value: Germinating Seeds
  misc_feature: MA Experiment ID: 108462 Result: Up-regulated in Transcription
  misc_feature: MA Experiment 108462 PARAMETER Experiment Name: At_Germinating_Seeds_cDNA_P Parameter: Age (day) Value: 2 vs. 0
  misc_feature: MA Experiment 108462 PARAMETER Experiment Name: At_Germinating_Seeds_cDNA_P Parameter: Tissue Value: Germinating Seeds
  misc_feature: MA Experiment ID: 108463 Result: Up-regulated in Transcription
  misc_feature: MA Experiment 108463 PARAMETER Experiment Name: At_Germinating_Seeds_cDNA_P Parameter: Age (day) Value: 3 vs. 0
  misc_feature: MA Experiment 108463 PARAMETER Experiment Name: At_Germinating_Seeds_cDNA_P Parameter: Tissue Value: Germinating Seeds
  misc_feature: MA Experiment ID: 108464 Result: Up-regulated in Transcription
  misc_feature: MA Experiment 108464 PARAMETER Experiment Name: At_Germinating_Seeds_cDNA_P Parameter: Age (day) Value: 4 vs. 0
  misc_feature: MA Experiment 108464 PARAMETER Experiment Name: At_Germinating_Seeds_cDNA_P Parameter: Tissue Value: Germinating Seeds
  misc_feature: MA Experiment ID: 108572 Result: Up-regulated in Transcription
  misc_feature: MA Experiment 108572 PARAMETER Experiment Name: At_Drought_cDNA_P Parameter: Timepoint (hr) Value: 1
  misc_feature: MA Experiment 108572 PARAMETER Experiment Name: At_Drought_cDNA_P Parameter: Tissue Value: Aerial
  misc_feature: MA Experiment 108572 PARAMETER Experiment Name: At_Drought_cDNA_P Parameter: Treatment Value: Drought vs. No Drought
  misc_feature: MA Experiment ID: 108595 Result: Down-regulated in Transcription
  misc_feature: MA Experiment 108595 PARAMETER Experiment Name: At_Ler-pi_Ovule_cDNA_P Parameter: Plant Line Value: null
  misc_feature: MA Experiment ID: 20000224 Result: Up-regulated in Transcription
  misc_feature: Pfam Name: DUF887 Pfam Description: Eukaryotic protein of unknown function (DUF887)
atccttgtaagacgaatcttctcaagctactcgttcgacttcagcacccgtatagtctcaacgcttcacgcaacaatcgctgtcactttagcaactctctcgattcaagattggtcttgtcctgtttgtcccattgcttctacatcgtctctccggcagatggaaacgttggcgttttcattgtcgtacatgatctacgatctcatttgtagccactttgatcaagtccttagcattgataatgcggttcatcattctgtttgcattcttggttttgtagctggacttttctaccaaaagtgtggatccgagatggtggcagcactttggataacagagatctcaagtccgtttcttcacctcagggagattcttaaagagattggttatagagacaccgacctaaatcttgcagccgatgtgtgttttgcaacaattttctcgttggccagaatggtgggtggaccttacctagtttacgtaacaatatcagccgataatcccattctcatcaaggtatatcttaatatatgaatatcagaaattcagaatatgacatacatttcgttttggcttttacttattatcgtttcatcaattgttcatagtttttataaagatgtgaaactttcaaaattgaaaagaatattttgttt

SEQ ID NO: 74698 - protein, 177 aa, Arabidopsis thaliana
  peptide (1)..(177): Ceres Seq. ID no. 5679167
  misc_feature: Pfam Name: DUF887 Pfam Description: Eukaryotic protein of unknown function (DUF887)
  misc_feature (1)..(177): Homolog of NCBI NO: 15219511 NR Description: hypothetical protein; protein id: At1g35170.1
  misc_feature (1)..(172): Homolog of NCBI NO: 30693154 NR Description: expressed protein [Arabidopsis thaliana]
  misc_feature (1)..(141): Homolog of NCBI NO: 25518603 NR Description: hypothetical protein T32G9.28 - Arabidopsis >gi|12320960|gb|AAG50605.1|AC079605_10 hypothetical protein
  misc_feature (1)..(172): Homolog of NCBI NO: 22330031 NR Description: hypothetical protein; protein id: At1g45010.1, by cDNA: gi_17380925 [Arabidopsis thaliana] unknown protein [Arabidopsis thaliana]
  misc_feature (1)..(172): Homolog of NCBI NO: 34903030 NR Description: unnamed protein product [Oryza sativa (japonica group)] >gi|7228458|dbj|BAA92418.1| unnamed protein product
  misc_feature (1)..(53): Homolog of NCBI NO: 25405881 NR Description: protein F27F5.9 [imported] - Arabidopsis thaliana
  misc_feature (98)..(141): Homolog of NCBI NO: 25405881 NR Description: protein F27F5.9 [imported] - Arabidopsis thaliana
  misc_feature (11)..(168): Homolog of NCBI NO: 34535216 NR Description: unnamed protein product [Homo sapiens]
  misc_feature (11)..(168): Homolog of NCBI NO: 27661880 NR Description: hypothetical protein XP_236191 [Rattus norvegicus]
ILVRRIFSSYSFDFSTRIVSTLHATIAVTLATLSIQDWSCPVCPIASTSSLRQMETLAFSLSYMIYDLICSHFDQVLSIDNAVHHSVCILGFVAGLFYQKCGSEMVAALWITEISSPFLHLREILKEIGYRDTDLNLAADVCFATIFSLARMVGGPYLVYVTISADNPILIKVYLNI

SEQ ID NO: 74699 - protein, 124 aa, Arabidopsis thaliana
  peptide (1)..(124): Ceres Seq. ID no. 5679168
  misc_feature: Pfam Name: DUF887 Pfam Description: Eukaryotic protein of unknown function (DUF887)
  misc_feature (1)..(124): Homolog of NCBI NO: 15219511 NR Description: hypothetical protein; protein id: At1g35170.1
  misc_feature (1)..(119): Homolog of NCBI NO: 30693154 NR Description: expressed protein [Arabidopsis thaliana]
  misc_feature (1)..(88): Homolog of NCBI NO: 25518603 NR Description: hypothetical protein T32G9.28 - Arabidopsis >gi|12320960|gb|AAG50605.1|AC079605_10 hypothetical protein
  misc_feature (1)..(119): Homolog of NCBI NO: 22330031 NR Description: hypothetical protein; protein id: At1g45010.1, by cDNA: gi_17380925 [Arabidopsis thaliana] unknown protein [Arabidopsis thaliana]
  misc_feature (1)..(119): Homolog of NCBI NO: 34903030 NR Description: unnamed protein product [Oryza sativa (japonica group)] >gi|7228458|dbj|BAA92418.1| unnamed protein product
  misc_feature (45)..(88): Homolog of NCBI NO: 25405881 NR Description: protein F27F5.9 [imported] - Arabidopsis thaliana
  misc_feature (1)..(115): Homolog of NCBI NO: 34535216 NR Description: unnamed protein product [Homo sapiens]
  misc_feature (1)..(115): Homolog of NCBI NO: 27661880 NR Description: hypothetical protein XP_236191 [Rattus norvegicus]
METLAFSLSYMIYDLICSHFDQVLSIDNAVHHSVCILGFVAGLFYQKCGSEMVAALWITEISSPFLHLREILKEIGYRDTDLNLAADVCFATIFSLARMVGGPYLVYVTISADNPILIKVYLNI

SEQ ID NO: 74700 - protein, 114 aa, Arabidopsis thaliana
  peptide (1)..(114): Ceres Seq. ID no. 5679169
  misc_feature: Pfam Name: DUF887 Pfam Description: Eukaryotic protein of unknown function (DUF887)
  misc_feature (1)..(114): Homolog of NCBI NO: 15219511 NR Description: hypothetical protein; protein id: At1g35170.1
  misc_feature (1)..(109): Homolog of NCBI NO: 30693154 NR Description: expressed protein [Arabidopsis thaliana]
  misc_feature (1)..(78): Homolog of NCBI NO: 25518603 NR Description: hypothetical protein T32G9.28 - Arabidopsis >gi|12320960|gb|AAG50605.1|AC079605_10 hypothetical protein
  misc_feature (1)..(109): Homolog of NCBI NO: 22330031 NR Description: hypothetical protein; protein id: At1g45010.1, by cDNA: gi_17380925 [Arabidopsis thaliana] unknown protein [Arabidopsis thaliana]
  misc_feature (1)..(109): Homolog of NCBI NO: 34903030 NR Description: unnamed protein product [Oryza sativa (japonica group)] >gi|7228458|dbj|BAA92418.1| unnamed protein product
  misc_feature (35)..(78): Homolog of NCBI NO: 25405881 NR Description: protein F27F5.9 [imported] - Arabidopsis thaliana
  misc_feature (1)..(105): Homolog of NCBI NO: 34535216 NR Description: unnamed protein product [Homo sapiens]
  misc_feature (1)..(105): Homolog of NCBI NO: 27661880 NR Description: hypothetical protein XP_236191 [Rattus norvegicus]
MIYDLICSHFDQVLSIDNAVHHSVCILGFVAGLFYQKCGSEMVAALWITEISSPFLHLREILKEIGYRDTDLNLAADVCFATIFSLARMVGGPYLVYVTISADNPILIKVYLNI

SEQ ID NO: 74701 - DNA, 1465 bp, Arabidopsis thaliana
  misc_feature (1)..(1465): Ceres Seq. ID no. 5679191
  misc_feature: MA Experiment ID: 108573 Result: Up-regulated in Transcription
  misc_feature: MA Experiment 108573 PARAMETER Experiment Name: At_Drought_cDNA_P Parameter: Timepoint (hr) Value: 6
  misc_feature: MA Experiment 108573 PARAMETER Experiment Name: At_Drought_cDNA_P Parameter: Tissue Value: Aerial
  misc_feature: MA Experiment 108573 PARAMETER Experiment Name: At_Drought_cDNA_P Parameter: Treatment Value: Drought vs. No Drought
  misc_feature: MA Experiment ID: 108579 Result: Down-regulated in Transcription
  misc_feature: MA Experiment 108579 PARAMETER Experiment Name: At_4deg_Cold_cDNA_P Parameter: Temperature (deg C) Value: 4 vs. 22
  misc_feature: MA Experiment 108579 PARAMETER Experiment Name: At_4deg_Cold_cDNA_P Parameter: Timepoint (hr) Value: 6
  misc_feature: MA Experiment 108579 PARAMETER Experiment Name: At_4deg_Cold_cDNA_P Parameter: Tissue Value: Aerial
  misc_feature: MA Experiment ID: 20000184 Result: Down-regulated in Transcription
  misc_feature: MA Experiment 20000184 PARAMETER Experiment Name: At_Shoots__P Parameter: Age (day) Value: 7
  misc_feature: MA Experiment 20000184 PARAMETER Experiment Name: At_Shoots__P Parameter: Tissue Value: Shoots vs. Whole Plant
  misc_feature: MA Experiment ID: 20000227 Result: Down-regulated in Transcription
  misc_feature: MA Experiment 20000227 PARAMETER Experiment Name: At_Root-Tips-vs-Tops_P Parameter: Tissue Value: Root Tips vs. Root Tops
  misc_feature: MA Experiment ID: 20000495 Result: Up-regulated in Transcription
  misc_feature: MA Experiment 20000495 PARAMETER Experiment Name: At_Guard_Cells_P Parameter: Harvest Date Value: 8/2/2002
  misc_feature: MA Experiment 20000495 PARAMETER Experiment Name: At_Guard_Cells_P Parameter: Organism Value: A. thaliana
  misc_feature: MA Experiment 20000495 PARAMETER Experiment Name: At_Guard_Cells_P Parameter: Tissue Value: Guard Cells vs. Leaves
  misc_feature: MA Experiment ID: 20001248 Result: Up-regulated in Transcription
  misc_feature: MA Experiment 20001248 PARAMETER Experiment Name: At_Far-red-induction_P Parameter: Age (day) Value: 7
  misc_feature: MA Experiment 20001248 PARAMETER Experiment Name: At_Far-red-induction_P Parameter: Light Value: Far-red vs. White
  misc_feature: MA Experiment 20001248 PARAMETER Experiment Name: At_Far-red-induction_P Parameter: Organism Value: A. thaliana
  misc_feature: MA Experiment 20001248 PARAMETER Experiment Name: At_Far-red-induction_P Parameter: Plant Line Value: Columbia
  misc_feature: MA Experiment 20001248 PARAMETER Experiment Name: At_Far-red-induction_P Parameter: Timepoint (hr) Value: 4
  misc_feature: MA Experiment 20001248 PARAMETER Experiment Name: At_Far-red-induction_P Parameter: Tissue Value: Whole Plant
  misc_feature: MA Experiment ID: 20001450 Result: Up-regulated in Transcription
  misc_feature: MA Experiment 20001450 PARAMETER Experiment Name: At_Far-red-induction_P Parameter: Age (day) Value: 7
  misc_feature: MA Experiment 20001450 PARAMETER Experiment Name: At_Far-red-induction_P Parameter: Light Value: Far-red vs. White
  misc_feature: MA Experiment 20001450 PARAMETER Experiment Name: At_Far-red-induction_P Parameter: Organism Value: A. thaliana
  misc_feature: MA Experiment 20001450 PARAMETER Experiment Name: At_Far-red-induction_P Parameter: Plant Line Value: Columbia
  misc_feature: MA Experiment 20001450 PARAMETER Experiment Name: At_Far-red-induction_P Parameter: Timepoint (hr) Value: 8
  misc_feature: MA Experiment 20001450 PARAMETER Experiment Name: At_Far-red-induction_P Parameter: Tissue Value: Whole Plant
  misc_feature: Pfam Name: WD40 Pfam Description: WD domain, G-beta repeat
tgtagttaggtcaatggaacagacaaaggatgattctgattttgaggatgattgtgaaacgaagaagatggagactgatacatcagctcaagaggcaaggaatggtaaagacatacaagggattcagtgggaagggtttaagtataatagagacgagtttcgtgagactaggttgaaacaatatgataactttgttaatatcttaaggcctagctctcgagaaaagcttgataaggaacatgggcaagtagttgagaaaggaaagaacttttatgacttccaattcaatacaaggcttgtcacttccactattgtgcattttcagttgggagtactgtctgagcagccagcagcataacgatatggcttcggaatttggtatgggcgacatctaagcatgatgtatatctaatgcaaaattattcactcatgcactggtcatctctactccagagagggaaagaagtacttaatgtcgccagatcagttacccccactcagaaactacctggattgttttctgagccactctctagggtgcaagttagcagcatggcagtcaaagaaaatctgatccttttaggagggttcgacggggagcttctctgcaagtgtgtaaatcagcctggggttgctttttgcacaagattatcaacggaagataatgccatcacaaacacagttgatatataccgagacccaagtggctcccttaggcttataaccgcaaataacgactgtaaaattcgtgtattcgatgctcagagctttacacgtgtcagtgaatttgctttagattggtctgtcaataatacctcagttagcccggatgggaagctactcgctgtagtcggggacagtacagaatgcttgatctctgattcccattctggaaaagttatttcaagcctcagaggccacaaagactactcatttgcatctgcttggcacccgaatggtctaatcttagcaacgggaaaccaagacacggcatgccgtctctgggacattcgtaacccgtcagaatcattcgctgtcctgaaaggaaacatgggagccatcagaggactgaagttcacaccagaagggcggtttcttgcaatggctgagcctgcagactttgttcacatcttcgacacgcagtccgggtttctacagtcccaagagattgatctgtttggagaaatagccgggatctcgttcagccccgatacagaggcactatatgtaggggtcgcagaccgcacttatggaagtttgctggagtataagaggagaaaggataatcactatatggactccttttactgagaaaaggtaaatgaaaagtaaaaagcatctaatatgttgtcacaagatgggtttaaccctattagtgtgtatatgtagacagaattggtagtttctttggtaatatctgttatgtacccataatatatcttaccaaactttaagtatgttttgt

SEQ ID NO: 74702 - protein, 299 aa, Arabidopsis thaliana
  peptide (1)..(299): Ceres Seq. ID no. 5679192
  misc_feature: Pfam Name: WD40 Pfam Description: WD domain, G-beta repeat
  misc_feature (1)..(299): Homolog of NCBI NO: 18400003 NR Description: expressed protein; protein id: At1g36070.1,
  misc_feature (1)..(299): Homolog of NCBI NO: 12324715 NR Description: unknown protein; 4584-7806 [Arabidopsis thaliana]
  misc_feature (1)..(299): Homolog of NCBI NO: 21553502 NR Description: unknown [Arabidopsis thaliana]
  misc_feature (1)..(299): Homolog of NCBI NO: 13937195 NR Description: At1g78070/F28K19_28 [Arabidopsis thaliana]
  misc_feature (132)..(299): Homolog of NCBI NO: 6598592 NR Description: F5J5.6 [Arabidopsis thaliana]
  misc_feature (82)..(299): Homolog of NCBI NO: 25405023 NR Description: protein F28K19.28 [imported] - Arabidopsis >gi|6573770|gb|AAF17690.1|AC009243_17 F28K19.28 [Arabidopsis
  misc_feature (1)..(97): Homolog of NCBI NO: 25405023 NR Description: protein F28K19.28 [imported] - Arabidopsis >gi|6573770|gb|AAF17690.1|AC009243_17 F28K19.28 [Arabidopsis
  misc_feature (1)..(297): Homolog of NCBI NO: 18423837 NR Description: WD-repeat protein-like; protein id: At5g56190.1,
  misc_feature (1)..(297): Homolog of NCBI NO: 30696707 NR Description: WD-40 repeat protein family [Arabidopsis thaliana]
  misc_feature (1)..(297): Homolog of NCBI NO: 21536732 NR Description: WD-repeat protein-like [Arabidopsis thaliana]
MQNYSLMHWSSLLQRGKEVLNVARSVTPTQKLPGLFSEPLSRVQVSSMAVKENLILLGGFDGELLCKCVNQPGVAFCTRLSTEDNAITNTVDIYRDPSGSLRLITANNDCKIRVFDAQSFTRVSEFALDWSVNNTSVSPDGKLLAVVGDSTECLISDSHSGKVISSLRGHKDYSFASAWHPNGLILATGNQDTACRLWDIRNPSESFAVLKGNMGAIRGLKFTPEGRFLAMAEPADFVHIFDTQSGFLQSQEIDLFGEIAGISFSPDTEALYVGVADRTYGSLLEYKRRKDNHYMDSFY

SEQ ID NO: 74703 - protein, 293 aa, Arabidopsis thaliana
  peptide (1)..(293): Ceres Seq. ID no. 5679193
  misc_feature: Pfam Name: WD40 Pfam Description: WD domain, G-beta repeat
  misc_feature (1)..(293): Homolog of NCBI NO: 18400003 NR Description: expressed protein; protein id: At1g36070.1,
  misc_feature (1)..(293): Homolog of NCBI NO: 12324715 NR Description: unknown protein; 4584-7806 [Arabidopsis thaliana]
  misc_feature (1)..(293): Homolog of NCBI NO: 21553502 NR Description: unknown [Arabidopsis thaliana]
  misc_feature (1)..(293): Homolog of NCBI NO: 13937195 NR Description: At1g78070/F28K19_28 [Arabidopsis thaliana]
  misc_feature (126)..(293): Homolog of NCBI NO: 6598592 NR Description: F5J5.6 [Arabidopsis thaliana]
  misc_feature (76)..(293): Homolog of NCBI NO: 25405023 NR Description: protein F28K19.28 [imported] - Arabidopsis >gi|6573770|gb|AAF17690.1|AC009243_17 F28K19.28 [Arabidopsis
  misc_feature (1)..(91): Homolog of NCBI NO: 25405023 NR Description: protein F28K19.28 [imported] - Arabidopsis >gi|6573770|gb|AAF17690.1|AC009243_17 F28K19.28 [Arabidopsis
  misc_feature (1)..(291): Homolog of NCBI NO: 18423837 NR Description: WD-repeat protein-like; protein id: At5g56190.1,
  misc_feature (1)..(291): Homolog of NCBI NO: 30696707 NR Description: WD-40 repeat protein family [Arabidopsis thaliana]
  misc_feature (1)..(291): Homolog of NCBI NO: 21536732 NR Description: WD-repeat protein-like [Arabidopsis thaliana]
MHWSSLLQRGKEVLNVARSVTPTQKLPGLFSEPLSRVQVSSMAVKENLILLGGFDGELLCKCVNQPGVAFCTRLSTEDNAITNTVDIYRDPSGSLRLITANNDCKIRVFDAQSFTRVSEFALDWSVNNTSVSPDGKLLAVVGDSTECLISDSHSGKVISSLRGHKDYSFASAWHPNGLILATGNQDTACRLWDIRNPSESFAVLKGNMGAIRGLKFTPEGRFLAMAEPADFVHIFDTQSGFLQSQEIDLFGEIAGISFSPDTEALYVGVADRTYGSLLEYKRRKDNHYMDSFY

SEQ ID NO: 74704 - protein, 252 aa, Arabidopsis thaliana
  peptide (1)..(252): Ceres Seq. ID no. 5679194
  misc_feature: Pfam Name: WD40 Pfam Description: WD domain, G-beta repeat
  misc_feature (1)..(252): Homolog of NCBI NO: 18400003 NR Description: expressed protein; protein id: At1g36070.1,
  misc_feature (1)..(252): Homolog of NCBI NO: 12324715 NR Description: unknown protein; 4584-7806 [Arabidopsis thaliana]
  misc_feature (1)..(252): Homolog of NCBI NO: 21553502 NR Description: unknown [Arabidopsis thaliana]
  misc_feature (1)..(252): Homolog of NCBI NO: 13937195 NR Description: At1g78070/F28K19_28 [Arabidopsis thaliana]
  misc_feature (85)..(252): Homolog of NCBI NO: 6598592 NR Description: F5J5.6 [Arabidopsis thaliana]
  misc_feature (35)..(252): Homolog of NCBI NO: 25405023 NR Description: protein F28K19.28 [imported] - Arabidopsis >gi|6573770|gb|AAF17690.1|AC009243_17 F28K19.28 [Arabidopsis
  misc_feature (1)..(50): Homolog of NCBI NO: 25405023 NR Description: protein F28K19.28 [imported] - Arabidopsis >gi|6573770|gb|AAF17690.1|AC009243_17 F28K19.28 [Arabidopsis
  misc_feature (1)..(250): Homolog of NCBI NO: 18423837 NR Description: WD-repeat protein-like; protein id: At5g56190.1,
  misc_feature (1)..(250): Homolog of NCBI NO: 30696707 NR Description: WD-40 repeat protein family [Arabidopsis thaliana]
  misc_feature (1)..(250): Homolog of NCBI NO: 21536732 NR Description: WD-repeat protein-like [Arabidopsis thaliana]
MAVKENLILLGGFDGELLCKCVNQPGVAFCTRLSTEDNAITNTVDIYRDPSGSLRLITANNDCKIRVFDAQSFTRVSEFALDWSVNNTSVSPDGKLLAVVGDSTECLISDSHSGKVISSLRGHKDYSFASAWHPNGLILATGNQDTACRLWDIRNPSESFAVLKGNMGAIRGLKFTPEGRFLAMAEPADFVHIFDTQSGFLQSQEIDLFGEIAGISFSPDTEALYVGVADRTYGSLLEYKRRKDNHYMDSFY

SEQ ID NO: 74705 - DNA, 1518 bp, Arabidopsis thaliana
  misc_feature (1)..(1518): Ceres Seq. ID no. 5679198
  misc_feature: MA Experiment ID: 108434 Result: Down-regulated in Transcription
  misc_feature: MA Experiment 108434 PARAMETER Experiment Name: At_Root_Tips_cDNA_P Parameter: Tissue Value: Root Tips
  misc_feature: MA Experiment ID: 108462 Result: Up-regulated in Transcription
  misc_feature: MA Experiment 108462 PARAMETER Experiment Name: At_Germinating_Seeds_cDNA_P Parameter: Age (day) Value: 2 vs. 0
  misc_feature: MA Experiment 108462 PARAMETER Experiment Name: At_Germinating_Seeds_cDNA_P Parameter: Tissue Value: Germinating Seeds
  misc_feature: MA Experiment ID: 108463 Result: Up-regulated in Transcription
  misc_feature: MA Experiment 108463 PARAMETER Experiment Name: At_Germinating_Seeds_cDNA_P Parameter: Age (day) Value: 3 vs. 0
  misc_feature: MA Experiment 108463 PARAMETER Experiment Name: At_Germinating_Seeds_cDNA_P Parameter: Tissue Value: Germinating Seeds
  misc_feature: MA Experiment ID: 108464 Result: Up-regulated in Transcription
  misc_feature: MA Experiment 108464 PARAMETER Experiment Name: At_Germinating_Seeds_cDNA_P Parameter: Age (day) Value: 4 vs. 0
  misc_feature: MA Experiment 108464 PARAMETER Experiment Name: At_Germinating_Seeds_cDNA_P Parameter: Tissue Value: Germinating Seeds
  misc_feature: MA Experiment ID: 108488 Result: Down-regulated in Transcription
  misc_feature: MA Experiment ID: 108561 Result: Up-regulated in Transcription
  misc_feature: MA Experiment 108561 PARAMETER Experiment Name: At_100uM_ABA_cDNA_P Parameter: Timepoint (hr) Value: 6
  misc_feature: MA Experiment 108561 PARAMETER Experiment Name: At_100uM_ABA_cDNA_P Parameter: Tissue Value: Aerial
  misc_feature: MA Experiment 108561 PARAMETER Experiment Name: At_100uM_ABA_cDNA_P Parameter: Treatment Value: 100uM ABA vs. No Treatment
  misc_feature: MA Experiment ID: 108572 Result: Up-regulated in Transcription
  misc_feature: MA Experiment 108572 PARAMETER Experiment Name: At_Drought_cDNA_P Parameter: Timepoint (hr) Value: 1
  misc_feature: MA Experiment 108572 PARAMETER Experiment Name: At_Drought_cDNA_P Parameter: Tissue Value: Aerial
  misc_feature: MA Experiment 108572 PARAMETER Experiment Name: At_Drought_cDNA_P Parameter: Treatment Value: Drought vs. No Drought
  misc_feature: MA Experiment ID: 108573 Result: Up-regulated in Transcription
  misc_feature: MA Experiment 108573 PARAMETER Experiment Name: At_Drought_cDNA_P Parameter: Timepoint (hr) Value: 6
  misc_feature: MA Experiment 108573 PARAMETER Experiment Name: At_Drought_cDNA_P Parameter: Tissue Value: Aerial
  misc_feature: MA Experiment 108573 PARAMETER Experiment Name: At_Drought_cDNA_P Parameter: Treatment Value: Drought vs. No Drought
  misc_feature: MA Experiment ID: 108574 Result: Up-regulated in Transcription
  misc_feature: MA Experiment 108574 PARAMETER Experiment Name: At_Wounding__cDNA_P Parameter: Timepoint (hr) Value: 1
  misc_feature: MA Experiment 108574 PARAMETER Experiment Name: At_Wounding__cDNA_P Parameter: Tissue Value: Aerial
  misc_feature: MA Experiment 108574 PARAMETER Experiment Name: At_Wounding__cDNA_P Parameter: Treatment Value: Wounding vs. No Wounding
  misc_feature: MA Experiment ID: 108576 Result: Up-regulated in Transcription
  misc_feature: MA Experiment 108576 PARAMETER Experiment Name: At_42deg_Heat_cDNA_P Parameter: Temperature (deg C) Value: 42 vs. 22
  misc_feature: MA Experiment 108576 PARAMETER Experiment Name: At_42deg_Heat_cDNA_P Parameter: Timepoint (hr) Value: 1
  misc_feature: MA Experiment 108576 PARAMETER Experiment Name: At_42deg_Heat_cDNA_P Parameter: Tissue Value: Aerial
  misc_feature: MA Experiment ID: 108577 Result: Up-regulated in Transcription
  misc_feature: MA Experiment 108577 PARAMETER Experiment Name: At_42deg_Heat_cDNA_P Parameter: Temperature (deg C) Value: 42 vs. 22
  misc_feature: MA Experiment 108577 PARAMETER Experiment Name: At_42deg_Heat_cDNA_P Parameter: Timepoint (hr) Value: 6
  misc_feature: MA Experiment 108577 PARAMETER Experiment Name: At_42deg_Heat_cDNA_P Parameter: Tissue Value: Aerial
  misc_feature: MA Experiment ID: 108585 Result: Up-regulated in Transcription
  misc_feature: MA Experiment 108585 PARAMETER Experiment Name: At_5mM_NaNP_cDNA_P Parameter: Timepoint (hr) Value: 6
  misc_feature: MA Experiment 108585 PARAMETER Experiment Name: At_5mM_NaNP_cDNA_P Parameter: Tissue Value: Aerial
  misc_feature: MA Experiment 108585 PARAMETER Experiment Name: At_5mM_NaNP_cDNA_P Parameter: Treatment Value: null
  misc_feature: MA Experiment ID: 108595 Result: Up-regulated in Transcription
  misc_feature: MA Experiment 108595 PARAMETER Experiment Name: At_Ler-pi_Ovule_cDNA_P Parameter: Plant Line Value: null
  misc_feature: MA Experiment ID: 108608 Result: Up-regulated in Transcription
  misc_feature: MA Experiment 108608 PARAMETER Experiment Name: At_100uM_ABA_cDNA_P Parameter: Timepoint (hr) Value: 1
  misc_feature: MA Experiment 108608 PARAMETER Experiment Name: At_100uM_ABA_cDNA_P Parameter: Tissue Value: Aerial
  misc_feature: MA Experiment 108608 PARAMETER Experiment Name: At_100uM_ABA_cDNA_P Parameter: Treatment Value: 100uM ABA vs. No Treatment
  misc_feature: MA Experiment ID: 108668 Result: Up-regulated in Transcription
  misc_feature: MA Experiment 108668 PARAMETER Experiment Name: At_2mM_SA_cDNA_P Parameter: Plant Line Value: WS
  misc_feature: MA Experiment 108668 PARAMETER Experiment Name: At_2mM_SA_cDNA_P Parameter: Timepoint (hr) Value: 6
  misc_feature: MA Experiment 108668 PARAMETER Experiment Name: At_2mM_SA_cDNA_P Parameter: Treatment Value: 2mM SA vs. No Treatment
  misc_feature: MA Experiment ID: 20000093 Result: Up-regulated in Transcription
  misc_feature: MA Experiment 20000093 PARAMETER Experiment Name: At_42deg_Heat_cDNA_P Parameter: Temperature (deg C) Value: 42 vs. 22
  misc_feature: MA Experiment 20000093 PARAMETER Experiment Name: At_42deg_Heat_cDNA_P Parameter: Timepoint (hr) Value: 0.5
  misc_feature: MA Experiment 20000093 PARAMETER Experiment Name: At_42deg_Heat_cDNA_P Parameter: Tissue Value: Aerial
  misc_feature: MA Experiment ID: 20000111 Result: Up-regulated in Transcription
  misc_feature: MA Experiment 20000111 PARAMETER Experiment Name: At_42deg_Heat_cDNA_P Parameter: Temperature (deg C) Value: 42 vs. 22
  misc_feature: MA Experiment 20000111 PARAMETER Experiment Name: At_42deg_Heat_cDNA_P Parameter: Timepoint (hr) Value: 6
  misc_feature: MA Experiment 20000111 PARAMETER Experiment Name: At_42deg_Heat_cDNA_P Parameter: Tissue Value: Aerial
  misc_feature: MA Experiment ID: 20000112 Result: Up-regulated in Transcription
  misc_feature: MA Experiment 20000112 PARAMETER Experiment Name: At_42deg_Heat_cDNA_P Parameter: Temperature (deg C) Value: 42 vs. 22
  misc_feature: MA Experiment 20000112 PARAMETER Experiment Name: At_42deg_Heat_cDNA_P Parameter: Timepoint (hr) Value: 2
  misc_feature: MA Experiment 20000112 PARAMETER Experiment Name: At_42deg_Heat_cDNA_P Parameter: Tissue Value: Aerial
  misc_feature: MA Experiment ID: 20000113 Result: Up-regulated in Transcription
  misc_feature: MA Experiment 20000113 PARAMETER Experiment Name: At_42deg_Heat_cDNA_P Parameter: Temperature (deg C) Value: 42 vs. 22
  misc_feature: MA Experiment 20000113 PARAMETER Experiment Name: At_42deg_Heat_cDNA_P Parameter: Timepoint (hr) Value: 8
  misc_feature: MA Experiment 20000113 PARAMETER Experiment Name: At_42deg_Heat_cDNA_P Parameter: Tissue Value: Aerial
  misc_feature: MA Experiment ID: 20000144 Result: Up-regulated in Transcription
  misc_feature: MA Experiment 20000144 PARAMETER Experiment Name: At_42deg_Heat_cDNA_P Parameter: Temperature (deg C) Value: 42 vs. 22
  misc_feature: MA Experiment 20000144 PARAMETER Experiment Name: At_42deg_Heat_cDNA_P Parameter: Timepoint (hr) Value: 1
  misc_feature: MA Experiment 20000144 PARAMETER Experiment Name: At_42deg_Heat_cDNA_P Parameter: Tissue Value: Aerial
  misc_feature: MA Experiment ID: 20000166 Result: Up-regulated in Transcription
  misc_feature: MA Experiment 20000166 PARAMETER Experiment Name: At_100uM_ABA_P Parameter: Age (day) Value: 14
  misc_feature: MA Experiment 20000166 PARAMETER Experiment Name: At_100uM_ABA_P Parameter: Organism Value: A. thaliana
  misc_feature: MA Experiment 20000166 PARAMETER Experiment Name: At_100uM_ABA_P Parameter: Plant Line Value: WS
  misc_feature: MA Experiment 20000166 PARAMETER Experiment Name: At_100uM_ABA_P Parameter: Timepoint (hr) Value: 1
  misc_feature: MA Experiment 20000166 PARAMETER Experiment Name: At_100uM_ABA_P Parameter: Tissue Value: Aerial
  misc_feature: MA Experiment 20000166 PARAMETER Experiment Name: At_100uM_ABA_P Parameter: Treatment Value: 100uM ABA vs. No Treatment
  misc_feature: MA Experiment ID: 20000171 Result: Up-regulated in Transcription
  misc_feature: MA Experiment 20000171 PARAMETER Experiment Name: At_42deg_Heat_P Parameter: Age (day) Value: 14
  misc_feature: MA Experiment 20000171 PARAMETER Experiment Name: At_42deg_Heat_P Parameter: Organism Value: A. thaliana
  misc_feature: MA Experiment 20000171 PARAMETER Experiment Name: At_42deg_Heat_P Parameter: Plant Line Value: WS
  misc_feature: MA Experiment 20000171 PARAMETER Experiment Name: At_42deg_Heat_P Parameter: Temperature (deg C) Value: 42 vs. 22
  misc_feature: MA Experiment 20000171 PARAMETER Experiment Name: At_42deg_Heat_P Parameter: Timepoint (hr) Value: 1
  misc_feature: MA Experiment 20000171 PARAMETER Experiment Name: At_42deg_Heat_P Parameter: Tissue Value: Aerial
  misc_feature: MA Experiment ID: 20000173 Result: Up-regulated in Transcription
  misc_feature: MA Experiment 20000173 PARAMETER Experiment Name: At_42deg_Heat_P Parameter: Age (day) Value: 14
  misc_feature: MA Experiment 20000173 PARAMETER Experiment Name: At_42deg_Heat_P Parameter: Organism Value: A. thaliana
  misc_feature: MA Experiment 20000173 PARAMETER Experiment Name: At_42deg_Heat_P Parameter: Plant Line Value: WS
  misc_feature: MA Experiment 20000173 PARAMETER Experiment Name: At_42deg_Heat_P Parameter: Temperature (deg C) Value: 42 vs. 22
  misc_feature: MA Experiment 20000173 PARAMETER Experiment Name: At_42deg_Heat_P Parameter: Timepoint (hr) Value: 6
  misc_feature: MA Experiment 20000173 PARAMETER Experiment Name: At_42deg_Heat_P Parameter: Tissue Value: Aerial
  misc_feature: MA Experiment ID: 20000182 Result: Up-regulated in Transcription
  misc_feature: MA Experiment 20000182 PARAMETER Experiment Name: At_2mM_SA_P Parameter: Age (day) Value: 14
  misc_feature: MA Experiment 20000182 PARAMETER Experiment Name: At_2mM_SA_P Parameter: Organism Value: A. thaliana
  misc_feature: MA Experiment 20000182 PARAMETER Experiment Name: At_2mM_SA_P Parameter: Plant Line Value: WS
  misc_feature: MA Experiment 20000182 PARAMETER Experiment Name: At_2mM_SA_P Parameter: Timepoint (hr) Value: 6
  misc_feature: MA Experiment 20000182 PARAMETER Experiment Name: At_2mM_SA_P Parameter: Tissue Value: Aerial
  misc_feature: MA Experiment 20000182 PARAMETER Experiment Name: At_2mM_SA_P Parameter: Treatment Value: 2mM SA vs. No Treatment
  misc_feature: MA Experiment ID: 20000184 Result: Down-regulated in Transcription
  misc_feature: MA Experiment 20000184 PARAMETER Experiment Name: At_Shoots__P Parameter: Age (day) Value: 7
  misc_feature: MA Experiment 20000184 PARAMETER Experiment Name: At_Shoots__P Parameter: Tissue Value: Shoots vs. Whole Plant
  misc_feature: MA Experiment ID: 20000234 Result: Down-regulated in Transcription
  misc_feature: MA Experiment 20000234 PARAMETER Experiment Name: At_Siliques_P Parameter: Age (day) Value: 21
  misc_feature: MA Experiment 20000234 PARAMETER Experiment Name: At_Siliques_P Parameter: Organism Value: A. thaliana
  misc_feature: MA Experiment 20000234 PARAMETER Experiment Name: At_Siliques_P Parameter: Plant Line Value: WS
  misc_feature: MA Experiment 20000234 PARAMETER Experiment Name: At_Siliques_P Parameter: Tissue Value: Less Than 5mm Siliques vs. Whole Plant
  misc_feature: MA Experiment ID: 20000265 Result: Down-regulated in Transcription
  misc_feature: MA Experiment 20000265 PARAMETER Experiment Name: At_Open_Flower_P Parameter: Age (day) Value: 21
  misc_feature: MA Experiment 20000265 PARAMETER Experiment Name: At_Open_Flower_P Parameter: Plant Line Value: WS
  misc_feature: MA Experiment 20000265 PARAMETER Experiment Name: At_Open_Flower_P Parameter: Tissue Value: Closed Flower vs. Whole Plant
  misc_feature: MA Experiment ID: 20000286 Result: Down-regulated in Transcription
  misc_feature: MA Experiment 20000286 PARAMETER Experiment Name: At_Open_Flower_P Parameter: Age (day) Value: 21
  misc_feature: MA Experiment 20000286 PARAMETER Experiment Name: At_Open_Flower_P Parameter: Plant Line Value: WS
  misc_feature: MA Experiment 20000286 PARAMETER Experiment Name: At_Open_Flower_P Parameter: Tissue Value: Half Open vs. Whole Plant
  misc_feature: MA Experiment ID: 20000436 Result: Up-regulated in Transcription
  misc_feature: MA Experiment 20000436 PARAMETER Experiment Name: At_Drought_P Parameter: Age (day) Value: 7
  misc_feature: MA Experiment 20000436 PARAMETER Experiment Name: At_Drought_P Parameter: Organism Value: A. thaliana
  misc_feature: MA Experiment 20000436 PARAMETER Experiment Name: At_Drought_P Parameter: Plant Line Value: WS
  misc_feature: MA Experiment 20000436 PARAMETER Experiment Name: At_Drought_P Parameter: Timepoint (hr) Value: 12
  misc_feature: MA Experiment 20000436 PARAMETER Experiment Name: At_Drought_P Parameter: Tissue Value: Whole Plant
  misc_feature: MA Experiment 20000436 PARAMETER Experiment Name: At_Drought_P Parameter: Treatment Value: Drought vs. No Drought
  misc_feature: MA Experiment ID: 20000437 Result: Up-regulated in Transcription
  misc_feature: MA Experiment 20000437 PARAMETER Experiment Name: At_Drought_P Parameter: Age (day) Value: 8
  misc_feature: MA Experiment 20000437 PARAMETER Experiment Name: At_Drought_P Parameter: Organism Value: A. thaliana
  misc_feature: MA Experiment 20000437 PARAMETER Experiment Name: At_Drought_P Parameter: Plant Line Value: WS
  misc_feature: MA Experiment 20000437 PARAMETER Experiment Name: At_Drought_P Parameter: Timepoint (hr) Value: 24
  misc_feature: MA Experiment 20000437 PARAMETER Experiment Name: At_Drought_P Parameter: Tissue Value: Whole Plant
  misc_feature: MA Experiment 20000437 PARAMETER Experiment Name: At_Drought_P Parameter: Treatment Value: Drought vs. No Drought
  misc_feature: MA Experiment ID: 20000438 Result: Down-regulated in Transcription
  misc_feature: MA Experiment 20000438 PARAMETER Experiment Name: At_Shoots__P Parameter: Age (day) Value: 14
  misc_feature: MA Experiment 20000438 PARAMETER Experiment Name: At_Shoots__P Parameter: Tissue Value: Shoots vs. Whole Plant
  misc_feature: MA Experiment ID: 20000495 Result: Down-regulated in Transcription
  misc_feature: MA Experiment 20000495 PARAMETER Experiment Name: At_Guard_Cells_P Parameter: Harvest Date Value: 8/2/2002
  misc_feature: MA Experiment 20000495 PARAMETER Experiment Name: At_Guard_Cells_P Parameter: Organism Value: A. thaliana
  misc_feature: MA Experiment 20000495 PARAMETER Experiment Name: At_Guard_Cells_P Parameter: Tissue Value: Guard Cells vs. Leaves
  misc_feature: MA Experiment ID: 20000794 Result: Up-regulated in Transcription
  misc_feature: MA Experiment 20000794 PARAMETER Experiment Name: At_Petals_P Parameter: Age (day) Value: 23-25 days
  misc_feature: MA Experiment 20000794 PARAMETER Experiment Name: At_Petals_P Parameter: Plant Line Value: WS
  misc_feature: MA Experiment 20000794 PARAMETER Experiment Name: At_Petals_P Parameter: Tissue Value: Petals vs. Whole plant
  misc_feature: MA Experiment ID: 20001554 Result: Up-regulated in Transcription
  misc_feature: MA Experiment 20001554 PARAMETER Experiment Name: At_Drought_Soil_Dry_P Parameter: Age (day) Value: 21
  misc_feature: MA Experiment 20001554 PARAMETER Experiment Name: At_Drought_Soil_Dry_P Parameter: Organism Value: A. thaliana
  misc_feature: MA Experiment 20001554 PARAMETER Experiment Name: At_Drought_Soil_Dry_P Parameter: Plant Line Value: WS
  misc_feature: MA Experiment 20001554 PARAMETER Experiment Name: At_Drought_Soil_Dry_P Parameter: Post Timepoint (hr) Value: None
  misc_feature: MA Experiment 20001554 PARAMETER Experiment Name: At_Drought_Soil_Dry_P Parameter: Post-Treatment Value: None
  misc_feature: MA Experiment 20001554 PARAMETER Experiment Name: At_Drought_Soil_Dry_P Parameter: Timepoint (day) Value: 7
  misc_feature: MA Experiment 20001554 PARAMETER Experiment Name: At_Drought_Soil_Dry_P Parameter: Treatment Value: Drought vs. No Drought
  misc_feature: MA Experiment ID: 20001555 Result: Up-regulated in Transcription
  misc_feature: MA Experiment 20001555 PARAMETER Experiment Name: At_Drought_Soil_Dry_P Parameter: Age (day) Value: 24
  misc_feature: MA Experiment 20001555 PARAMETER Experiment Name: At_Drought_Soil_Dry_P Parameter: Organism Value: A. thaliana
  misc_feature: MA Experiment 20001555 PARAMETER Experiment Name: At_Drought_Soil_Dry_P Parameter: Plant Line Value: WS
  misc_feature: MA Experiment 20001555 PARAMETER Experiment Name: At_Drought_Soil_Dry_P Parameter: Post Timepoint (hr) Value: None
  misc_feature: MA Experiment 20001555 PARAMETER Experiment Name: At_Drought_Soil_Dry_P Parameter: Post-Treatment Value: None
  misc_feature: MA Experiment 20001555 PARAMETER Experiment Name: At_Drought_Soil_Dry_P Parameter: Timepoint (day) Value: 10
  misc_feature: MA Experiment 20001555 PARAMETER Experiment Name: At_Drought_Soil_Dry_P Parameter: Treatment Value: Drought vs. No Drought
  misc_feature: MA Experiment ID: 20001904 Result: Up-regulated in Transcription
  misc_feature: MA Experiment 20001904 PARAMETER Experiment Name: At_Drought_Reproduction_P Parameter: Age (day) Value: 37
  misc_feature: MA Experiment 20001904 PARAMETER Experiment Name: At_Drought_Reproduction_P Parameter: Organism Value: A. thaliana
  misc_feature: MA Experiment 20001904 PARAMETER Experiment Name: At_Drought_Reproduction_P Parameter: Plant Line Value: WS
  misc_feature: MA Experiment 20001904 PARAMETER Experiment Name: At_Drought_Reproduction_P Parameter: Timepoint (day) Value: 7
  misc_feature: MA Experiment 20001904 PARAMETER Experiment Name: At_Drought_Reproduction_P Parameter: Tissue Value: Rosettes
  misc_feature: MA Experiment 20001904 PARAMETER Experiment Name: At_Drought_Reproduction_P Parameter: Treatment Value: Drought vs. No Drought
  misc_feature: MA Experiment ID: 20001905 Result: Up-regulated in Transcription
  misc_feature: MA Experiment 20001905 PARAMETER Experiment Name: At_Drought_Reproduction_P Parameter: Age (day) Value: 40
  misc_feature: MA Experiment 20001905 PARAMETER Experiment Name: At_Drought_Reproduction_P Parameter: Organism Value: A. thaliana
  misc_feature: MA Experiment 20001905 PARAMETER Experiment Name: At_Drought_Reproduction_P Parameter: Plant Line Value: WS
  misc_feature: MA Experiment 20001905 PARAMETER Experiment Name: At_Drought_Reproduction_P Parameter: Timepoint (day) Value: 10
  misc_feature: MA Experiment 20001905 PARAMETER Experiment Name: At_Drought_Reproduction_P Parameter: Tissue Value: Rosettes
  misc_feature: MA Experiment 20001905 PARAMETER Experiment Name: At_Drought_Reproduction_P Parameter: Treatment Value: Drought vs. No Drought
  misc_feature: MA Experiment ID: 20001906 Result: Up-regulated in Transcription
  misc_feature: MA Experiment 20001906 PARAMETER Experiment Name: At_Drought_Reproduction_P Parameter: Age (day) Value: 35
  misc_feature: MA Experiment 20001906 PARAMETER Experiment Name: At_Drought_Reproduction_P Parameter: Organism Value: A. thaliana
  misc_feature: MA Experiment 20001906 PARAMETER Experiment Name: At_Drought_Reproduction_P Parameter: Plant Line Value: WS
  misc_feature: MA Experiment 20001906 PARAMETER Experiment Name: At_Drought_Reproduction_P Parameter: Timepoint (day) Value: 5
  misc_feature: MA Experiment 20001906 PARAMETER Experiment Name: At_Drought_Reproduction_P Parameter: Tissue Value: Siliques
  misc_feature: MA Experiment 20001906 PARAMETER Experiment Name: At_Drought_Reproduction_P Parameter: Treatment Value: Drought vs. No Drought
  misc_feature: MA Experiment ID: 20001908 Result: Up-regulated in Transcription
  misc_feature: MA Experiment 20001908 PARAMETER Experiment Name: At_Drought_Reproduction_P Parameter: Age (day) Value: 40
  misc_feature: MA Experiment 20001908 PARAMETER Experiment Name: At_Drought_Reproduction_P Parameter: Organism Value: A. thaliana
  misc_feature: MA Experiment 20001908 PARAMETER Experiment Name: At_Drought_Reproduction_P Parameter: Plant Line Value: WS
  misc_feature: MA Experiment 20001908 PARAMETER Experiment Name: At_Drought_Reproduction_P Parameter: Timepoint (day) Value: 10
  misc_feature: MA Experiment 20001908 PARAMETER Experiment Name: At_Drought_Reproduction_P Parameter: Tissue Value: Siliques
  misc_feature: MA Experiment 20001908 PARAMETER Experiment Name: At_Drought_Reproduction_P Parameter: Treatment Value: Drought vs. No Drought
  misc_feature: MA Experiment ID: 20001911 Result: Up-regulated in Transcription
  misc_feature: MA Experiment 20001911 PARAMETER Experiment Name: At_Drought_Reproduction_P Parameter: Age (day) Value: 40
  misc_feature: MA Experiment 20001911 PARAMETER Experiment Name: At_Drought_Reproduction_P Parameter: Organism Value: A. thaliana
  misc_feature: MA Experiment 20001911 PARAMETER Experiment Name: At_Drought_Reproduction_P Parameter: Plant Line Value: WS
  misc_feature: MA Experiment 20001911 PARAMETER Experiment Name: At_Drought_Reproduction_P Parameter: Timepoint (day) Value: 10
  misc_feature: MA Experiment 20001911 PARAMETER Experiment Name: At_Drought_Reproduction_P Parameter: Tissue Value: Flowers
  misc_feature: MA Experiment 20001911 PARAMETER Experiment Name: At_Drought_Reproduction_P Parameter: Treatment Value: Drought vs. No Drought
aattttcgttgaacacaagtgacgaatttgagagagaaaaaaaaagaaaatcagagataaagaatttgagtttcttggaattaaaggatcgattttgttgaagtgaaattgaaattgattgtgaaaagagaaagagactgatggtagcagaagcagaggttgtgtttcaacagagtttaccggcggttctggagattgagttgtttgacggagtttcctccgccgttaaatctcccgtttcttctccgaaattgggttttactcagtcaacggcgtcggtttccggaagtttaacgacttctcctgtggctgatatctttccagagggtgattgcgatcctagtgtcttggattatattccgaccatccggtctggaagctttgctgatattgggccaaagagaaacatggaagatgaacacattcgcatagacgatttatcttctcaagttggttccctttttgagttgccgaagcctagtgctttctatgcggtttttgacgggcatggaggaccagaagcagcagcatacgtacgggaaaatgccattaggtttttctttgaagatgagcagtttccacagacatcggaagtgagtagtgtttatgtggaagaagttgagacttcattgagaaatgcgtttcttcaagctgatctagctttggcagaggattgcagtatcagcgattcttgtggtaccaccgctctgactgctcttatttgtggaagactcttaatggttgcaaatgccggagactgcagagcggttctatgcaggaaaggcagagcgatagacatgtctgaagaccataaaccgattaatctacttgagagaagaagagtggaggaatccggcggtttcatcactaatgacggttacctaaatgaagtcctagctgtaacccgagctctgggcgactgggatttaaaactgccacacggctctcaatctccactgatctcggaaccagaaatcaagcagataactctaactgaagacgatgagtttcttgtgattgggtgcgatgggatttgggatgtcttgacgagccaagaagcggttagcattgttaggcgtggcttaaaccggcacaacgatccaacaagatgtgcgcgagagctagtgatggaggctctggggcggaactcatttgataatttaactgcggtggtggtatgtttcatgacaatggacagaggggacaagccggtggtgccattggagaagagaaggtgttttagtctttcgcctgaagctttctgtagcttgaggaatctgttggatggctgaaactagtgtgttttctggtgaaaaccgatgattatataattgatgatgacgaataatctctcccacggctgcttttgtatttagagattttacgcagctgagagaactcttttgagatatacttgtgtattaagtgtgtttgttgtgtgcacagtatgcgattacagttttgtgtacatacatactgttagttgtctatgaataacgaaaaagaaaagattaagtg

SEQ ID NO: 74706 - protein, 383 aa, Arabidopsis thaliana; identical to SEQ ID NO: 31043
  peptide (1)..(383): Ceres Seq. ID no. 5679199
  misc_feature (76)..(341): Pfam Name: Protein phosphatase 2C Pfam Description: Protein phosphatase 2C
  misc_feature (1)..(383): Homolog of NCBI NO: 15228717 NR Description: protein phosphatase 2C (PP2C); protein id: supported by cDNA: 20050. [Arabidopsis thaliana]
  misc_feature (1)..(383): Homolog of NCBI NO: 30695577 NR Description: protein phosphatase 2C (PP2C), putative
  misc_feature (24)..(383): Homolog of NCBI NO: 25352221 NR Description: phosphoprotein phosphatase (EC 3.1.3.16) 2C
  misc_feature (1)..(382): Homolog of NCBI NO: 34894410 NR Description: putative protein phosphatase [Oryza sativa
  misc_feature (68)..(383): Homolog of NCBI NO: 15221047 NR Description: protein phosphatase-2C, putative; protein id: [Arabidopsis thaliana] >gi|8778520|gb|AAF79528.1|AC023673_16 [Arabidopsis thaliana] >gi|12323084|gb|AAG51521.1|AC051631_1
  misc_feature (69)..(383): Homolog of NCBI NO: 30684431 NR Description: protein phosphatase 2C (PP2C) -related
  misc_feature (14)..(382): Homolog of NCBI NO: 37536524 NR Description: putative protein phosphatase-2C [Oryza sativa
  misc_feature (72)..(382): Homolog of NCBI NO: 10140768 NR Description: putative protein phosphatase-2C [Oryza sativa]
  misc_feature (71)..(383): Homolog of NCBI NO: 15226152 NR Description: protein phosphatase 2C (PP2C); protein id: supported by cDNA: gi_17979441, supported by cDNA: gi_20259092
  misc_feature (50)..(383): Homolog of NCBI NO: 15224766 NR Description: protein phosphatase 2C (PP2C); protein id: supported by cDNA: gi_12642917, supported by cDNA: gi_14517519, by cDNA: gi_16323271 [Arabidopsis thaliana]

SEQ ID NO: 74707 - protein, 294 aa, Arabidopsis thaliana; identical to SEQ ID NO: 31044
  peptide (1)..(294): Ceres Seq. ID no. 5679200
  misc_feature (1)..(252): Pfam Name: Protein phosphatase 2C Pfam Description: Protein phosphatase 2C
  misc_feature (1)..(294): Homolog of NCBI NO: 15228717 NR Description: protein phosphatase 2C (PP2C); protein id: supported by cDNA: 20050. [Arabidopsis thaliana]
  misc_feature (1)..(294): Homolog of NCBI NO: 30695577 NR Description: protein phosphatase 2C (PP2C), putative
  misc_feature (1)..(294): Homolog of NCBI NO: 25352221 NR Description: phosphoprotein phosphatase (EC 3.1.3.16) 2C
  misc_feature (1)..(293): Homolog of NCBI NO: 34894410 NR Description: putative protein phosphatase [Oryza sativa
  misc_feature (1)..(294): Homolog of NCBI NO: 15221047 NR Description: protein phosphatase-2C, putative; protein id: [Arabidopsis thaliana] >gi|8778520|gb|AAF79528.1|AC023673_16 [Arabidopsis thaliana] >gi|12323084|gb|AAG51521.1|AC051631_1
  misc_feature (1)..(294): Homolog of NCBI NO: 30684431 NR Description: protein phosphatase 2C (PP2C) -related
  misc_feature (1)..(293): Homolog of NCBI NO: 37536524 NR Description: putative protein phosphatase-2C [Oryza sativa
  misc_feature (1)..(293): Homolog of NCBI NO: 10140768 NR Description: putative protein phosphatase-2C [Oryza sativa]
  misc_feature (1)..(294): Homolog of NCBI NO: 15226152 NR Description: protein phosphatase 2C (PP2C); protein id: supported by cDNA: gi_17979441, supported by cDNA: gi_20259092
  misc_feature (1)..(294): Homolog of NCBI NO: 15224766 NR Description: protein phosphatase 2C (PP2C); protein id: supported by cDNA: gi_12642917, supported by cDNA: gi_14517519, by cDNA: gi_16323271 [Arabidopsis thaliana]

SEQ ID NO: 74708 - DNA, 1570 bp, Arabidopsis thaliana
  misc_feature (1)..(1570): Ceres Seq. ID no. 5679201
  misc_feature: MA Experiment ID: 108573 Result: Down-regulated in Transcription
  misc_feature: MA Experiment 108573 PARAMETER Experiment Name: At_Drought_cDNA_P Parameter: Timepoint (hr) Value: 6
  misc_feature: MA Experiment 108573 PARAMETER Experiment Name: At_Drought_cDNA_P Parameter: Tissue Value: Aerial
  misc_feature: MA Experiment 108573 PARAMETER Experiment Name: At_Drought_cDNA_P Parameter: Treatment Value: Drought vs. No Drought
  misc_feature: MA Experiment ID: 20000185 Result: Up-regulated in Transcription
  misc_feature: MA Experiment 20000185 PARAMETER Experiment Name: At_Roots__P Parameter: Age (day) Value: 7 vs. 21
  misc_feature: MA Experiment 20000185 PARAMETER Experiment Name: At_Roots__P Parameter: Organism Value: A. thaliana
  misc_feature: MA Experiment 20000185 PARAMETER Experiment Name: At_Roots__P Parameter: Tissue Value: Roots vs. Whole Plant
  misc_feature: MA Experiment ID: 20000439 Result: Up-regulated in Transcription
  misc_feature: MA Experiment 20000439 PARAMETER Experiment Name: At_Roots__P Parameter: Age (day) Value: 14 vs. 21
  misc_feature: MA Experiment 20000439 PARAMETER Experiment Name: At_Roots__P Parameter: Organism Value: A. thaliana
  misc_feature: MA Experiment 20000439 PARAMETER Experiment Name: At_Roots__P Parameter: Tissue Value: Roots vs. Whole Plant
  misc_feature: MA Experiment ID: 20001248 Result: Down-regulated in Transcription
  misc_feature: MA Experiment 20001248 PARAMETER Experiment Name: At_Far-red-induction_P Parameter: Age (day) Value: 7
  misc_feature: MA Experiment 20001248 PARAMETER Experiment Name: At_Far-red-induction_P Parameter: Light Value: Far-red vs. White
  misc_feature: MA Experiment 20001248 PARAMETER Experiment Name: At_Far-red-induction_P Parameter: Organism Value: A. thaliana
  misc_feature: MA Experiment 20001248 PARAMETER Experiment Name: At_Far-red-induction_P Parameter: Plant Line Value: Columbia
  misc_feature: MA Experiment 20001248 PARAMETER Experiment Name: At_Far-red-induction_P Parameter: Timepoint (hr) Value: 4
  misc_feature: MA Experiment 20001248 PARAMETER Experiment Name: At_Far-red-induction_P Parameter: Tissue Value: Whole Plant
  misc_feature: MA Experiment ID: 20001451 Result: Down-regulated in Transcription
  misc_feature: MA Experiment 20001451 PARAMETER Experiment Name: At_Far-red-induction_P Parameter: Age (day) Value: 7
  misc_feature: MA Experiment 20001451 PARAMETER Experiment Name: At_Far-red-induction_P Parameter: Light Value: Far-red vs. White
  misc_feature: MA Experiment 20001451 PARAMETER Experiment Name: At_Far-red-induction_P Parameter: Organism Value: A. thaliana
  misc_feature: MA Experiment 20001451 PARAMETER Experiment Name: At_Far-red-induction_P Parameter: Plant Line Value: Columbia
  misc_feature: MA Experiment 20001451 PARAMETER Experiment Name: At_Far-red-induction_P Parameter: Timepoint (hr) Value: 24
  misc_feature: MA Experiment 20001451 PARAMETER Experiment Name: At_Far-red-induction_P Parameter: Tissue Value: Whole Plant
ataacagttacagagaaaaaataaataaagagatagaagatggagagacaaagaagtttctctgtgaagtccacaagagtcttagcattcatcatcacaataatctcttccgccattgttttcttcactttcttctcctcttccttactcaaatctaactcttctctttacccaacaccagaagctaacttccagatcgatttaagccctattgccgccatttccgattcttcagtttctcctcaagcaagtccgattctgatctctacccatttcaattcacccgaaaacacttccgggtcttcaaaaatttctgtttttgagcagaagattagcggcgagagtttggttaaggaagttagggaaattgctaatttaacttcgattaaagtgattgaacttccgagcaacaatggtgaagataagaagacagagaagagaatcgaagaatgtgatgttacgaaagggaagtgggtttacgatagtgattatccattgtacacaaatgcgtcttgtccttttatcgatgaaggatttggttgtcaaagcaatggaagattggatcttaattacatgaattggagatgggagcctcaggattgtcatgctcccaggttcaatgctacaaagatgctggaaatgattagaggcaagaggctagtgttcgttggagattcaattaataggaaccaatgggaatctatgctttgtttgttgtttcaagctgttaaagatcccaagagagtatacgaaacgcacaaccgaagaatcaccaaagagaaagggaattatagcttccgtttcgtggattataaatgcactgtggaattctatgttactcatttcttggttcgtgagggtagagcaagaataggaaagaagcgaagagaaacacttagaatcgatgctatggatcgaacctcttccagatggaaaggtgctaatatcttagtgttcaatacagctcattggtggtctcattacaaaaccaaatcaggggtcaactactaccaagaaggagacctgattcatcccaaactcgatgtatcaaccgcttttaagaaagctttgcagacttggtcatcatgggttgacaaaaatgtcgatccgaagaaaactcgcgttttctttagaagcgctgcaccttctcatttcagtggaggagaatggaactcaggaggtcattgcagagaagccaacatgccgttgaaccaaaccttcaaaccaagttactcgagcaaaaagtccattgttgaggacgtactgaagcaaatgagaacaccggtaaccctcttgaacgttagcggtttatctcagtacagaattgacgcccatccttctatttacggaacaaaacccgaaaaccggcgttcaagagctgtccaagattgcagccattggtgtctccctggtgttcctgatacttggaaccacttcctttacctccatttgctccataaacgataaatacagttacaaactaatcaaagctccagttacgtgttcaaaagtttgtttaatgtaggcattgctcgatccgatttaaccaaccaaaccaaaaccattttgg

SEQ ID NO: 74709 - protein, 475 aa, Arabidopsis thaliana; identical to SEQ ID NO: 42076
  peptide (1)..(475): Ceres Seq. ID no. 5679202
  misc_feature (312)..(471): Pfam Name: Arabidopsis proteins of unknown function Pfam Description: Arabidopsis proteins of unknown function
  misc_feature (1)..(475): Homolog of NCBI NO: 15228743 NR Description: putative protein; protein id: At3g62390.1, by cDNA: 126100. [Arabidopsis thaliana] >gi|11357988|pir||T48031
  misc_feature (1)..(472): Homolog of NCBI NO: 15242021 NR Description: putative protein; protein id: At5g20590.1,
  misc_feature (1)..(472): Homolog of NCBI NO: 21592371 NR Description: unknown [Arabidopsis thaliana]
  misc_feature (129)..(474): Homolog of NCBI NO: 15229945 NR Description: hypothetical protein; protein id: At3g12060.1 thaliana] >gi|10998147|dbj|BAB03118.1| to unknown protein [Arabidopsis thaliana]
  misc_feature (121)..(472): Homolog of NCBI NO: 22330347 NR Description: hypothetical protein; protein id: At1g60790.1, by cDNA: gi_17979148 [Arabidopsis thaliana] unknown protein [Arabidopsis thaliana]
  misc_feature (117)..(474): Homolog of NCBI NO: 9759298 NR Description: emb|CAB82953.1~gene_id:MPH15.5~strong similarity
  misc_feature (137)..(472): Homolog of NCBI NO: 32489523 NR Description: OSJNBa0043L24.14 [Oryza sativa (japonica
  misc_feature (61)..(472): Homolog of NCBI NO: 15239856 NR Description: putative protein; protein id: At5g49340.1
  misc_feature (163)..(474): Homolog of NCBI NO: 21618305 NR Description: unknown [Arabidopsis thaliana]
  misc_feature (116)..(468): Homolog of NCBI NO: 6862912 NR Description: unknown protein [Arabidopsis thaliana]

SEQ ID NO: 74710 - protein, 297 aa, Arabidopsis thaliana; identical to SEQ ID NO: 42077
  peptide (1)..(297): Ceres Seq. ID no. 5679203
  misc_feature (134)..(293): Pfam Name: Arabidopsis proteins of unknown function Pfam Description: Arabidopsis proteins of unknown function
  misc_feature (1)..(297): Homolog of NCBI NO: 15228743 NR Description: putative protein; protein id: At3g62390.1, by cDNA: 126100. [Arabidopsis thaliana] >gi|11357988|pir||T48031
  misc_feature (1)..(294): Homolog of NCBI NO: 15242021 NR Description: putative protein; protein id: At5g20590.1,
  misc_feature (1)..(294): Homolog of NCBI NO: 21592371 NR Description: unknown [Arabidopsis thaliana]
  misc_feature (1)..(296): Homolog of NCBI NO: 15229945 NR Description: hypothetical protein; protein id: At3g12060.1 thaliana] >gi|10998147|dbj|BAB03118.1| to unknown protein [Arabidopsis thaliana]
  misc_feature (1)..(294): Homolog of NCBI NO: 22330347 NR Description: hypothetical protein; protein id: At1g60790.1, by cDNA: gi_17979148 [Arabidopsis thaliana] unknown protein [Arabidopsis thaliana]
  misc_feature (1)..(296): Homolog of NCBI NO: 9759298 NR Description: emb|CAB82953.1~gene_id:MPH15.5~strong similarity
  misc_feature (1)..(294): Homolog of NCBI NO: 32489523 NR Description: OSJNBa0043L24.14 [Oryza sativa (japonica
  misc_feature (1)..(294): Homolog of NCBI NO: 15239856 NR Description: putative protein; protein id: At5g49340.1
  misc_feature (1)..(296): Homolog of NCBI NO: 21618305 NR Description: unknown [Arabidopsis thaliana]
  misc_feature (1)..(290): Homolog of NCBI NO: 6862912 NR Description: unknown protein [Arabidopsis thaliana]

SEQ ID NO: 74711 - protein, 278 aa, Arabidopsis thaliana; identical to SEQ ID NO: 42078
  peptide (1)..(278): Ceres Seq. ID no. 5679204
  misc_feature (115)..(274): Pfam Name: Arabidopsis proteins of unknown function Pfam Description: Arabidopsis proteins of unknown function
  misc_feature (1)..(278): Homolog of NCBI NO: 15228743 NR Description: putative protein; protein id: At3g62390.1, by cDNA: 126100. [Arabidopsis thaliana] >gi|11357988|pir||T48031
  misc_feature (1)..(275): Homolog of NCBI NO: 15242021 NR Description: putative protein; protein id: At5g20590.1,
  misc_feature (1)..(275): Homolog of NCBI NO: 21592371 NR Description: unknown [Arabidopsis thaliana]
  misc_feature (1)..(277): Homolog of NCBI NO: 15229945 NR Description: hypothetical protein; protein id: At3g12060.1 thaliana] >gi|10998147|dbj|BAB03118.1| to unknown protein [Arabidopsis thaliana]
  misc_feature (1)..(275): Homolog of NCBI NO: 22330347 NR Description: hypothetical protein; protein id: At1g60790.1, by cDNA: gi_17979148 [Arabidopsis thaliana] unknown protein [Arabidopsis thaliana]
  misc_feature (1)..(277): Homolog of NCBI NO: 9759298 NR Description: emb|CAB82953.1~gene_id:MPH15.5~strong similarity
  misc_feature (1)..(275): Homolog of NCBI NO: 32489523 NR Description: OSJNBa0043L24.14 [Oryza sativa (japonica
  misc_feature (1)..(275): Homolog of NCBI NO: 15239856 NR Description: putative protein; protein id: At5g49340.1
  misc_feature (1)..(277): Homolog of NCBI NO: 21618305 NR Description: unknown [Arabidopsis thaliana]
  misc_feature (1)..(271): Homolog of NCBI NO: 6862912 NR Description: unknown protein [Arabidopsis thaliana]

SEQ ID NO: 74712 - DNA, 1116 bp, Arabidopsis thaliana
  misc_feature (1)..(1116): Ceres Seq. ID no. 5679205
  misc_feature: MA Experiment ID: 108569 Result: Up-regulated in Transcription
  misc_feature: MA Experiment 108569 PARAMETER Experiment Name: At_0.001%_MeJA__cDNA_P Parameter: Timepoint (hr) Value: 6
  misc_feature: MA Experiment 108569 PARAMETER Experiment Name: At_0.001%_MeJA__cDNA_P Parameter: Tissue Value: Aerial
  misc_feature: MA Experiment 108569 PARAMETER Experiment Name: At_0.001%_MeJA__cDNA_P Parameter: Treatment Value: 0.001% MeJA vs. No Treatment
  misc_feature: MA Experiment ID: 108579 Result: Down-regulated in Transcription
  misc_feature: MA Experiment 108579 PARAMETER Experiment Name: At_4deg_Cold_cDNA_P Parameter: Temperature (deg C) Value: 4 vs. 22
  misc_feature: MA Experiment 108579 PARAMETER Experiment Name: At_4deg_Cold_cDNA_P Parameter: Timepoint (hr) Value: 6
  misc_feature: MA Experiment 108579 PARAMETER Experiment Name: At_4deg_Cold_cDNA_P Parameter: Tissue Value: Aerial
  misc_feature: MA Experiment ID: 108595 Result: Down-regulated in Transcription
  misc_feature: MA Experiment 108595 PARAMETER Experiment Name: At_Ler-pi_Ovule_cDNA_P Parameter: Plant Line Value: null
  misc_feature: MA Experiment ID: 20000224 Result: Down-regulated in Transcription
  misc_feature: MA Experiment ID: 20001560 Result: Down-regulated in Transcription
  misc_feature: MA Experiment 20001560 PARAMETER Experiment Name: At_Drought_Soil_Dry_P Parameter: Age (day) Value: 28
  misc_feature: MA Experiment 20001560 PARAMETER Experiment Name: At_Drought_Soil_Dry_P Parameter: Organism Value: A. thaliana
  misc_feature: MA Experiment 20001560 PARAMETER Experiment Name: At_Drought_Soil_Dry_P Parameter: Plant Line Value: WS
  misc_feature: MA Experiment 20001560 PARAMETER Experiment Name: At_Drought_Soil_Dry_P Parameter: Post Timepoint (hr) Value: None
  misc_feature: MA Experiment 20001560 PARAMETER Experiment Name: At_Drought_Soil_Dry_P Parameter: Post-Treatment Value: None
  misc_feature: MA Experiment 20001560 PARAMETER Experiment Name: At_Drought_Soil_Dry_P Parameter: Timepoint (day) Value: 14
  misc_feature: MA Experiment 20001560 PARAMETER Experiment Name: At_Drought_Soil_Dry_P Parameter: Treatment Value: Drought vs. No Drought
  misc_feature: MA Experiment ID: 20001905 Result: Down-regulated in Transcription
  misc_feature: MA Experiment 20001905 PARAMETER Experiment Name: At_Drought_Reproduction_P Parameter: Age (day) Value: 40
  misc_feature: MA Experiment 20001905 PARAMETER Experiment Name: At_Drought_Reproduction_P Parameter: Organism Value: A. thaliana
  misc_feature: MA Experiment 20001905 PARAMETER Experiment Name: At_Drought_Reproduction_P Parameter: Plant Line Value: WS
  misc_feature: MA Experiment 20001905 PARAMETER Experiment Name: At_Drought_Reproduction_P Parameter: Timepoint (day) Value: 10
  misc_feature: MA Experiment 20001905 PARAMETER Experiment Name: At_Drought_Reproduction_P Parameter: Tissue Value: Rosettes
  misc_feature: MA Experiment 20001905 PARAMETER Experiment Name: At_Drought_Reproduction_P Parameter: Treatment Value: Drought vs. No Drought
cccaaagtcggcggaagaagatggtgtcgccgaaaatagcaccgtcgatgctgtcatcggacttcgcaaatctagcggcggaggccaatcggatgatcgatttgggcgccaactggcttcacatggatattatggacgggtaaaatttgctgccttacctgtggattcttattagcatccaaacccagcttgtaacatttttgtttcaagatagtttggtataataactctgtgttgctcccgcaggcattttgtccctaatcttacgattggtgctcctgtcatcgagagtttgcgaaagcacactaatgcatatcttgattgccaccttatggtgacgaaccccatggattacgttgcacagatggctaaagctggggcttctggtttcacattccacgtcgaggtggcccaagataattggcaacaacttgtcgagaagattaagtctactgggatgagaccaggcgtggctctaaagcctggaacacctgttgaacaagtctatcctctggttgaagggacaactccggttgaaatggttcttgtgatgactgtagaacctggatttggaggccagaagtttatgcctgacatgatggacaaggtccgggcattgaggcaaaaatacccaacacttgatattcaggtggatggcggcttaggcccttcaacgatcgacacagcggctgcagcaggcgccaactgtattgttgctggaagttcagtgtttggagctccggagccaggagatgtcatctcccttctgaggaccagtgttgagaaagcccaacccaccacttgaaagctgcacgtggtggcggtggtgctgagacggcgttgtattctcatcggaagatggtacctcttcgtttctctcaaggttaaaaagctggtcctttatgttttaaaatcatctcgtgaatcgtgatacttagtcttggttccaagaactgtataacgtcattttgagttattaattccctcaccacacagattatttcataggagttgggtaccaagagtagtgtgcaatgtataattagtaatttaataaacgtattaggttcagtcattttggaatggttataattatgaatacaagtatacaacatg

SEQ ID NO: 74713 - protein, 157 aa, Arabidopsis thaliana; identical to SEQ ID NO: 38475
  peptide (1)..(157): Ceres Seq. ID no. 5679206
  misc_feature (1)..(137): Pfam Name: Ribulose-phosphate 3 epimerase family Pfam Description: Ribulose-phosphate 3 epimerase family
  misc_feature (1)..(157): Homolog of NCBI NO: 18395962 NR Description: putative D-ribulose-5-phosphate 3-epimerase; id: At3g01850.1, supported by cDNA: 2398., supported by cDNA: [Arabidopsis thaliana] >gi|13877557|gb|AAK43856.1|AF370479_1
  misc_feature (1)..(157): Homolog of NCBI NO: 6091725 NR Description: putative D-ribulose-5-phosphate 3-epimerase
  misc_feature (1)..(157): Homolog of NCBI NO: 15221735 NR Description: putative D-ribulose-5-phosphate-3-epimerase; id: At1g63290.1, supported by cDNA: 37843., supported by cDNA:
  misc_feature (1)..(154): Homolog of NCBI NO: 28373310 NR Description: Chain A, The Structure Of The Cytosolic
  misc_feature (1)..(156): Homolog of NCBI NO: 19114917 NR Description: putative ribulose phosphate 3-epimerase
  misc_feature (1)..(152): Homolog of NCBI NO: 6322341 NR Description: D-ribulose-5-Phosphate 3-epimerase; Rpe1p
  misc_feature (1)..(153): Homolog of NCBI NO: 27532955 NR Description: RIKEN cDNA 5730518J08 [Mus musculus]
  misc_feature (1)..(153): Homolog of NCBI NO: 40385883 NR Description: ribulose-5-phosphate-3-epimerase isoform 1;
  misc_feature (1)..(153): Homolog of NCBI NO: 39581355 NR Description: Hypothetical protein CBG15299 [Caenorhabditis
  misc_feature (1)..(153): Homolog of NCBI NO: 17552948 NR Description: D-ribulose-5-Phosphate 3-epimerase (24.4 kD) elegans] >gi|14574055|gb|AAK68310.1|U28991_8 Hypothetical protein

SEQ ID NO: 74714 - protein, 152 aa, Arabidopsis thaliana; identical to SEQ ID NO: 38476
  peptide (1)..(152): Ceres Seq. ID no. 5679207
  misc_feature (1)..(132): Pfam Name: Ribulose-phosphate 3 epimerase family Pfam Description: Ribulose-phosphate 3 epimerase family
  misc_feature (1)..(152): Homolog of NCBI NO: 18395962 NR Description: putative D-ribulose-5-phosphate 3-epimerase; id: At3g01850.1, supported by cDNA: 2398., supported by cDNA: [Arabidopsis thaliana] >gi|13877557|gb|AAK43856.1|AF370479_1
  misc_feature (1)..(152): Homolog of NCBI NO: 6091725 NR Description: putative D-ribulose-5-phosphate 3-epimerase
  misc_feature (1)..(152): Homolog of NCBI NO: 15221735 NR Description: putative D-ribulose-5-phosphate-3-epimerase; id: At1g63290.1, supported by cDNA: 37843., supported by cDNA:
  misc_feature (1)..(149): Homolog of NCBI NO: 28373310 NR Description: Chain A, The Structure Of The Cytosolic
  misc_feature (1)..(151): Homolog of NCBI NO: 19114917 NR Description: putative ribulose phosphate 3-epimerase
  misc_feature (1)..(147): Homolog of NCBI NO: 6322341 NR Description: D-ribulose-5-Phosphate 3-epimerase; Rpe1p
  misc_feature (1)..(148): Homolog of NCBI NO: 27532955 NR Description: RIKEN cDNA 5730518J08 [Mus musculus]
  misc_feature (1)..(148): Homolog of NCBI NO: 40385883 NR Description: ribulose-5-phosphate-3-epimerase isoform 1;
  misc_feature (1)..(148): Homolog of NCBI NO: 39581355 NR Description: Hypothetical protein CBG15299 [Caenorhabditis
  misc_feature (1)..(148): Homolog of NCBI NO: 17552948 NR Description: D-ribulose-5-Phosphate 3-epimerase (24.4 kD) elegans] >gi|14574055|gb|AAK68310.1|U28991_8 Hypothetical protein

SEQ ID NO: 74715 - protein, 146 aa, Arabidopsis thaliana; identical to SEQ ID NO: 38477
  peptide (1)..(146): Ceres Seq. ID no. 5679208
  misc_feature (1)..(126): Pfam Name: Ribulose-phosphate 3 epimerase family Pfam Description: Ribulose-phosphate 3 epimerase family
  misc_feature (1)..(146): Homolog of NCBI NO: 18395962 NR Description: putative D-ribulose-5-phosphate 3-epimerase; id: At3g01850.1, supported by cDNA: 2398., supported by cDNA: [Arabidopsis thaliana] >gi|13877557|gb|AAK43856.1|AF370479_1
  misc_feature (1)..(146): Homolog of NCBI NO: 6091725 NR Description: putative D-ribulose-5-phosphate 3-epimerase
  misc_feature (1)..(146): Homolog of NCBI NO: 15221735 NR Description: putative D-ribulose-5-phosphate-3-epimerase; id: At1g63290.1, supported by cDNA: 37843., supported by cDNA:
  misc_feature (1)..(143): Homolog of NCBI NO: 28373310 NR Description: Chain A, The Structure Of The Cytosolic
  misc_feature (1)..(145): Homolog of NCBI NO: 19114917 NR Description: putative ribulose phosphate 3-epimerase
  misc_feature (1)..(141): Homolog of NCBI NO: 6322341 NR Description: D-ribulose-5-Phosphate 3-epimerase; Rpe1p
  misc_feature (1)..(142): Homolog of NCBI NO: 27532955 NR Description: RIKEN cDNA 5730518J08 [Mus musculus]
  misc_feature (1)..(142): Homolog of NCBI NO: 40385883 NR Description: ribulose-5-phosphate-3-epimerase isoform 1;
  misc_feature (1)..(142): Homolog of NCBI NO: 39581355 NR Description: Hypothetical protein CBG15299 [Caenorhabditis
  misc_feature (1)..(142): Homolog of NCBI NO: 17552948 NR Description: D-ribulose-5-Phosphate 3-epimerase (24.4 kD) elegans] >gi|14574055|gb|AAK68310.1|U28991_8 Hypothetical protein

SEQ ID NO: 74716 - DNA, 1411 bp, Arabidopsis thaliana
  misc_feature (1)..(1411): Ceres Seq. ID no. 5679217
  misc_feature: MA Experiment ID: 108595 Result: Down-regulated in Transcription
  misc_feature: MA Experiment 108595 PARAMETER Experiment Name: At_Ler-pi_Ovule_cDNA_P Parameter: Plant Line Value: null
actcaatcgtcatttcctcggtatctcctcctcgaaagaagaatgcctggaattagaggtccttcggaatactcgcaggaaccacctcgtcacccttctctcaaggtcaacgccaaggaacctttcaacgccgagcctccccgctcggccttagtctcatcttatgtcactcccgtcgaccttttctacaagcgaaatcatggtcccatccccattgttgatcaccttcaaagctactccgtcacccttactggattgatccagaacccgagaaagctctttatcaaagacatcaggtccctcccaaagtacaatgttactgctactcttcatgtgccggtaacagaaggactgccatgagcaaagttaggaatgttagaggtgttggatgggatgtttctgctattggcaacgctgtctggggtggggcgaaactggccgatgttcttgagcttgtggggataccaaagctgactgcttctaccaatttaggagccagacatgttgagttcgttagtgttgatcgctgtaaggaggaaaatgggggcccttataaggcgtcaatcactctaagtcaagccacaaatcctgaagcggatgttctactcgcttatgagatgaatggagagaccctgaacagggatcacggatttccgttaagggtggttgtccctggtgtgattggtgctcgttcggtcaaatggcttgattccatcaatgtcatcgctgaagaaagccagggattcttcatgcaaaaagattacaaaatgtttccaccctctgtcaattgggataatatcaactggtcctctaggagaccgcaaatggatttccctgttcagagtgcaatctgctctgtggaggatgtgcaaatggtgaagcctggaaaggtaagtatcaaaggatatgcggtttcaggaggtggacgcgggatagaaagagtggacatatccctggatggaggcaaaaactgggtggaagcttctagaacgcaggaaccaggaaagcagtacatctcagaacacagctccagtgacaaatgggcatgggtgttgtttgaagccaccattgatgtttcacagactacagaggtcatcgccaaagcggttgattcggcggcgaatgttcaaccggaaaatgtggagtcggtgtggaacctaagaggggttctcaacacttcgtggcaccgtgtccttctccggcttggccactctaacttgtagaccaagttaccactatgcgtctggtctctctttatcttttctttaagaactaaaacatccttgaatatgcttgtccttgtggatctgtgagagcaaaatactgtttatagttaaataaaatgggaaaacccatctgttgtcatgtggtggattataaattatttatttatatgatagaactgttattc

SEQ ID NO: 74717 - protein, 288 aa, Arabidopsis thaliana; identical to SEQ ID NO: 26545
  peptide (1)..(288): Ceres Seq. ID no. 5679218
  misc_feature (1)..(132): Pfam Name: Oxidoreductase molybdopterin binding domain Pfam Description: Oxidoreductase molybdopterin binding domain
  misc_feature (1)..(288): Homolog of NCBI NO: 15232230 NR Description: putative sulfite oxidase; protein id: supported by cDNA: gi_13430669, supported by cDNA: gi_6468007 thaliana] >gi|6091746|gb|AAF03458.1|AC010797_34 putative sulfite
  misc_feature (1)..(288): Homolog of NCBI NO: 6468008 NR Description: sulfite oxidase [Arabidopsis thaliana]
  misc_feature (1)..(282): Homolog of NCBI NO: 22759584 NR Description: Moco containing protein [Oryza sativa (japonica
  misc_feature (1)..(279): Homolog of NCBI NO: 3212610 NR Description: Chain A, Sulfite Oxidase From Chicken Liver
  misc_feature (1)..(278): Homolog of NCBI NO: 28558813 NR Description: Sulfite oxidase
  misc_feature (1)..(278): Homolog of NCBI NO: 86440 NR Description: sulfite oxidase (EC 1.8.3.1), hepatic - chicken
  misc_feature (1)..(279): Homolog of NCBI NO: 30424565 NR Description: sulfite oxidase [Mus musculus] Sulfite oxidase, mitochondrial precursor
  misc_feature (1)..(279): Homolog of NCBI NO: 586053 NR Description: Sulfite oxidase, mitochondrial precursor
  misc_feature (1)..(279): Homolog of NCBI NO: 40254758 NR Description: sulfite oxidase [Rattus norvegicus]
  misc_feature (1)..(279): Homolog of NCBI NO: 4557867 NR Description: SUOX gene product [Homo sapiens] Sulfite oxidase, mitochondrial precursor >gi|1362942|pir||S55874

SEQ ID NO: 74718 - protein, 201 aa, Arabidopsis thaliana; identical to SEQ ID NO: 26546
  peptide (1)..(201): Ceres Seq. ID no. 5679219
  misc_feature (66)..(197): Pfam Name: Mo-co oxidoreductase dimerisation domain Pfam Description: Mo-co oxidoreductase dimerisation domain
  misc_feature (1)..(201): Homolog of NCBI NO: 15232230 NR Description: putative sulfite oxidase; protein id: supported by cDNA: gi_13430669, supported by cDNA: gi_6468007 thaliana] >gi|6091746|gb|AAF03458.1|AC010797_34 putative sulfite
  misc_feature (1)..(201): Homolog of NCBI NO: 6468008 NR Description: sulfite oxidase [Arabidopsis thaliana]
  misc_feature (1)..(195): Homolog of NCBI NO: 22759584 NR Description: Moco containing protein [Oryza sativa (japonica
  misc_feature (1)..(192): Homolog of NCBI NO: 3212610 NR Description: Chain A, Sulfite Oxidase From Chicken Liver
  misc_feature (1)..(191): Homolog of NCBI NO: 28558813 NR Description: Sulfite oxidase
  misc_feature (1)..(191): Homolog of NCBI NO: 86440 NR Description: sulfite oxidase (EC 1.8.3.1), hepatic - chicken
  misc_feature (1)..(192): Homolog of NCBI NO: 30424565 NR Description: sulfite oxidase [Mus musculus] Sulfite oxidase, mitochondrial precursor
  misc_feature (1)..(192): Homolog of NCBI NO: 586053 NR Description: Sulfite oxidase, mitochondrial precursor
  misc_feature (1)..(192): Homolog of NCBI NO: 40254758 NR Description: sulfite oxidase [Rattus norvegicus]
  misc_feature (1)..(192): Homolog of NCBI NO: 4557867 NR Description: SUOX gene product [Homo sapiens] Sulfite oxidase, mitochondrial precursor >gi|1362942|pir||S55874

SEQ ID NO: 74719 - protein, 157 aa, Arabidopsis thaliana; identical to SEQ ID NO: 37425
  peptide (1)..(157): Ceres Seq. ID no. 5679220
  misc_feature (22)..(153): Pfam Name: Mo-co oxidoreductase dimerisation domain Pfam Description: Mo-co oxidoreductase dimerisation domain
  misc_feature (1)..(157): Homolog of NCBI NO: 15232230 NR Description: putative sulfite oxidase; protein id: supported by cDNA: gi_13430669, supported by cDNA: gi_6468007 thaliana] >gi|6091746|gb|AAF03458.1|AC010797_34 putative sulfite
  misc_feature (1)..(157): Homolog of NCBI NO: 6468008 NR Description: sulfite oxidase [Arabidopsis thaliana]
  misc_feature (1)..(151): Homolog of NCBI NO: 22759584 NR Description: Moco containing protein [Oryza sativa (japonica
  misc_feature (1)..(148): Homolog of NCBI NO: 3212610 NR Description: Chain A, Sulfite Oxidase From Chicken Liver
  misc_feature (1)..(147): Homolog of NCBI NO: 28558813 NR Description: Sulfite oxidase
  misc_feature (1)..(147): Homolog of NCBI NO: 86440 NR Description: sulfite oxidase (EC 1.8.3.1), hepatic - chicken
  misc_feature (1)..(148): Homolog of NCBI NO: 30424565 NR Description: sulfite oxidase [Mus musculus] Sulfite oxidase, mitochondrial precursor
  misc_feature (1)..(148): Homolog of NCBI NO: 586053 NR Description: Sulfite oxidase, mitochondrial precursor
  misc_feature (1)..(148): Homolog of NCBI NO: 40254758 NR Description: sulfite oxidase [Rattus norvegicus]
  misc_feature (1)..(148): Homolog of NCBI NO: 4557867 NR Description: SUOX gene product [Homo sapiens] Sulfite oxidase, mitochondrial precursor >gi|1362942|pir||S55874

SEQ ID NO: 74720 - DNA, 1386 bp, Arabidopsis thaliana
  misc_feature (1)..(1386): Ceres Seq. ID no. 5679221
  misc_feature: MA Experiment ID: 108434 Result: Down-regulated in Transcription
  misc_feature: MA Experiment 108434 PARAMETER Experiment Name: At_Root_Tips_cDNA_P Parameter: Tissue Value: Root Tips
  misc_feature: MA Experiment ID: 108488 Result: Down-regulated in Transcription
  misc_feature: MA Experiment ID: 108489 Result: Up-regulated in Transcription
  misc_feature: MA Experiment ID: 108561 Result: Up-regulated in Transcription
  misc_feature: MA Experiment 108561 PARAMETER Experiment Name: At_100uM_ABA_cDNA_P Parameter: Timepoint (hr) Value: 6
  misc_feature: MA Experiment 108561 PARAMETER Experiment Name: At_100uM_ABA_cDNA_P Parameter: Tissue Value: Aerial
  misc_feature: MA Experiment 108561 PARAMETER Experiment Name: At_100uM_ABA_cDNA_P Parameter: Treatment Value: 100uM ABA vs. No Treatment
  misc_feature: MA Experiment ID: 108573 Result: Up-regulated in Transcription
  misc_feature: MA Experiment 108573 PARAMETER Experiment Name: At_Drought_cDNA_P Parameter: Timepoint (hr) Value: 6
  misc_feature: MA Experiment 108573 PARAMETER Experiment Name: At_Drought_cDNA_P Parameter: Tissue Value: Aerial
  misc_feature: MA Experiment 108573 PARAMETER Experiment Name: At_Drought_cDNA_P Parameter: Treatment Value: Drought vs. No Drought
  misc_feature: MA Experiment ID: 108577 Result: Up-regulated in Transcription
  misc_feature: MA Experiment 108577 PARAMETER Experiment Name: At_42deg_Heat_cDNA_P Parameter: Temperature (deg C) Value: 42 vs. 22
  misc_feature: MA Experiment 108577 PARAMETER Experiment Name: At_42deg_Heat_cDNA_P Parameter: Timepoint (hr) Value: 6
  misc_feature: MA Experiment 108577 PARAMETER Experiment Name: At_42deg_Heat_cDNA_P Parameter: Tissue Value: Aerial
  misc_feature: MA Experiment ID: 20000071 Result: Up-regulated in Transcription
  misc_feature: MA Experiment 20000071 PARAMETER Experiment Name: At_100uM_ABA_Mutants_cDNA_P Parameter: Plant Line Value: CS8104
  misc_feature: MA Experiment 20000071 PARAMETER Experiment Name: At_100uM_ABA_Mutants_cDNA_P Parameter: Timepoint (hr) Value: 6
  misc_feature: MA Experiment 20000071 PARAMETER Experiment Name: At_100uM_ABA_Mutants_cDNA_P Parameter: Tissue Value: Aerial
  misc_feature: MA Experiment 20000071 PARAMETER Experiment Name: At_100uM_ABA_Mutants_cDNA_P Parameter: Treatment Value: 100uM ABA vs. No Treatment
  misc_feature: MA Experiment ID: 20000111 Result: Up-regulated in Transcription
  misc_feature: MA Experiment 20000111 PARAMETER Experiment Name: At_42deg_Heat_cDNA_P Parameter: Temperature (deg C) Value: 42 vs. 22
  misc_feature: MA Experiment 20000111 PARAMETER Experiment Name: At_42deg_Heat_cDNA_P Parameter: Timepoint (hr) Value: 6
  misc_feature: MA Experiment 20000111 PARAMETER Experiment Name: At_42deg_Heat_cDNA_P Parameter: Tissue Value: Aerial
  misc_feature: MA Experiment ID: 20000112 Result: Up-regulated in Transcription
  misc_feature: MA Experiment 20000112 PARAMETER Experiment Name: At_42deg_Heat_cDNA_P Parameter: Temperature (deg C) Value: 42 vs. 22
  misc_feature: MA Experiment 20000112 PARAMETER Experiment Name: At_42deg_Heat_cDNA_P Parameter: Timepoint (hr) Value: 2
  misc_feature: MA Experiment 20000112 PARAMETER Experiment Name: At_42deg_Heat_cDNA_P Parameter: Tissue Value: Aerial
  misc_feature: MA Experiment ID: 20000144 Result: Up-regulated in Transcription
  misc_feature: MA Experiment 20000144 PARAMETER Experiment Name: At_42deg_Heat_cDNA_P Parameter: Temperature (deg C) Value: 42 vs. 22
  misc_feature: MA Experiment 20000144 PARAMETER Experiment Name: At_42deg_Heat_cDNA_P Parameter: Timepoint (hr) Value: 1
  misc_feature: MA Experiment 20000144 PARAMETER Experiment Name: At_42deg_Heat_cDNA_P Parameter: Tissue Value: Aerial
  misc_feature: MA Experiment ID: 20000173 Result: Up-regulated in Transcription
  misc_feature: MA Experiment 20000173 PARAMETER Experiment Name: At_42deg_Heat_P Parameter: Age (day) Value: 14
  misc_feature: MA Experiment 20000173 PARAMETER Experiment Name: At_42deg_Heat_P Parameter: Organism Value: A. thaliana
  misc_feature: MA Experiment 20000173 PARAMETER Experiment Name: At_42deg_Heat_P Parameter: Plant Line Value: WS
  misc_feature: MA Experiment 20000173 PARAMETER Experiment Name: At_42deg_Heat_P Parameter: Temperature (deg C) Value: 42 vs. 22
  misc_feature: MA Experiment 20000173 PARAMETER Experiment Name: At_42deg_Heat_P Parameter: Timepoint (hr) Value: 6
  misc_feature: MA Experiment 20000173 PARAMETER Experiment Name: At_42deg_Heat_P Parameter: Tissue Value: Aerial
  misc_feature: MA Experiment ID: 20000179 Result: Down-regulated in Transcription
  misc_feature: MA Experiment 20000179 PARAMETER Experiment Name: At_Germinating_Seeds_P Parameter: Age (hr) Value: 6 vs. 0
  misc_feature: MA Experiment 20000179 PARAMETER Experiment Name: At_Germinating_Seeds_P Parameter: Tissue Value: Germinating Seeds
  misc_feature: MA Experiment ID: 20000224 Result: Down-regulated in Transcription
  misc_feature: MA Experiment ID: 20000436 Result: Up-regulated in Transcription
  misc_feature: MA Experiment 20000436 PARAMETER Experiment Name: At_Drought_P Parameter: Age (day) Value: 7
  misc_feature: MA Experiment 20000436 PARAMETER Experiment Name: At_Drought_P Parameter: Organism Value: A. thaliana
  misc_feature: MA Experiment 20000436 PARAMETER Experiment Name: At_Drought_P Parameter: Plant Line Value: WS
  misc_feature: MA Experiment 20000436 PARAMETER Experiment Name: At_Drought_P Parameter: Timepoint (hr) Value: 12
  misc_feature: MA Experiment 20000436 PARAMETER Experiment Name: At_Drought_P Parameter: Tissue Value: Whole Plant
  misc_feature: MA Experiment 20000436 PARAMETER Experiment Name: At_Drought_P Parameter: Treatment Value: Drought vs. No Drought
  misc_feature: MA Experiment ID: 20000437 Result: Up-regulated in Transcription
  misc_feature: MA Experiment 20000437 PARAMETER Experiment Name: At_Drought_P Parameter: Age (day) Value: 8
  misc_feature: MA Experiment 20000437 PARAMETER Experiment Name: At_Drought_P Parameter: Organism Value: A. thaliana
  misc_feature: MA Experiment 20000437 PARAMETER Experiment Name: At_Drought_P Parameter: Plant Line Value: WS
  misc_feature: MA Experiment 20000437 PARAMETER Experiment Name: At_Drought_P Parameter: Timepoint (hr) Value: 24
  misc_feature: MA Experiment 20000437 PARAMETER Experiment Name: At_Drought_P Parameter: Tissue Value: Whole Plant
  misc_feature: MA Experiment 20000437 PARAMETER Experiment Name: At_Drought_P Parameter: Treatment Value: Drought vs. No Drought
  misc_feature: MA Experiment ID: 20000794 Result: Up-regulated in Transcription
  misc_feature: MA Experiment 20000794 PARAMETER Experiment Name: At_Petals_P Parameter: Age (day) Value: 23-25 days
  misc_feature: MA Experiment 20000794 PARAMETER Experiment Name: At_Petals_P Parameter: Plant Line Value: WS
  misc_feature: MA Experiment 20000794 PARAMETER Experiment Name: At_Petals_P Parameter: Tissue Value: Petals vs. Whole plant
  misc_feature: MA Experiment ID: 20001560 Result: Down-regulated in Transcription
  misc_feature: MA Experiment 20001560 PARAMETER Experiment Name: At_Drought_Soil_Dry_P Parameter: Age (day) Value: 28
  misc_feature: MA Experiment 20001560 PARAMETER Experiment Name: At_Drought_Soil_Dry_P Parameter: Organism Value: A. thaliana
  misc_feature: MA Experiment 20001560 PARAMETER Experiment Name: At_Drought_Soil_Dry_P Parameter: Plant Line Value: WS
  misc_feature: MA Experiment 20001560 PARAMETER Experiment Name: At_Drought_Soil_Dry_P Parameter: Post Timepoint (hr) Value: None
  misc_feature: MA Experiment 20001560 PARAMETER Experiment Name: At_Drought_Soil_Dry_P Parameter: Post-Treatment Value: None
  misc_feature: MA Experiment 20001560 PARAMETER Experiment Name: At_Drought_Soil_Dry_P Parameter: Timepoint (day) Value: 14
  misc_feature: MA Experiment 20001560 PARAMETER Experiment Name: At_Drought_Soil_Dry_P Parameter: Treatment Value: Drought vs. No Drought
  misc_feature: Pfam Name: WD40 Pfam Description: WD domain, G-beta repeat
atctctcttacgattccttcaaatcattcttccatggccaccgtatcttcttcctcctggccaaaccccaaccctaatcccgattccacgtctgcctcagattccgattctacttttccctctcaccgcgatcgcgtagacgaacccgactctctcgattccttctcctccatgagtcttaactccgacgaacctaatcagacttctaatcaatcgcctctttctccccctacgcccaatttaccggtgatgcctcctccgtccgtgcttcatctttcctttaaccaagatcatgcttgcttcgctgtcggcactgaccgtggcttccggatccttaattgcgatccctttcgcgagattttccggcgtgatttcgatcgtggcggtggtgttgcagtcgtggagatgcttttcagatgcaatatattagccctagttggtggcggacctgatcctcaatatcctcctaataaggttatgatttgggatgatcaccagggccgatgtatcggagaactctctttcaggtccgatgttagatccgtccggcttaggagggatcggattattgtcgttcttgagcagaagatttttgtctacaatttctctgacctcaagctgatgcatcagattgaaaccattgccaaccctaagggtttgtgtgctgtttctcagggtgttggttctatggttttggtatgtccaggtttgcagaaaggtcaagttcggatcgagcactacgcttctaaacggaccaaattcgtcatggctcatgattccagaatagcttgcttcgctctcacgcaggatggccatttgttggccactgctagctctaagggtactctggttcggatcttcaaatgctcagtggttagctgtctcaagtgacaaaggaacggtccatgtctttggtctcaaagtcaactccggatctcaagtgaaagactcatcccgaattgcacctgatgctactccctcatccccatcgtcgtctctgtctttattcaaaggagtgttaccgaggtatttcagctcggagtggtcggtggctcagttcaggttggttgaaggaactcagtacatagccgcctttggccatcaaaagaacaccgttgttattcttggcatggatgggagcttctacagatgccagtttgatccggtgaacggcggtgaaatgtctcagcttgagtaccacaactgtctgaaaccgccttcagttttctaaaagctttactacttatactcttttgttccttctctctctttatatctctctgcaacttaagcggtgagatatggtgtatagttttgtgtatataataatgatgggtcgtcctataatttgtaaaaccttttatcgctaaccaaaactgattcacg

SEQ ID NO: 74721 - protein, 239 aa, Arabidopsis thaliana; identical to SEQ ID NO: 29242
  peptide (1)..(239): Ceres Seq. ID no. 5679222
  misc_feature: Pfam Name: WD40 Pfam Description: WD domain, G-beta repeat
  misc_feature (1)..(230): Homolog of NCBI NO: 14517420 NR Description: AT3g62770/F26K9_200 [Arabidopsis thaliana]
  misc_feature (1)..(239): Homolog of NCBI NO: 11288364 NR Description: hypothetical protein F26K9.200 - Arabidopsis >gi|7362757|emb|CAB83127.1| putative protein [Arabidopsis
  misc_feature (1)..(230): Homolog of NCBI NO: 18412493 NR Description: putative protein; protein id: At3g62770.1, by cDNA: gi_14517419, supported by cDNA: gi_16323361 [Arabidopsis
  misc_feature (1)..(239): Homolog of NCBI NO: 34907164 NR Description: P0423A12.19 [Oryza sativa (japonica
  misc_feature (32)..(230): Homolog of NCBI NO: 30694449 NR Description: WD-40 repeat protein family [Arabidopsis thaliana]
  misc_feature (32)..(230): Homolog of NCBI NO: 34896164 NR Description: hypothetical protein~similar to Arabidopsis
  misc_feature (32)..(230): Homolog of NCBI NO: 7487233 NR Description: hypothetical protein At2g40810 [imported] - thaliana >gi|2623295|gb|AAB86441.1| hypothetical protein
  misc_feature (32)..(230): Homolog of NCBI NO: 30688413 NR Description: WD-40 repeat protein family [Arabidopsis >gi|26450478|dbj|BAC42353.1| unknown protein [Arabidopsis
  misc_feature (32)..(230): Homolog of NCBI NO: 11288366 NR Description: hypothetical protein T5P19.90 - Arabidopsis >gi|7594522|emb|CAB88047.1| putative protein [Arabidopsis
  misc_feature (32)..(239): Homolog of NCBI NO: 15238452 NR Description: putative protein; protein id: At5g05150.1 thaliana] >gi|9759256|dbj|BAB09691.1| contains similarity to

SEQ ID NO: 74722 - protein, 285 aa, Arabidopsis thaliana; identical to SEQ ID NO: 29241
  peptide (1)..(285): Ceres Seq. ID no. 5679223
  misc_feature: Pfam Name: WD40 Pfam Description: WD domain, G-beta repeat
  misc_feature (1)..(276): Homolog of NCBI NO: 14517420 NR Description: AT3g62770/F26K9_200 [Arabidopsis thaliana]
  misc_feature (1)..(285): Homolog of NCBI NO: 11288364 NR Description: hypothetical protein F26K9.200 - Arabidopsis >gi|7362757|emb|CAB83127.1| putative protein [Arabidopsis
  misc_feature (1)..(276): Homolog of NCBI NO: 18412493 NR Description: putative protein; protein id: At3g62770.1, by cDNA: gi_14517419, supported by cDNA: gi_16323361 [Arabidopsis
  misc_feature (12)..(285): Homolog of NCBI NO: 34907164 NR Description: P0423A12.19 [Oryza sativa (japonica
  misc_feature (78)..(276): Homolog of NCBI NO: 30694449 NR Description: WD-40 repeat protein family [Arabidopsis thaliana]
  misc_feature (78)..(276): Homolog of NCBI NO: 34896164 NR Description: hypothetical protein~similar to Arabidopsis
  misc_feature (78)..(276): Homolog of NCBI NO: 7487233 NR Description: hypothetical protein At2g40810 [imported] - thaliana >gi|2623295|gb|AAB86441.1| hypothetical protein
  misc_feature (78)..(276): Homolog of NCBI NO: 30688413 NR Description: WD-40 repeat protein family [Arabidopsis >gi|26450478|dbj|BAC42353.1| unknown protein [Arabidopsis
  misc_feature (78)..(276): Homolog of NCBI NO: 11288366 NR Description: hypothetical protein T5P19.90 - Arabidopsis >gi|7594522|emb|CAB88047.1| putative protein [Arabidopsis
  misc_feature (78)..(285): Homolog of NCBI NO: 15238452 NR Description: putative protein; protein id: At5g05150.1 thaliana] >gi|9759256|dbj|BAB09691.1| contains similarity to

SEQ ID NO: 74723 - protein, 296 aa, Arabidopsis thaliana; identical to SEQ ID NO: 29240
  peptide (1)..(296): Ceres Seq. ID no. 5679224
  misc_feature: Pfam Name: WD40 Pfam Description: WD domain, G-beta repeat
  misc_feature (12)..(287): Homolog of NCBI NO: 14517420 NR Description: AT3g62770/F26K9_200 [Arabidopsis thaliana]
  misc_feature (12)..(296): Homolog of NCBI NO: 11288364 NR Description: hypothetical protein F26K9.200 - Arabidopsis >gi|7362757|emb|CAB83127.1| putative protein [Arabidopsis
  misc_feature (12)..(287): Homolog of NCBI NO: 18412493 NR Description: putative protein; protein id: At3g62770.1, by cDNA: gi_14517419, supported by cDNA: gi_16323361 [Arabidopsis
  misc_feature (23)..(296): Homolog of NCBI NO: 34907164 NR Description: P0423A12.19 [Oryza sativa (japonica
  misc_feature (89)..(287): Homolog of NCBI NO: 30694449 NR Description: WD-40 repeat protein family [Arabidopsis thaliana]
  misc_feature (89)..(287): Homolog of NCBI NO: 34896164 NR Description: hypothetical protein~similar to Arabidopsis
  misc_feature (89)..(287): Homolog of NCBI NO: 7487233 NR Description: hypothetical protein At2g40810 [imported] - thaliana >gi|2623295|gb|AAB86441.1| hypothetical protein
  misc_feature (89)..(287): Homolog of NCBI NO: 30688413 NR Description: WD-40 repeat protein family [Arabidopsis >gi|26450478|dbj|BAC42353.1| unknown protein [Arabidopsis
  misc_feature (89)..(287): Homolog of NCBI NO: 11288366 NR Description: hypothetical protein T5P19.90 - Arabidopsis >gi|7594522|emb|CAB88047.1| putative protein [Arabidopsis
  misc_feature (89)..(296): Homolog of NCBI NO: 15238452 NR Description: putative protein; protein id: At5g05150.1 thaliana] >gi|9759256|dbj|BAB09691.1| contains similarity to

SEQ ID NO: 74724 - DNA, 903 bp, Arabidopsis thaliana
  misc_feature (1)..(903): Ceres Seq. ID no. 5679232
  misc_feature: MA Experiment ID: 108462 Result: Down-regulated in Transcription
  misc_feature: MA Experiment 108462 PARAMETER Experiment Name: At_Germinating_Seeds_cDNA_P Parameter: Age (day) Value: 2 vs. 0
  misc_feature: MA Experiment 108462 PARAMETER Experiment Name: At_Germinating_Seeds_cDNA_P Parameter: Tissue Value: Germinating Seeds
  misc_feature: MA Experiment ID: 108463 Result: Down-regulated in Transcription
  misc_feature: MA Experiment 108463 PARAMETER Experiment Name: At_Germinating_Seeds_cDNA_P Parameter: Age (day) Value: 3 vs. 0
  misc_feature: MA Experiment 108463 PARAMETER Experiment Name: At_Germinating_Seeds_cDNA_P Parameter: Tissue Value: Germinating Seeds
  misc_feature: MA Experiment ID: 108577 Result: Up-regulated in Transcription
  misc_feature: MA Experiment 108577 PARAMETER Experiment Name: At_42deg_Heat_cDNA_P Parameter: Temperature (deg C) Value: 42 vs. 22
  misc_feature: MA Experiment 108577 PARAMETER Experiment Name: At_42deg_Heat_cDNA_P Parameter: Timepoint (hr) Value: 6
  misc_feature: MA Experiment 108577 PARAMETER Experiment Name: At_42deg_Heat_cDNA_P Parameter: Tissue Value: Aerial
  misc_feature: MA Experiment ID: 20000111 Result: Up-regulated in Transcription
  misc_feature: MA Experiment 20000111 PARAMETER Experiment Name: At_42deg_Heat_cDNA_P Parameter: Temperature (deg C) Value: 42 vs. 22
  misc_feature: MA Experiment 20000111 PARAMETER Experiment Name: At_42deg_Heat_cDNA_P Parameter: Timepoint (hr) Value: 6
  misc_feature: MA Experiment 20000111 PARAMETER Experiment Name: At_42deg_Heat_cDNA_P Parameter: Tissue Value: Aerial
  misc_feature: MA Experiment ID: 20000112 Result: Up-regulated in Transcription
  misc_feature: MA Experiment 20000112 PARAMETER Experiment Name: At_42deg_Heat_cDNA_P Parameter: Temperature (deg C) Value: 42 vs. 22
  misc_feature: MA Experiment 20000112 PARAMETER Experiment Name: At_42deg_Heat_cDNA_P Parameter: Timepoint (hr) Value: 2
  misc_feature: MA Experiment 20000112 PARAMETER Experiment Name: At_42deg_Heat_cDNA_P Parameter: Tissue Value: Aerial
  misc_feature: MA Experiment ID: 20000113 Result: Up-regulated in Transcription
  misc_feature: MA Experiment 20000113 PARAMETER Experiment Name: At_42deg_Heat_cDNA_P Parameter: Temperature (deg C) Value: 42 vs. 22
  misc_feature: MA Experiment 20000113 PARAMETER Experiment Name: At_42deg_Heat_cDNA_P Parameter: Timepoint (hr) Value: 8
  misc_feature: MA Experiment 20000113 PARAMETER Experiment Name: At_42deg_Heat_cDNA_P Parameter: Tissue Value: Aerial
  misc_feature: MA Experiment ID: 20000144 Result: Up-regulated in Transcription
  misc_feature: MA Experiment 20000144 PARAMETER Experiment Name: At_42deg_Heat_cDNA_P Parameter: Temperature (deg C) Value: 42 vs. 22
  misc_feature: MA Experiment 20000144 PARAMETER Experiment Name: At_42deg_Heat_cDNA_P Parameter: Timepoint (hr) Value: 1
  misc_feature: MA Experiment 20000144 PARAMETER Experiment Name: At_42deg_Heat_cDNA_P Parameter: Tissue Value: Aerial
  misc_feature: MA Experiment ID: 20000173 Result: Up-regulated in Transcription
  misc_feature: MA Experiment 20000173 PARAMETER Experiment Name: At_42deg_Heat_P Parameter: Age (day) Value: 14
  misc_feature: MA Experiment 20000173 PARAMETER Experiment Name: At_42deg_Heat_P Parameter: Organism Value: A. thaliana
  misc_feature: MA Experiment 20000173 PARAMETER Experiment Name: At_42deg_Heat_P Parameter: Plant Line Value: WS
  misc_feature: MA Experiment 20000173 PARAMETER Experiment Name: At_42deg_Heat_P Parameter: Temperature (deg C) Value: 42 vs. 22
  misc_feature: MA Experiment 20000173 PARAMETER Experiment Name: At_42deg_Heat_P Parameter: Timepoint (hr) Value: 6
  misc_feature: MA Experiment 20000173 PARAMETER Experiment Name: At_42deg_Heat_P Parameter: Tissue Value: Aerial
acatagccgctctgtttcttcttctctttccctcacccttatcgccgctgtttcgtcttgaacaatcagattaggtgttcttctgtggataaaagatgaatcattgtagccttcagcagaatgcattcttgtctcgtgaagaatcgagaggatttgttcctatctattctcatccagtggactctgttgtttgccctaagccccgtcgtgcaaacaacgttattcgtccctttagattacattttagtctttcaggagctgatgatgtatgtgattctaaagccggggaagatcttttggacatatttcgtagaaaggaatcagtatcatctagatcacccccatttttccttgggtctccccctagccgagcagcaaacccgttagctcaagatgcacgctttggagatgagaaactcaacactgtctcaccctcactctcccctcttctcccatctgcatctcgtgttaaaagtggttgtggtagaatgaagtttggggtgaaaccagcaactgttagagtagaagggtttgattgcttgaacagggaccgcccaaactcaagtatccctgccatggcctagaaagaagaagaaggaacaaagaggattcacaaagtgtacataaaatccagactcaaagactccattttttgaagaagtatatatagttttgcagaagaagaggaaaaggaagattaacgatcgctcaagcttttaccgcagttttctgtgattatgatgaggttcaatgttgtgtatatatatgtatctaccgtaattaagaggtaaggtcgagactttatgtgttaacttcttatttctgaagtctcgttgtaacatattaaaccaatttgggagtgttgttctcttttctgtgtataataaccattcttcttttttg

SEQ ID NO: 74725 - protein, 162 aa, Arabidopsis thaliana; identical to SEQ ID NO: 25947
  peptide (1)..(162): Ceres Seq. ID no. 5679233
  misc_feature (1)..(162): Homolog of NCBI NO: 18396232 NR Description: Expressed protein; protein id: At3g02555.1, by cDNA: 1232. [Arabidopsis thaliana] >gi|21537194|gb|AAM61535.1|
  misc_feature (1)..(162): Homolog of NCBI NO: 30685676 NR Description: expressed protein [Arabidopsis thaliana]
  misc_feature (1)..(162): Homolog of NCBI NO: 11762168 NR Description: AT5g16110 [Arabidopsis thaliana]
  misc_feature (1)..(162): Homolog of NCBI NO: 18409044 NR Description: expressed protein; protein id: At1g68490.1, by cDNA: 37060. [Arabidopsis thaliana] >gi|25404742|pir||A96709
  misc_feature (1)..(162): Homolog of NCBI NO: 15222278 NR Description: unknown protein; protein id: At1g13390.1 thaliana] >gi|9958074|gb|AAG09563.1|AC011810_22 Unknown protein

SEQ ID NO: 74726 - protein, 88 aa, Arabidopsis thaliana; identical to SEQ ID NO: 25948
  peptide (1)..(88): Ceres Seq. ID no. 5679234

SEQ ID NO: 74727 - DNA, 1515 bp, Arabidopsis thaliana
  misc_feature (1)..(1515): Ceres Seq. ID no. 5679235
  misc_feature: MA Experiment ID: 108434 Result: Down-regulated in Transcription
  misc_feature: MA Experiment 108434 PARAMETER Experiment Name: At_Root_Tips_cDNA_P Parameter: Tissue Value: Root Tips
  misc_feature: MA Experiment ID: 108461 Result: Up-regulated in Transcription
  misc_feature: MA Experiment 108461 PARAMETER Experiment Name: At_Germinating_Seeds_cDNA_P Parameter: Age (day) Value: 1 vs. 0
  misc_feature: MA Experiment 108461 PARAMETER Experiment Name: At_Germinating_Seeds_cDNA_P Parameter: Tissue Value: Germinating Seeds
  misc_feature: MA Experiment ID: 108561 Result: Up-regulated in Transcription
  misc_feature: MA Experiment 108561 PARAMETER Experiment Name: At_100uM_ABA_cDNA_P Parameter: Timepoint (hr) Value: 6
  misc_feature: MA Experiment 108561 PARAMETER Experiment Name: At_100uM_ABA_cDNA_P Parameter: Tissue Value: Aerial
  misc_feature: MA Experiment 108561 PARAMETER Experiment Name: At_100uM_ABA_cDNA_P Parameter: Treatment Value: 100uM ABA vs. No Treatment
  misc_feature: MA Experiment ID: 108573 Result: Up-regulated in Transcription
  misc_feature: MA Experiment 108573 PARAMETER Experiment Name: At_Drought_cDNA_P Parameter: Timepoint (hr) Value: 6
  misc_feature: MA Experiment 108573 PARAMETER Experiment Name: At_Drought_cDNA_P Parameter: Tissue Value: Aerial
  misc_feature: MA Experiment 108573 PARAMETER Experiment Name: At_Drought_cDNA_P Parameter: Treatment Value: Drought vs. No Drought
  misc_feature: MA Experiment ID: 108577 Result: Down-regulated in Transcription
  misc_feature: MA Experiment 108577 PARAMETER Experiment Name: At_42deg_Heat_cDNA_P Parameter: Temperature (deg C) Value: 42 vs. 22
  misc_feature: MA Experiment 108577 PARAMETER Experiment Name: At_42deg_Heat_cDNA_P Parameter: Timepoint (hr) Value: 6
  misc_feature: MA Experiment 108577 PARAMETER Experiment Name: At_42deg_Heat_cDNA_P Parameter: Tissue Value: Aerial
  misc_feature: MA Experiment ID: 108605 Result: Up-regulated in Transcription
  misc_feature: MA Experiment 108605 PARAMETER Experiment Name: At_100uM_ABA_cDNA_P Parameter: Timepoint (hr) Value: 6
  misc_feature: MA Experiment 108605 PARAMETER Experiment Name: At_100uM_ABA_cDNA_P Parameter: Tissue Value: Aerial
  misc_feature: MA Experiment 108605 PARAMETER Experiment Name: At_100uM_ABA_cDNA_P Parameter: Treatment Value: 100uM ABA vs. No Treatment
  misc_feature: MA Experiment ID: 20000071 Result: Up-regulated in Transcription
  misc_feature: MA Experiment 20000071 PARAMETER Experiment Name: At_100uM_ABA_Mutants_cDNA_P Parameter: Plant Line Value: CS8104
  misc_feature: MA Experiment 20000071 PARAMETER Experiment Name: At_100uM_ABA_Mutants_cDNA_P Parameter: Timepoint (hr) Value: 6
  misc_feature: MA Experiment 20000071 PARAMETER Experiment Name: At_100uM_ABA_Mutants_cDNA_P Parameter: Tissue Value: Aerial
  misc_feature: MA Experiment 20000071 PARAMETER Experiment Name: At_100uM_ABA_Mutants_cDNA_P Parameter: Treatment Value: 100uM ABA vs. No Treatment
  misc_feature: MA Experiment ID: 20000072 Result: Up-regulated in Transcription
  misc_feature: MA Experiment 20000072 PARAMETER Experiment Name: At_100uM_ABA_Mutants_cDNA_P Parameter: Plant Line Value: CS8105
  misc_feature: MA Experiment 20000072 PARAMETER Experiment Name: At_100uM_ABA_Mutants_cDNA_P Parameter: Timepoint (hr) Value: 6
  misc_feature: MA Experiment 20000072 PARAMETER Experiment Name: At_100uM_ABA_Mutants_cDNA_P Parameter: Tissue Value: Aerial
  misc_feature: MA Experiment 20000072 PARAMETER Experiment Name: At_100uM_ABA_Mutants_cDNA_P Parameter: Treatment Value: 100uM ABA vs. No Treatment
  misc_feature: MA Experiment ID: 20000086 Result: Up-regulated in Transcription
  misc_feature: MA Experiment 20000086 PARAMETER Experiment Name: At_100uM_ABA_Mutants_cDNA_P Parameter: Plant Line Value: CS22
  misc_feature: MA Experiment 20000086 PARAMETER Experiment Name: At_100uM_ABA_Mutants_cDNA_P Parameter: Timepoint (hr) Value: 6
  misc_feature: MA Experiment 20000086 PARAMETER Experiment Name: At_100uM_ABA_Mutants_cDNA_P Parameter: Tissue Value: Aerial
  misc_feature: MA Experiment 20000086 PARAMETER Experiment Name: At_100uM_ABA_Mutants_cDNA_P Parameter: Treatment Value: 100uM ABA vs. No Treatment
  misc_feature: MA Experiment ID: 20000111 Result: Down-regulated in Transcription
  misc_feature: MA Experiment 20000111 PARAMETER Experiment Name: At_42deg_Heat_cDNA_P Parameter: Temperature (deg C) Value: 42 vs. 22
  misc_feature: MA Experiment 20000111 PARAMETER Experiment Name: At_42deg_Heat_cDNA_P Parameter: Timepoint (hr) Value: 6
  misc_feature: MA Experiment 20000111 PARAMETER Experiment Name: At_42deg_Heat_cDNA_P Parameter: Tissue Value: Aerial
  misc_feature: MA Experiment ID: 20000113 Result: Down-regulated in Transcription
  misc_feature: MA Experiment 20000113 PARAMETER Experiment Name: At_42deg_Heat_cDNA_P Parameter: Temperature (deg C) Value: 42 vs. 22
  misc_feature: MA Experiment 20000113 PARAMETER Experiment Name: At_42deg_Heat_cDNA_P Parameter: Timepoint (hr) Value: 8
  misc_feature: MA Experiment 20000113 PARAMETER Experiment Name: At_42deg_Heat_cDNA_P Parameter: Tissue Value: Aerial
  misc_feature: MA Experiment ID: 20000169 Result: Up-regulated in Transcription
  misc_feature: MA Experiment 20000169 PARAMETER Experiment Name: At_100uM_ABA_P Parameter: Age (day) Value: 14
  misc_feature: MA Experiment 20000169 PARAMETER Experiment Name: At_100uM_ABA_P Parameter: Organism Value: A. thaliana
  misc_feature: MA Experiment 20000169 PARAMETER Experiment Name: At_100uM_ABA_P Parameter: Plant Line Value: WS
  misc_feature: MA Experiment 20000169 PARAMETER Experiment Name: At_100uM_ABA_P Parameter: Timepoint (hr) Value: 6
  misc_feature: MA Experiment 20000169 PARAMETER Experiment Name: At_100uM_ABA_P Parameter: Tissue Value: Aerial
  misc_feature: MA Experiment 20000169 PARAMETER Experiment Name: At_100uM_ABA_P Parameter: Treatment Value: 100uM ABA vs. No Treatment
  misc_feature: MA Experiment ID: 20000173 Result: Down-regulated in Transcription
  misc_feature: MA Experiment 20000173 PARAMETER Experiment Name: At_42deg_Heat_P Parameter: Age (day) Value: 14
  misc_feature: MA Experiment 20000173 PARAMETER Experiment Name: At_42deg_Heat_P Parameter: Organism Value: A. thaliana
  misc_feature: MA Experiment 20000173 PARAMETER Experiment Name: At_42deg_Heat_P Parameter: Plant Line Value: WS
  misc_feature: MA Experiment 20000173 PARAMETER Experiment Name: At_42deg_Heat_P Parameter: Temperature (deg C) Value: 42 vs. 22
  misc_feature: MA Experiment 20000173 PARAMETER Experiment Name: At_42deg_Heat_P Parameter: Timepoint (hr) Value: 6
  misc_feature: MA Experiment 20000173 PARAMETER Experiment Name: At_42deg_Heat_P Parameter: Tissue Value: Aerial
  misc_feature: MA Experiment ID: 20000179 Result: Up-regulated in Transcription
  misc_feature: MA Experiment 20000179 PARAMETER Experiment Name: At_Germinating_Seeds_P Parameter: Age (hr) Value: 6 vs. 0
  misc_feature: MA Experiment 20000179 PARAMETER Experiment Name: At_Germinating_Seeds_P Parameter: Tissue Value: Germinating Seeds
  misc_feature: MA Experiment ID: 20000180 Result: Up-regulated in Transcription
  misc_feature: MA Experiment 20000180 PARAMETER Experiment Name: At_Germinating_Seeds_P Parameter: Age (hr) Value: 24 vs. 0
  misc_feature: MA Experiment 20000180 PARAMETER Experiment Name: At_Germinating_Seeds_P Parameter: Tissue Value: Germinating Seeds
  misc_feature: MA Experiment ID: 20000185 Result: Up-regulated in Transcription
  misc_feature: MA Experiment 20000185 PARAMETER Experiment Name: At_Roots__P Parameter: Age (day) Value: 7 vs. 21
  misc_feature: MA Experiment 20000185 PARAMETER Experiment Name: At_Roots__P Parameter: Organism Value: A. thaliana
  misc_feature: MA Experiment 20000185 PARAMETER Experiment Name: At_Roots__P Parameter: Tissue Value: Roots vs. Whole Plant
  misc_feature: MA Experiment ID: 20000264 Result: Up-regulated in Transcription
  misc_feature: MA Experiment 20000264 PARAMETER Experiment Name: At_Open_Flower_P Parameter: Age (day) Value: 21
  misc_feature: MA Experiment 20000264 PARAMETER Experiment Name: At_Open_Flower_P Parameter: Plant Line Value: WS
  misc_feature: MA Experiment 20000264 PARAMETER Experiment Name: At_Open_Flower_P Parameter: Tissue Value: Open Flower vs. Whole Plant
  misc_feature: MA Experiment ID: 20000265 Result: Up-regulated in Transcription
  misc_feature: MA Experiment 20000265 PARAMETER Experiment Name: At_Open_Flower_P Parameter: Age (day) Value: 21
  misc_feature: MA Experiment 20000265 PARAMETER Experiment Name: At_Open_Flower_P Parameter: Plant Line Value: WS
  misc_feature: MA Experiment 20000265 PARAMETER Experiment Name: At_Open_Flower_P Parameter: Tissue Value: Closed Flower vs. Whole Plant
  misc_feature: MA Experiment ID: 20000286 Result: Up-regulated in Transcription
  misc_feature: MA Experiment 20000286 PARAMETER Experiment Name: At_Open_Flower_P Parameter: Age (day) Value: 21
  misc_feature: MA Experiment 20000286 PARAMETER Experiment Name: At_Open_Flower_P Parameter: Plant Line Value: WS
  misc_feature: MA Experiment 20000286 PARAMETER Experiment Name: At_Open_Flower_P Parameter: Tissue Value: Half Open vs. Whole Plant
  misc_feature: MA Experiment ID: 20000439 Result: Up-regulated in Transcription
  misc_feature: MA Experiment 20000439 PARAMETER Experiment Name: At_Roots__P Parameter: Age (day) Value: 14 vs. 21
  misc_feature: MA Experiment 20000439 PARAMETER Experiment Name: At_Roots__P Parameter: Organism Value: A. thaliana
  misc_feature: MA Experiment 20000439 PARAMETER Experiment Name: At_Roots__P Parameter: Tissue Value: Roots vs. Whole Plant
  misc_feature: MA Experiment ID: 20000794 Result: Up-regulated in Transcription
  misc_feature: MA Experiment 20000794 PARAMETER Experiment Name: At_Petals_P Parameter: Age (day) Value: 23-25 days
  misc_feature: MA Experiment 20000794 PARAMETER Experiment Name: At_Petals_P Parameter: Plant Line Value: WS
  misc_feature: MA Experiment 20000794 PARAMETER Experiment Name: At_Petals_P Parameter: Tissue Value: Petals vs. Whole plant
  misc_feature: MA Experiment ID: 20001557 Result: Down-regulated in Transcription
  misc_feature: MA Experiment 20001557 PARAMETER Experiment Name: At_Drought_Soil_Dry_P Parameter: Age (day) Value: 27
  misc_feature: MA Experiment 20001557 PARAMETER Experiment Name: At_Drought_Soil_Dry_P Parameter: Organism Value: A. thaliana
  misc_feature: MA Experiment 20001557 PARAMETER Experiment Name: At_Drought_Soil_Dry_P Parameter: Plant Line Value: WS
  misc_feature: MA Experiment 20001557 PARAMETER Experiment Name: At_Drought_Soil_Dry_P Parameter: Post Timepoint (hr) Value: 3
  misc_feature: MA Experiment 20001557 PARAMETER Experiment Name: At_Drought_Soil_Dry_P Parameter: Post-Treatment Value: Re-Water vs. No Drought
  misc_feature: MA Experiment 20001557 PARAMETER Experiment Name: At_Drought_Soil_Dry_P Parameter: Timepoint (day) Value: 13
  misc_feature: MA Experiment 20001557 PARAMETER Experiment Name: At_Drought_Soil_Dry_P Parameter: Treatment Value: Drought vs. No Drought
  misc_feature: MA Experiment ID: 20001558 Result: Down-regulated in Transcription
  misc_feature: MA Experiment 20001558 PARAMETER Experiment Name: At_Drought_Soil_Dry_P Parameter: Age (day) Value: 27
  misc_feature: MA Experiment 20001558 PARAMETER Experiment Name: At_Drought_Soil_Dry_P Parameter: Organism Value: A. thaliana
  misc_feature: MA Experiment 20001558 PARAMETER Experiment Name: At_Drought_Soil_Dry_P Parameter: Plant Line Value: WS
  misc_feature: MA Experiment 20001558 PARAMETER Experiment Name: At_Drought_Soil_Dry_P Parameter: Post Timepoint (hr) Value: 6
  misc_feature: MA Experiment 20001558 PARAMETER Experiment Name: At_Drought_Soil_Dry_P Parameter: Post-Treatment Value: Re-Water vs. No Drought
  misc_feature: MA Experiment 20001558 PARAMETER Experiment Name: At_Drought_Soil_Dry_P Parameter: Timepoint (day) Value: 13
  misc_feature: MA Experiment 20001558 PARAMETER Experiment Name: At_Drought_Soil_Dry_P Parameter: Treatment Value: Drought vs. No Drought
  misc_feature: MA Experiment ID: 20001905 Result: Up-regulated in Transcription
  misc_feature: MA Experiment 20001905 PARAMETER Experiment Name: At_Drought_Reproduction_P Parameter: Age (day) Value: 40
  misc_feature: MA Experiment 20001905 PARAMETER Experiment Name: At_Drought_Reproduction_P Parameter: Organism Value: A. thaliana
  misc_feature: MA Experiment 20001905 PARAMETER Experiment Name: At_Drought_Reproduction_P Parameter: Plant Line Value: WS
  misc_feature: MA Experiment 20001905 PARAMETER Experiment Name: At_Drought_Reproduction_P Parameter: Timepoint (day) Value: 10
  misc_feature: MA Experiment 20001905 PARAMETER Experiment Name: At_Drought_Reproduction_P Parameter: Tissue Value: Rosettes
  misc_feature: MA Experiment 20001905 PARAMETER Experiment Name: At_Drought_Reproduction_P Parameter: Treatment Value: Drought vs. No Drought
  misc_feature: MA Experiment ID: 20001911 Result: Down-regulated in Transcription
  misc_feature: MA Experiment 20001911 PARAMETER Experiment Name: At_Drought_Reproduction_P Parameter: Age (day) Value: 40
  misc_feature: MA Experiment 20001911 PARAMETER Experiment Name: At_Drought_Reproduction_P Parameter: Organism Value: A. thaliana
  misc_feature: MA Experiment 20001911 PARAMETER Experiment Name: At_Drought_Reproduction_P Parameter: Plant Line Value: WS
  misc_feature: MA Experiment 20001911 PARAMETER Experiment Name: At_Drought_Reproduction_P Parameter: Timepoint (day) Value: 10
  misc_feature: MA Experiment 20001911 PARAMETER Experiment Name: At_Drought_Reproduction_P Parameter: Tissue Value: Flowers
  misc_feature: MA Experiment 20001911 PARAMETER Experiment Name: At_Drought_Reproduction_P Parameter: Treatment Value: Drought vs. No Drought
gggattcccacgtttttcatcacttgtgttccttaactatgtgaccatgtttttatccaatgacaacacagatcttttgaacactgacctttcctcatttaatgttttaccaacagagagtactagtatctctactgagaaactctatcaagttggctcttaagcagctaaagaactggatggctccggagaaggcaaagacttctctaacaacgtttcctgcatccgcggagattgtgtctgagcctcttggtgttgtgctagtgatctcggcttggaactatccttttctgttgtctattgatcctgttattggtgcaatttctgctgggaatgctgttgttttaaagccatcagaattggctccagcttcgtcagctctgctcactaagttactggaacagtatcttgatccttctgcggtgcgagttgtcgaaggagctgttaccgaaacaagtgctctgctagagcagaagtgggacaagatattctacacaggtagttcaaaaatcggacgtgtcataatggcggcagctgcgaagcatctcacaccggttgttctagagcttggaggaaaatctcctgtcgttgtagactcggataccgatttgaaagttaccgtcaggcggataatcgtaggcaaatggggttgtaacaacggacaggcgtgcgtttcgccggactatatcttgacgacaaaagaatatgctcctaaattgattgatgccatgaagcttgaattggagaaattttatgggaagaaccctatagagtcgaaagatatgtcacgtatcgtaaactcgaatcactttgatcgcttgtctaagttgttagacgagaaggaagtttctgacaaaattgtctatggtggtgaaaaggacagagaaaacttgaaaattgctccgacaatcttgctcgatgtaccattagattctctgatcatgagtgaagaaatatttggccctctccttccaatcctcacgcttaacaacttggaagagagctttgacgtgattcgttctcgacctaagccacttgcggcatacttgtttacacataacaagaagttgaaagagagattcgcagcgacagtctccgctggaggcatagtagtcaatgacatagctgttcatcttgcacttcacacattgccattcggaggagttggtgaaagtggaatgggtgcttaccatggtaaattctcatttgatgcttttagtcacaagaaggcggttctctacagaagccttttcggtgattcagccgtcaggtatccgccatactcgagaggaaagcttagattgttaaaagcccttgtcgacagcaatatattcgatttattcaaagtccttctcggtttagcttaaacggtaaaaagaccgaggacacttccctttgtaccttatttacttgttttatttttcaaacatggacttagttggttgatatgttttggtttggtgttgattctatgaatattgaagttgataaataaaagattttcggttgattatg

SEQ ID NO: 74728 - protein, 421 aa, Arabidopsis thaliana
  peptide (1)..(421): Ceres Seq. ID no. 5679236
  misc_feature (9)..(382): Pfam Name: Aldehyde dehydrogenase family Pfam Description: Aldehyde dehydrogenase family
  misc_feature (9)..(421): Homolog of NCBI NO: 15219358 NR Description: aldehyde dehydrogenase, putative; protein id: supported by cDNA: 1141., supported by cDNA: gi_18175878
  misc_feature (9)..(421): Homolog of NCBI NO: 21536879 NR Description: aldehyde dehydrogenase, putative [Arabidopsis
  misc_feature (9)..(419): Homolog of NCBI NO: 17065918 NR Description: aldehyde dehydrogenase [Craterostigma
  misc_feature (1)..(421): Homolog of NCBI NO: 18418408 NR Description: putative aldehyde dehydrogenase; protein id: supported by cDNA: gi_15451105, supported by cDNA: gi_20148406 thaliana] >gi|15451106|gb|AAK96824.1| putative aldehyde
  misc_feature (1)..(421): Homolog of NCBI NO: 17065876 NR Description: aldehyde dehydrogenase [Arabidopsis thaliana]
  misc_feature (64)..(421): Homolog of NCBI NO: 7484798 NR Description: aldehyde dehydrogenase (NAD+) homolog F10M10.10 - thaliana >gi|4455169|emb|CAB36701.1| putative aldehyde [Arabidopsis thaliana] >gi|7270374|emb|CAB80141.1| putative
  misc_feature (9)..(420): Homolog of NCBI NO: 33317836 NR Description: aldehyde dehydrogenase [Oryza sativa (indica group)] >gi|38344982|emb|CAE02788.2| OSJNBa0011L07.12 [Oryza
  misc_feature (3)..(421): Homolog of NCBI NO: 1666529 NR Description: fatty aldehyde dehydrogenase [Homo sapiens] aldehyde dehydrogenase 10 (fatty aldehyde dehydrogenase) [Homo
  misc_feature (3)..(421): Homolog of NCBI NO: 30585301 NR Description: Homo sapiens aldehyde dehydrogenase 3 family,
  misc_feature (16)..(406): Homolog of NCBI NO: 23126018 NR Description: hypothetical protein [Nostoc punctiforme]
MFYQQRVLVSLLRNSIKLALKQLKNWMAPEKAKTSLTTFPASAEIVSEPLGVVLVISAWNYPFLLSIDPVIGAISAGNAVVLKPSELAPASSALLTKLLEQYLDPSAVRVVEGAVTETSALLEQKWDKIFYTGSSKIGRVIMAAAAKHLTPVVLELGGKSPVVVDSDTDLKVTVRRIIVGKWGCNNGQACVSPDYILTTKEYAPKLIDAMKLELEKFYGKNPIESKDMSRIVNSNHFDRLSKLLDEKEVSDKIVYGGEKDRENLKIAPTILLDVPLDSLIMSEEIFGPLLPILTLNNLEESFDVIRSRPKPLAAYLFTHNKKLKERFAATVSAGGIVVNDIAVHLALHTLPFGGVGESGMGAYHGKFSFDAFSHKKAVLYRSLFGDSAVRYPPYSRGKLRLLKALVDSNIFDLFKVLLGLA

SEQ ID NO: 74729 - protein, 395 aa, Arabidopsis thaliana
  peptide (1)..(395): Ceres Seq. ID no. 5679237
  misc_feature (1)..(356): Pfam Name: Aldehyde dehydrogenase family Pfam Description: Aldehyde dehydrogenase family
  misc_feature (1)..(395): Homolog of NCBI NO: 15219358 NR Description: aldehyde dehydrogenase, putative; protein id: supported by cDNA: 1141., supported by cDNA: gi_18175878
  misc_feature (1)..(395): Homolog of NCBI NO: 21536879 NR Description: aldehyde dehydrogenase, putative [Arabidopsis
  misc_feature (1)..(393): Homolog of NCBI NO: 17065918 NR Description: aldehyde dehydrogenase [Craterostigma
  misc_feature (1)..(395): Homolog of NCBI NO: 18418408 NR Description: putative aldehyde dehydrogenase; protein id: supported by cDNA: gi_15451105, supported by cDNA: gi_20148406 thaliana] >gi|15451106|gb|AAK96824.1| putative aldehyde
  misc_feature (1)..(395): Homolog of NCBI NO: 17065876 NR Description: aldehyde dehydrogenase [Arabidopsis thaliana]
  misc_feature (38)..(395): Homolog of NCBI NO: 7484798 NR Description: aldehyde dehydrogenase (NAD+) homolog F10M10.10 - thaliana >gi|4455169|emb|CAB36701.1| putative aldehyde [Arabidopsis thaliana] >gi|7270374|emb|CAB80141.1| putative
  misc_feature (1)..(394): Homolog of NCBI NO: 33317836 NR Description: aldehyde dehydrogenase [Oryza sativa (indica group)] >gi|38344982|emb|CAE02788.2| OSJNBa0011L07.12 [Oryza
  misc_feature (1)..(395): Homolog of NCBI NO: 1666529 NR Description: fatty aldehyde dehydrogenase [Homo sapiens] aldehyde dehydrogenase 10 (fatty aldehyde dehydrogenase) [Homo
  misc_feature (1)..(395): Homolog of NCBI NO: 30585301 NR Description: Homo sapiens aldehyde dehydrogenase 3 family,
  misc_feature (1)..(380): Homolog of NCBI NO: 23126018 NR Description: hypothetical protein [Nostoc punctiforme]
MAPEKAKTSLTTFPASAEIVSEPLGVVLVISAWNYPFLLSIDPVIGAISAGNAVVLKPSELAPASSALLTKLLEQYLDPSAVRVVEGAVTETSALLEQKWDKIFYTGSSKIGRVIMAAAAKHLTPVVLELGGKSPVVVDSDTDLKVTVRRIIVGKWGCNNGQACVSPDYILTTKEYAPKLIDAMKLELEKFYGKNPIESKDMSRIVNSNHFDRLSKLLDEKEVSDKIVYGGEKDRENLKIAPTILLDVPLDSLIMSEEIFGPLLPILTLNNLEESFDVIRSRPKPLAAYLFTHNKKLKERFAATVSAGGIVVNDIAVHLALHTLPFGGVGESGMGAYHGKFSFDAFSHKKAVLYRSLFGDSAVRYPPYSRGKLRLLKALVDSNIFDLFKVLLGLA

SEQ ID NO: 74730 - protein, 280 aa, Arabidopsis thaliana
  peptide (1)..(280): Ceres Seq. ID no. 5679238
  misc_feature (1)..(241): Pfam Name: Aldehyde dehydrogenase family Pfam Description: Aldehyde dehydrogenase family
  misc_feature (1)..(280): Homolog of NCBI NO: 15219358 NR Description: aldehyde dehydrogenase, putative; protein id: supported by cDNA: 1141., supported by cDNA: gi_18175878
  misc_feature (1)..(280): Homolog of NCBI NO: 21536879 NR Description: aldehyde dehydrogenase, putative [Arabidopsis
  misc_feature (1)..(278): Homolog of NCBI NO: 17065918 NR Description: aldehyde dehydrogenase [Craterostigma
  misc_feature (1)..(280): Homolog of NCBI NO: 18418408 NR Description: putative aldehyde dehydrogenase; protein id: supported by cDNA: gi_15451105, supported by cDNA: gi_20148406 thaliana] >gi|15451106|gb|AAK96824.1| putative aldehyde
  misc_feature (1)..(280): Homolog of NCBI NO: 17065876 NR Description: aldehyde dehydrogenase [Arabidopsis thaliana]
  misc_feature (1)..(280): Homolog of NCBI NO: 7484798 NR Description: aldehyde dehydrogenase (NAD+) homolog F10M10.10 - thaliana >gi|4455169|emb|CAB36701.1| putative aldehyde [Arabidopsis thaliana] >gi|7270374|emb|CAB80141.1| putative
  misc_feature (1)..(279): Homolog of NCBI NO: 33317836 NR Description: aldehyde dehydrogenase [Oryza sativa (indica group)] >gi|38344982|emb|CAE02788.2| OSJNBa0011L07.12 [Oryza
  misc_feature (1)..(280): Homolog of NCBI NO: 1666529 NR Description: fatty aldehyde dehydrogenase [Homo sapiens] aldehyde dehydrogenase 10 (fatty aldehyde dehydrogenase) [Homo
  misc_feature (1)..(280): Homolog of NCBI NO: 30585301 NR Description: Homo sapiens aldehyde dehydrogenase 3 family,
  misc_feature (1)..(265): Homolog of NCBI NO: 23126018 NR Description: hypothetical protein [Nostoc punctiforme]
MAAAAKHLTPVVLELGGKSPVVVDSDTDLKVTVRRIIVGKWGCNNGQACVSPDYILTTKEYAPKLIDAMKLELEKFYGKNPIESKDMSRIVNSNHFDRLSKLLDEKEVSDKIVYGGEKDRENLKIAPTILLDVPLDSLIMSEEIFGPLLPILTLNNLEESFDVIRSRPKPLAAYLFTHNKKLKERFAATVSAGGIVVNDIAVHLALHTLPFGGVGESGMGAYHGKFSFDAFSHKKAVLYRSLFGDSAVRYPPYSRGKLRLLKALVDSNIFDLFKVLLGLA

SEQ ID NO: 74731 - DNA, 666 bp, Arabidopsis thaliana
  misc_feature (1)..(666): Ceres Seq. ID no. 5679270
  misc_feature: MA Experiment ID: 108434 Result: Down-regulated in Transcription
  misc_feature: MA Experiment 108434 PARAMETER Experiment Name: At_Root_Tips_cDNA_P Parameter: Tissue Value: Root Tips
  misc_feature: MA Experiment ID: 108595 Result: Down-regulated in Transcription
  misc_feature: MA Experiment 108595 PARAMETER Experiment Name: At_Ler-pi_Ovule_cDNA_P Parameter: Plant Line Value: null
  misc_feature: MA Experiment ID: 108668 Result: Up-regulated in Transcription
  misc_feature: MA Experiment 108668 PARAMETER Experiment Name: At_2mM_SA_cDNA_P Parameter: Plant Line Value: WS
  misc_feature: MA Experiment 108668 PARAMETER Experiment Name: At_2mM_SA_cDNA_P Parameter: Timepoint (hr) Value: 6
  misc_feature: MA Experiment 108668 PARAMETER Experiment Name: At_2mM_SA_cDNA_P Parameter: Treatment Value: 2mM SA vs. No Treatment
  misc_feature: MA Experiment ID: 20000090 Result: Up-regulated in Transcription
  misc_feature: MA Experiment ID: 20000111 Result: Down-regulated in Transcription
  misc_feature: MA Experiment 20000111 PARAMETER Experiment Name: At_42deg_Heat_cDNA_P Parameter: Temperature (deg C) Value: 42 vs. 22
  misc_feature: MA Experiment 20000111 PARAMETER Experiment Name: At_42deg_Heat_cDNA_P Parameter: Timepoint (hr) Value: 6
  misc_feature: MA Experiment 20000111 PARAMETER Experiment Name: At_42deg_Heat_cDNA_P Parameter: Tissue Value: Aerial
  misc_feature: MA Experiment ID: 20000113 Result: Down-regulated in Transcription
  misc_feature: MA Experiment 20000113 PARAMETER Experiment Name: At_42deg_Heat_cDNA_P Parameter: Temperature (deg C) Value: 42 vs. 22
  misc_feature: MA Experiment 20000113 PARAMETER Experiment Name: At_42deg_Heat_cDNA_P Parameter: Timepoint (hr) Value: 8
  misc_feature: MA Experiment 20000113 PARAMETER Experiment Name: At_42deg_Heat_cDNA_P Parameter: Tissue Value: Aerial
  misc_feature: MA Experiment ID: 20000180 Result: Up-regulated in Transcription
  misc_feature: MA Experiment 20000180 PARAMETER Experiment Name: At_Germinating_Seeds_P Parameter: Age (hr) Value: 24 vs. 0
  misc_feature: MA Experiment 20000180 PARAMETER Experiment Name: At_Germinating_Seeds_P Parameter: Tissue Value: Germinating Seeds
  misc_feature: MA Experiment ID: 20000182 Result: Up-regulated in Transcription
  misc_feature: MA Experiment 20000182 PARAMETER Experiment Name: At_2mM_SA_P Parameter: Age (day) Value: 14
  misc_feature: MA Experiment 20000182 PARAMETER Experiment Name: At_2mM_SA_P Parameter: Organism Value: A. thaliana
  misc_feature: MA Experiment 20000182 PARAMETER Experiment Name: At_2mM_SA_P Parameter: Plant Line Value: WS
  misc_feature: MA Experiment 20000182 PARAMETER Experiment Name: At_2mM_SA_P Parameter: Timepoint (hr) Value: 6
  misc_feature: MA Experiment 20000182 PARAMETER Experiment Name: At_2mM_SA_P Parameter: Tissue Value: Aerial
  misc_feature: MA Experiment 20000182 PARAMETER Experiment Name: At_2mM_SA_P Parameter: Treatment Value: 2mM SA vs. No Treatment
  misc_feature: MA Experiment ID: 20000234 Result: Down-regulated in Transcription
  misc_feature: MA Experiment 20000234 PARAMETER Experiment Name: At_Siliques_P Parameter: Age (day) Value: 21
  misc_feature: MA Experiment 20000234 PARAMETER Experiment Name: At_Siliques_P Parameter: Organism Value: A. thaliana
  misc_feature: MA Experiment 20000234 PARAMETER Experiment Name: At_Siliques_P Parameter: Plant Line Value: WS
  misc_feature: MA Experiment 20000234 PARAMETER Experiment Name: At_Siliques_P Parameter: Tissue Value: Less Than 5mm Siliques vs. Whole Plant
  misc_feature: MA Experiment ID: 20000235 Result: Down-regulated in Transcription
  misc_feature: MA Experiment 20000235 PARAMETER Experiment Name: At_Siliques_P Parameter: Age (day) Value: 21
  misc_feature: MA Experiment 20000235 PARAMETER Experiment Name: At_Siliques_P Parameter: Organism Value: A. thaliana
  misc_feature: MA Experiment 20000235 PARAMETER Experiment Name: At_Siliques_P Parameter: Plant Line Value: WS
  misc_feature: MA Experiment 20000235 PARAMETER Experiment Name: At_Siliques_P Parameter: Tissue Value: 5-10mm Siliques vs. Whole Plant
  misc_feature: MA Experiment ID: 20000286 Result: Down-regulated in Transcription
  misc_feature: MA Experiment 20000286 PARAMETER Experiment Name: At_Open_Flower_P Parameter: Age (day) Value: 21
  misc_feature: MA Experiment 20000286 PARAMETER Experiment Name: At_Open_Flower_P Parameter: Plant Line Value: WS
  misc_feature: MA Experiment 20000286 PARAMETER Experiment Name: At_Open_Flower_P Parameter: Tissue Value: Half Open vs. Whole Plant
  misc_feature: MA Experiment ID: 20001905 Result: Down-regulated in Transcription
  misc_feature: MA Experiment 20001905 PARAMETER Experiment Name: At_Drought_Reproduction_P Parameter: Age (day) Value: 40
  misc_feature: MA Experiment 20001905 PARAMETER Experiment Name: At_Drought_Reproduction_P Parameter: Organism Value: A. thaliana
  misc_feature: MA Experiment 20001905 PARAMETER Experiment Name: At_Drought_Reproduction_P Parameter: Plant Line Value: WS
  misc_feature: MA Experiment 20001905 PARAMETER Experiment Name: At_Drought_Reproduction_P Parameter: Timepoint (day) Value: 10
  misc_feature: MA Experiment 20001905 PARAMETER Experiment Name: At_Drought_Reproduction_P Parameter: Tissue Value: Rosettes
  misc_feature: MA Experiment 20001905 PARAMETER Experiment Name: At_Drought_Reproduction_P Parameter: Treatment Value: Drought vs. No Drought
acgcacacagagttctcttcttcgtcctagtttcttctattccaggtgagaagaaaaaatggcgtttgtgaccactgcggaagtgtgtgacgcgaatcaagagatgattcgaagtggccagctccgagctctgcaacccgtttttcagatttatggtcgtcgtcaaatattttcaggtccagtagttactgttaaagtctttgaagacaatggcttaatccgtcacttcctcgaagagaaaggcaatggtagagttcttgtggtggatggtggagggagtttacgctgtgcgatactaggaggaaacccggtcgtacaagcgcagaacaacggatgggcagggatcatagtgaatggatgcatcagagacgttgatgagatcaatggttgcgacattggagtgagagctttagcttctcatccaataaaggctagtaagaaaggacttggtgaacaaagagtctctttgaacattgcaggcactcggatatgcgatggcgaatggctttatgcagatactgatggtatccttgtttctcagattgaattatccgtttaaaaggacacaagtgatgttgttgatttgttaaaatctgtaagctactacttttgtgctttgtgtttctgtaatggctatcagagtaaaagttggcttctttgaatatg

SEQ ID NO: 74732 - protein, 166 aa, Arabidopsis thaliana; identical to SEQ ID NO: 21181
  peptide (1)..(166): Ceres Seq. ID no. 5679271
  misc_feature (2)..(159): Pfam Name: Demethylmenaquinone methyltransferase Pfam Description: Demethylmenaquinone methyltransferase
  misc_feature (1)..(166): Homolog of NCBI NO: 15232963 NR Description: expressed protein; protein id: At3g02770.1, by cDNA: 29093. [Arabidopsis thaliana]
  misc_feature (1)..(166): Homolog of NCBI NO: 15237348 NR Description: expressed protein; protein id: At5g16450.1, by cDNA: 13819. [Arabidopsis thaliana]
  misc_feature (1)..(166): Homolog of NCBI NO: 21537415 NR Description: S-adenosylmethionine:2-demethylmenaquinone
  misc_feature (4)..(166): Homolog of NCBI NO: 34910724 NR Description: S-adenosylmethionine:2-demethylmenaquinone
  misc_feature (1)..(166): Homolog of NCBI NO: 15241161 NR Description: expressed protein; protein id: At5g56260.1
  misc_feature (4)..(164): Homolog of NCBI NO: 17546073 NR Description: PROBABLE METHYLTRANSFERASE PROTEIN [Ralstonia solanacearum]
  misc_feature (6)..(164): Homolog of NCBI NO: 22978085 NR Description: hypothetical protein [Ralstonia metallidurans]
  misc_feature (1)..(164): Homolog of NCBI NO: 22982141 NR Description: hypothetical protein [Burkholderia fungorum]
  misc_feature (1)..(160): Homolog of NCBI NO: 34497095 NR Description: S-adenosylmethionine:2-demethylmenaquinone
  misc_feature (1)..(160): Homolog of NCBI NO: 15596969 NR Description: probable methyltransferase [Pseudomonas

SEQ ID NO: 74733 - protein, 151 aa, Arabidopsis thaliana; identical to SEQ ID NO: 21182
  peptide (1)..(151): Ceres Seq. ID no. 5679272
  misc_feature (1)..(144): Pfam Name: Demethylmenaquinone methyltransferase Pfam Description: Demethylmenaquinone methyltransferase
  misc_feature (1)..(151): Homolog of NCBI NO: 15232963 NR Description: expressed protein; protein id: At3g02770.1, by cDNA: 29093. [Arabidopsis thaliana]
  misc_feature (1)..(151): Homolog of NCBI NO: 15237348 NR Description: expressed protein; protein id: At5g16450.1, by cDNA: 13819. [Arabidopsis thaliana]
  misc_feature (1)..(151): Homolog of NCBI NO: 21537415 NR Description: S-adenosylmethionine:2-demethylmenaquinone
  misc_feature (1)..(151): Homolog of NCBI NO: 34910724 NR Description: S-adenosylmethionine:2-demethylmenaquinone
  misc_feature (1)..(151): Homolog of NCBI NO: 15241161 NR Description: expressed protein; protein id: At5g56260.1
  misc_feature (1)..(149): Homolog of NCBI NO: 17546073 NR Description: PROBABLE METHYLTRANSFERASE PROTEIN [Ralstonia solanacearum]
  misc_feature (1)..(149): Homolog of NCBI NO: 22978085 NR Description: hypothetical protein [Ralstonia metallidurans]
  misc_feature (1)..(149): Homolog of NCBI NO: 22982141 NR Description: hypothetical protein [Burkholderia fungorum]
  misc_feature (1)..(145): Homolog of NCBI NO: 34497095 NR Description: S-adenosylmethionine:2-demethylmenaquinone
  misc_feature (1)..(145): Homolog of NCBI NO: 15596969 NR Description: probable methyltransferase [Pseudomonas

SEQ ID NO: 74734 - DNA, 1166 bp, Arabidopsis thaliana
  misc_feature (1)..(1166): Ceres Seq. ID no. 5679288
  misc_feature: MA Experiment ID: 108434 Result: Up-regulated in Transcription
  misc_feature: MA Experiment 108434 PARAMETER Experiment Name: At_Root_Tips_cDNA_P Parameter: Tissue Value: Root Tips
  misc_feature: MA Experiment ID: 108462 Result: Down-regulated in Transcription
  misc_feature: MA Experiment 108462 PARAMETER Experiment Name: At_Germinating_Seeds_cDNA_P Parameter: Age (day) Value: 2 vs. 0
  misc_feature: MA Experiment 108462 PARAMETER Experiment Name: At_Germinating_Seeds_cDNA_P Parameter: Tissue Value: Germinating Seeds
  misc_feature: MA Experiment ID: 108463 Result: Down-regulated in Transcription
  misc_feature: MA Experiment 108463 PARAMETER Experiment Name: At_Germinating_Seeds_cDNA_P Parameter: Age (day) Value: 3 vs. 0
  misc_feature: MA Experiment 108463 PARAMETER Experiment Name: At_Germinating_Seeds_cDNA_P Parameter: Tissue Value: Germinating Seeds
  misc_feature: MA Experiment ID: 108464 Result: Down-regulated in Transcription
  misc_feature: MA Experiment 108464 PARAMETER Experiment Name: At_Germinating_Seeds_cDNA_P Parameter: Age (day) Value: 4 vs. 0
  misc_feature: MA Experiment 108464 PARAMETER Experiment Name: At_Germinating_Seeds_cDNA_P Parameter: Tissue Value: Germinating Seeds
  misc_feature: MA Experiment ID: 20000111 Result: Down-regulated in Transcription
  misc_feature: MA Experiment 20000111 PARAMETER Experiment Name: At_42deg_Heat_cDNA_P Parameter: Temperature (deg C) Value: 42 vs. 22
  misc_feature: MA Experiment 20000111 PARAMETER Experiment Name: At_42deg_Heat_cDNA_P Parameter: Timepoint (hr) Value: 6
  misc_feature: MA Experiment 20000111 PARAMETER Experiment Name: At_42deg_Heat_cDNA_P Parameter: Tissue Value: Aerial
  misc_feature: MA Experiment ID: 20000794 Result: Up-regulated in Transcription
  misc_feature: MA Experiment 20000794 PARAMETER Experiment Name: At_Petals_P Parameter: Age (day) Value: 23-25 days
  misc_feature: MA Experiment 20000794 PARAMETER Experiment Name: At_Petals_P Parameter: Plant Line Value: WS
  misc_feature: MA Experiment 20000794 PARAMETER Experiment Name: At_Petals_P Parameter: Tissue Value: Petals vs. Whole plant
aacttgagatttgagaataagaaaagttgaaatttgtaaaagatatgagaaattagtaaattccagaaacttattagaagcggcggatcgaattcgcgacgagcgttccattagggtttcgaatcaacatcaacaaacgacgagagaaaactttttaaaacatgtacggaggcgattttgacggcaacgctgctttcgccggcggcggcttcatgccttctcaggcgactacgcaagcccatgaatcctcatcttccctcaagaaccgcgatgtacgtaccttgcttcccctgacactgaagcagttgagcagcgcatcaaccactggcgaatcaaatttctctattgatggcgttgatattaaaactgttgtaatcgttggacggatttctagaatggagaacagaatcactcaggtcgattttgttgttgatgacggtacaggctgggttgattgtgtcagatggtgtcacgctcggcaagaaactgaagaaatggaagcagtcaagctgggaatgtatgttcgcttacatggacacctgaaaatttttcaagggaaacgatctgtgaatgttttttcagtcaggcctgtcactgacttcaatgagattgtacaccactttaccgagtgtatgtatgtccacatgtacaacaccaagttacggggtggttctattactcaagatactgctactcctaggccccaaatgccatattcaacaatgccaacccctgcaaagccctaccaaaccggtccatctaatcagttcccgaaccaattcaatgattcaatgcatggtgtaaagcagacggtcttgaattacctgaatcaacctatgcacattgtatctgaagctggagttcactgtgatataattgcccgtgaactcaggattccgctgcttcaagtcaaggaagcgttagaacagctctcaaacgatggttgcatatactcgactttggacgagacatgcttcaaatcgactgctaacgcttgatgaaaattgatttatatgtcaacacatatcaatcctcctctcatgttcaaaagtcttttgtataggccctaaggtaggacaatatgtagttttaagactaaaaatctttcttatggcttttggatttttttaaagggaactaaactcaaaagttcaaaatcattttcg

SEQ ID NO: 74735 - protein, 278 aa, Arabidopsis thaliana; identical to SEQ ID NO: 41072
  peptide (1)..(278): Ceres Seq. ID no. 5679289
  misc_feature (70)..(144): Pfam Name: OB-fold nucleic acid binding domain Pfam Description: OB-fold nucleic acid binding domain
  misc_feature (1)..(278): Homolog of NCBI NO: 18396383 NR Description: putative replication factor A; protein id: supported by cDNA: 118359. [Arabidopsis thaliana] putative replication factor A [Arabidopsis thaliana]
  misc_feature (1)..(278): Homolog of NCBI NO: 6728969 NR Description: putative replication factor A [Arabidopsis
  misc_feature (6)..(273): Homolog of NCBI NO: 31790111 NR Description: RPA 32kDa [Pisum sativum]
  misc_feature (6)..(166): Homolog of NCBI NO: 25347925 NR Description: probable replication protein A1 [imported] -
  misc_feature (196)..(273): Homolog of NCBI NO: 25347925 NR Description: probable replication protein A1 [imported] -
  misc_feature (6)..(273): Homolog of NCBI NO: 18400560 NR Description: putative replication protein A1; protein id: supported by cDNA: 7536. [Arabidopsis thaliana] putative replication protein A1 [Arabidopsis thaliana]
  misc_feature (17)..(277): Homolog of NCBI NO: 13516746 NR Description: replication protein A 30kDa [Oryza sativa
  misc_feature (17)..(277): Homolog of NCBI NO: 9801268 NR Description: replication protein A2 [Oryza sativa]
  misc_feature (2)..(269): Homolog of NCBI NO: 40747525 NR Description: hypothetical protein AN0582.2 [Aspergillus
  misc_feature (1)..(269): Homolog of NCBI NO: 21627816 NR Description: possible replication factor-a protein

SEQ ID NO: 74736 - protein, 261 aa, Arabidopsis thaliana; identical to SEQ ID NO: 41073
  peptide (1)..(261): Ceres Seq. ID no. 5679290
  misc_feature (53)..(127): Pfam Name: OB-fold nucleic acid binding domain Pfam Description: OB-fold nucleic acid binding domain
  misc_feature (1)..(261): Homolog of NCBI NO: 18396383 NR Description: putative replication factor A; protein id: supported by cDNA: 118359. [Arabidopsis thaliana] putative replication factor A [Arabidopsis thaliana]
  misc_feature (1)..(261): Homolog of NCBI NO: 6728969 NR Description: putative replication factor A [Arabidopsis
  misc_feature (1)..(256): Homolog of NCBI NO: 31790111 NR Description: RPA 32kDa [Pisum sativum]
  misc_feature (1)..(149): Homolog of NCBI NO: 25347925 NR Description: probable replication protein A1 [imported] -
  misc_feature (179)..(256): Homolog of NCBI NO: 25347925 NR Description: probable replication protein A1 [imported] -
  misc_feature (1)..(256): Homolog of NCBI NO: 18400560 NR Description: putative replication protein A1; protein id: supported by cDNA: 7536. [Arabidopsis thaliana] putative replication protein A1 [Arabidopsis thaliana]
  misc_feature (1)..(260): Homolog of NCBI NO: 13516746 NR Description: replication protein A 30kDa [Oryza sativa
  misc_feature (1)..(260): Homolog of NCBI NO: 9801268 NR Description: replication protein A2 [Oryza sativa]
  misc_feature (1)..(252): Homolog of NCBI NO: 40747525 NR Description: hypothetical protein AN0582.2 [Aspergillus
  misc_feature (1)..(252): Homolog of NCBI NO: 21627816 NR Description: possible replication factor-a protein

SEQ ID NO: 74737 - protein, 200 aa, Arabidopsis thaliana; identical to SEQ ID NO: 41074
  peptide (1)..(200): Ceres Seq. ID no. 5679291
  misc_feature (1)..(66): Pfam Name: OB-fold nucleic acid binding domain Pfam Description: OB-fold nucleic acid binding domain
  misc_feature (1)..(200): Homolog of NCBI NO: 18396383 NR Description: putative replication factor A; protein id: supported by cDNA: 118359. [Arabidopsis thaliana] putative replication factor A [Arabidopsis thaliana]
  misc_feature (1)..(200): Homolog of NCBI NO: 6728969 NR Description: putative replication factor A [Arabidopsis
  misc_feature (1)..(195): Homolog of NCBI NO: 31790111 NR Description: RPA 32kDa [Pisum sativum]
  misc_feature (1)..(88): Homolog of NCBI NO: 25347925 NR Description: probable replication protein A1 [imported] -
  misc_feature (118)..(195): Homolog of NCBI NO: 25347925 NR Description: probable replication protein A1 [imported] -
  misc_feature (1)..(195): Homolog of NCBI NO: 18400560 NR Description: putative replication protein A1; protein id: supported by cDNA: 7536. [Arabidopsis thaliana] putative replication protein A1 [Arabidopsis thaliana]
  misc_feature (1)..(199): Homolog of NCBI NO: 13516746 NR Description: replication protein A 30kDa [Oryza sativa
  misc_feature (1)..(199): Homolog of NCBI NO: 9801268 NR Description: replication protein A2 [Oryza sativa]
  misc_feature (1)..(191): Homolog of NCBI NO: 40747525 NR Description: hypothetical protein AN0582.2 [Aspergillus
  misc_feature (1)..(191): Homolog of NCBI NO: 21627816 NR Description: possible replication factor-a protein

SEQ ID NO: 74738 - DNA, 1744 bp, Arabidopsis thaliana
  misc_feature (1)..(1744): Ceres Seq. ID no. 5679365
  misc_feature: MA Experiment ID: 108488 Result: Down-regulated in Transcription
  misc_feature: MA Experiment ID: 108595 Result: Down-regulated in Transcription
  misc_feature: MA Experiment 108595 PARAMETER Experiment Name: At_Ler-pi_Ovule_cDNA_P Parameter: Plant Line Value: null
  misc_feature: MA Experiment ID: 20000069 Result: Down-regulated in Transcription
  misc_feature: MA Experiment 20000069 PARAMETER Experiment Name: At_100uM_ABA_Mutants_cDNA_P Parameter: Plant Line Value: CS23
  misc_feature: MA Experiment 20000069 PARAMETER Experiment Name: At_100uM_ABA_Mutants_cDNA_P Parameter: Timepoint (hr) Value: 6
  misc_feature: MA Experiment 20000069 PARAMETER Experiment Name: At_100uM_ABA_Mutants_cDNA_P Parameter: Tissue Value: Aerial
  misc_feature: MA Experiment 20000069 PARAMETER Experiment Name: At_100uM_ABA_Mutants_cDNA_P Parameter: Treatment Value: 100uM ABA vs. No Treatment
  misc_feature: MA Experiment ID: 20000089 Result: Down-regulated in Transcription
  misc_feature: MA Experiment ID: 20000090 Result: Down-regulated in Transcription
  misc_feature: MA Experiment ID: 20000117 Result: Down-regulated in Transcription
  misc_feature: MA Experiment 20000117 PARAMETER Experiment Name: At_100uM_ABA_Mutants_cDNA_P Parameter: Plant Line Value: Columbia
  misc_feature: MA Experiment 20000117 PARAMETER Experiment Name: At_100uM_ABA_Mutants_cDNA_P Parameter: Timepoint (hr) Value: 6
  misc_feature: MA Experiment 20000117 PARAMETER Experiment Name: At_100uM_ABA_Mutants_cDNA_P Parameter: Tissue Value: Aerial
  misc_feature: MA Experiment 20000117 PARAMETER Experiment Name: At_100uM_ABA_Mutants_cDNA_P Parameter: Treatment Value: 100uM ABA vs. No Treatment
  misc_feature: MA Experiment ID: 20000265 Result: Down-regulated in Transcription
  misc_feature: MA Experiment 20000265 PARAMETER Experiment Name: At_Open_Flower_P Parameter: Age (day) Value: 21
  misc_feature: MA Experiment 20000265 PARAMETER Experiment Name: At_Open_Flower_P Parameter: Plant Line Value: WS
  misc_feature: MA Experiment 20000265 PARAMETER Experiment Name: At_Open_Flower_P Parameter: Tissue Value: Closed Flower vs. Whole Plant
  misc_feature: MA Experiment ID: 20001247 Result: Up-regulated in Transcription
  misc_feature: MA Experiment 20001247 PARAMETER Experiment Name: At_Far-red-induction_P Parameter: Age (day) Value: 7
  misc_feature: MA Experiment 20001247 PARAMETER Experiment Name: At_Far-red-induction_P Parameter: Light Value: Far-red vs. White
  misc_feature: MA Experiment 20001247 PARAMETER Experiment Name: At_Far-red-induction_P Parameter: Organism Value: A. thaliana
  misc_feature: MA Experiment 20001247 PARAMETER Experiment Name: At_Far-red-induction_P Parameter: Plant Line Value: Columbia
  misc_feature: MA Experiment 20001247 PARAMETER Experiment Name: At_Far-red-induction_P Parameter: Timepoint (hr) Value: 1
  misc_feature: MA Experiment 20001247 PARAMETER Experiment Name: At_Far-red-induction_P Parameter: Tissue Value: Whole Plant
  misc_feature: MA Experiment ID: 20001554 Result: Down-regulated in Transcription
  misc_feature: MA Experiment 20001554 PARAMETER Experiment Name: At_Drought_Soil_Dry_P Parameter: Age (day) Value: 21
  misc_feature: MA Experiment 20001554 PARAMETER Experiment Name: At_Drought_Soil_Dry_P Parameter: Organism Value: A. thaliana
  misc_feature: MA Experiment 20001554 PARAMETER Experiment Name: At_Drought_Soil_Dry_P Parameter: Plant Line Value: WS
  misc_feature: MA Experiment 20001554 PARAMETER Experiment Name: At_Drought_Soil_Dry_P Parameter: Post Timepoint (hr) Value: None
  misc_feature: MA Experiment 20001554 PARAMETER Experiment Name: At_Drought_Soil_Dry_P Parameter: Post-Treatment Value: None
  misc_feature: MA Experiment 20001554 PARAMETER Experiment Name: At_Drought_Soil_Dry_P Parameter: Timepoint (day) Value: 7
  misc_feature: MA Experiment 20001554 PARAMETER Experiment Name: At_Drought_Soil_Dry_P Parameter: Treatment Value: Drought vs. No Drought
  misc_feature: MA Experiment ID: 20001555 Result: Down-regulated in Transcription
  misc_feature: MA Experiment 20001555 PARAMETER Experiment Name: At_Drought_Soil_Dry_P Parameter: Age (day) Value: 24
  misc_feature: MA Experiment 20001555 PARAMETER Experiment Name: At_Drought_Soil_Dry_P Parameter: Organism Value: A. thaliana
  misc_feature: MA Experiment 20001555 PARAMETER Experiment Name: At_Drought_Soil_Dry_P Parameter: Plant Line Value: WS
  misc_feature: MA Experiment 20001555 PARAMETER Experiment Name: At_Drought_Soil_Dry_P Parameter: Post Timepoint (hr) Value: None
  misc_feature: MA Experiment 20001555 PARAMETER Experiment Name: At_Drought_Soil_Dry_P Parameter: Post-Treatment Value: None
  misc_feature: MA Experiment 20001555 PARAMETER Experiment Name: At_Drought_Soil_Dry_P Parameter: Timepoint (day) Value: 10
  misc_feature: MA Experiment 20001555 PARAMETER Experiment Name: At_Drought_Soil_Dry_P Parameter: Treatment Value: Drought vs. No Drought
  misc_feature: MA Experiment ID: 20001556 Result: Down-regulated in Transcription
  misc_feature: MA Experiment 20001556 PARAMETER Experiment Name: At_Drought_Soil_Dry_P Parameter: Age (day) Value: 26
  misc_feature: MA Experiment 20001556 PARAMETER Experiment Name: At_Drought_Soil_Dry_P Parameter: Organism Value: A. thaliana
  misc_feature: MA Experiment 20001556 PARAMETER Experiment Name: At_Drought_Soil_Dry_P Parameter: Plant Line Value: WS
  misc_feature: MA Experiment 20001556 PARAMETER Experiment Name: At_Drought_Soil_Dry_P Parameter: Post Timepoint (hr) Value: None
  misc_feature: MA Experiment 20001556 PARAMETER Experiment Name: At_Drought_Soil_Dry_P Parameter: Post-Treatment Value: None
  misc_feature: MA Experiment 20001556 PARAMETER Experiment Name: At_Drought_Soil_Dry_P Parameter: Timepoint (day) Value: 12
  misc_feature: MA Experiment 20001556 PARAMETER Experiment Name: At_Drought_Soil_Dry_P Parameter: Treatment Value: Drought vs. No Drought
aaataaatttttagaaaccaaaaaaaaaattgtagagagagaaaaaaaaaactcagaggagagaaagagaagacgacgaagacgaccattttttttttttttgtcaagagagaagacggagacaacaatggcggaagcgaaggaggagaatagggagaaaaacgaagaagaagagagcgtaaagcttttcgtcggacaaattccgaaacatatgtcggaatctcaactcttaacattgtttcaagagttcgctgtcgttgacgaggtcaatatcatcaaggacaagattacacgcgcctctcgaggatgttgttttctgctatgtccatcgagagaagaagcagataagttggtcaatgcttgccataacaagaagacattgcctggggctaacagtctattgcaagtaaagtatgcagatggcgaattagaaaggctagagcataagctatttgttggtatgcttccaaagaatgtctctgaagctgaagttcaatctttattctccaagtacgggaccataaaggatctacagattctaagaggtgctcaacaaacgagcaaaggctgtgcatttctgaagtatgagacaaaagaacaagctgtttccgccatggaatctatcaacggaaaacataaaatggagggttcaactgttcctttagttgtcaaatgggcagacacagaacgagaaagacacacaagaagacttcaaaaggctcaatctcacatcgcccgactagggaacggtgatccaacaaatccctcattgtttggagcattacctatgggttatgtaccaccatataatggatatggttatcatcagcctcctggaacttatggttacatgctaccaccaattcagaaccaagctgcattttccaatatgattgcacaaccaaaccaaggtaataacaatgcattgcaaggaacatcgcctgactctgtgccgcctcgtttggcccgtagaaactttcctatgcctcctggaaactacatgggatctggttatcctgctatgcgaggtcatccttttccatttgcttatcccagaggaattgttagtcctcgccctctaagtagctctcctggatctatatcacctggcatgtcaacacctttaggcattggtttgagttctgtggttcaaaccgaaggtccagaaggtgcaaatctgtttatctataacatacctcgggagttcggggatcaagaactcgcggctgcatttcaatctttcggtattgttctgagtgccaaggtttttgtagacaaagccactggtgtaagcaaatgtttcggttttgttagctatgactcacaagccgcggcgcagaacgctattgacatgatgaatggtcgccatttaggcggtaagaaattgaaagtccagcttaagagagacagcaacaatggccaaccgagtagtaatccttccttaatctcctgaaagtgctaaaactcctcctctcttcaacttgaaagttcataacagaaaaaaacaaaaaacatattcgggcttatgggtcgacccggttcaaagatttggaccgatcttgaatggatgcatctgtatagatccaaatctcattgtgggtcaaaatgtcccatcaactcaaaagctccaaactggatcatctcttttctttttttttttaatctgcaaataacaatttgtaatttatgtttattattgaaactcatgtagaaattttatgatttattaacattaaattcattg

SEQ ID NO: 74739 - protein, 483 aa, Arabidopsis thaliana; identical to SEQ ID NO: 40501
  peptide (1)..(483): Ceres Seq. ID no. 5679366
  misc_feature (62)..(134): Pfam Name: RNA recognition motif. (a.k.a. RRM, RBD, or RNP domain) Pfam Description: RNA recognition motif. (a.k.a. RRM, RBD, or RNP
  misc_feature (43)..(483): Homolog of NCBI NO: 18412143 NR Description: RNA-binding CELF protein, putative; protein id: supported by cDNA: 114653. [Arabidopsis thaliana]
  misc_feature (43)..(476): Homolog of NCBI NO: 7488303 NR Description: ribonucleoprotein homolog T4I9.1 - Arabidopsis >gi|3924594|gb|AAC79095.1| putative ribonucleoprotein thaliana] >gi|4262139|gb|AAD14439.1| putative ribonucleoprotein
  misc_feature (43)..(440): Homolog of NCBI NO: 30679366 NR Description: RNA-binding protein, putative [Arabidopsis >gi|17529054|gb|AAL38737.1| putative ribonucleoprotein
  misc_feature (52)..(479): Homolog of NCBI NO: 22329313 NR Description: RNA-binding CELF protein, putative; protein id: [Arabidopsis thaliana] >gi|26449591|dbj|BAC41921.1| putative [Arabidopsis thaliana] >gi|28950997|gb|AAO63422.1| At1g03457
  misc_feature (55)..(479): Homolog of NCBI NO: 25386552 NR Description: protein F21B7.8 [imported] - Arabidopsis thaliana
  misc_feature (56)..(475): Homolog of NCBI NO: 34907248 NR Description: putative ribonucleoprotein [Oryza sativa cultivar- group)] >gi|20160777|dbj|BAB89718.1| putative
  misc_feature (52)..(337): Homolog of NCBI NO: 7488302 NR Description: ribonucleoprotein homolog F21B7.26 - Arabidopsis
  misc_feature (58)..(470): Homolog of NCBI NO: 33354192 NR Description: putative CUG triplet repeat RNA-binding protein 1
  misc_feature (55)..(369): Homolog of NCBI NO: 27369577 NR Description: CUG-BP and ETR-3 like factor 3 [Mus musculus]
  misc_feature (384)..(475): Homolog of NCBI NO: 27369577 NR Description: CUG-BP and ETR-3 like factor 3 [Mus musculus]

SEQ ID NO: 74740 - protein, 441 aa, Arabidopsis thaliana; identical to SEQ ID NO: 40502
  peptide (1)..(441): Ceres Seq. ID no. 5679367
  misc_feature (20)..(92): Pfam Name: RNA recognition motif. (a.k.a. RRM, RBD, or RNP domain) Pfam Description: RNA recognition motif. (a.k.a. RRM, RBD, or RNP
  misc_feature (1)..(441): Homolog of NCBI NO: 18412143 NR Description: RNA-binding CELF protein, putative; protein id: supported by cDNA: 114653. [Arabidopsis thaliana]
  misc_feature (1)..(434): Homolog of NCBI NO: 7488303 NR Description: ribonucleoprotein homolog T4I9.1 - Arabidopsis >gi|3924594|gb|AAC79095.1| putative ribonucleoprotein thaliana] >gi|4262139|gb|AAD14439.1| putative ribonucleoprotein
  misc_feature (1)..(398): Homolog of NCBI NO: 30679366 NR Description: RNA-binding protein, putative [Arabidopsis >gi|17529054|gb|AAL38737.1| putative ribonucleoprotein
  misc_feature (10)..(437): Homolog of NCBI NO: 22329313 NR Description: RNA-binding CELF protein, putative; protein id: [Arabidopsis thaliana] >gi|26449591|dbj|BAC41921.1| putative [Arabidopsis thaliana] >gi|28950997|gb|AAO63422.1| At1g03457
  misc_feature (13)..(437): Homolog of NCBI NO: 25386552 NR Description: protein F21B7.8 [imported] - Arabidopsis thaliana
  misc_feature (14)..(433): Homolog of NCBI NO: 34907248 NR Description: putative ribonucleoprotein [Oryza sativa cultivar- group)] >gi|20160777|dbj|BAB89718.1| putative
  misc_feature (10)..(295): Homolog of NCBI NO: 7488302 NR Description: ribonucleoprotein homolog F21B7.26 - Arabidopsis
  misc_feature (16)..(428): Homolog of NCBI NO: 33354192 NR Description: putative CUG triplet repeat RNA-binding protein 1
  misc_feature (13)..(327): Homolog of NCBI NO: 27369577 NR Description: CUG-BP and ETR-3 like factor 3 [Mus musculus]
  misc_feature (342)..(433): Homolog of NCBI NO: 27369577 NR Description: CUG-BP and ETR-3 like factor 3 [Mus musculus]

SEQ ID NO: 74741 - protein, 413 aa, Arabidopsis thaliana; identical to SEQ ID NO: 40503
  peptide (1)..(413): Ceres Seq. ID no. 5679368
  misc_feature (1)..(64): Pfam Name: RNA recognition motif. (a.k.a. RRM, RBD, or RNP domain) Pfam Description: RNA recognition motif. (a.k.a. RRM, RBD, or RNP
  misc_feature (1)..(413): Homolog of NCBI NO: 18412143 NR Description: RNA-binding CELF protein, putative; protein id: supported by cDNA: 114653. [Arabidopsis thaliana]
  misc_feature (1)..(406): Homolog of NCBI NO: 7488303 NR Description: ribonucleoprotein homolog T4I9.1 - Arabidopsis >gi|3924594|gb|AAC79095.1| putative ribonucleoprotein thaliana] >gi|4262139|gb|AAD14439.1| putative ribonucleoprotein
  misc_feature (1)..(370): Homolog of NCBI NO: 30679366 NR Description: RNA-binding protein, putative [Arabidopsis >gi|17529054|gb|AAL38737.1| putative ribonucleoprotein
  misc_feature (1)..(409): Homolog of NCBI NO: 22329313 NR Description: RNA-binding CELF protein, putative; protein id: [Arabidopsis thaliana] >gi|26449591|dbj|BAC41921.1| putative [Arabidopsis thaliana] >gi|28950997|gb|AAO63422.1| At1g03457
  misc_feature (1)..(409): Homolog of NCBI NO: 25386552 NR Description: protein F21B7.8 [imported] - Arabidopsis thaliana
  misc_feature (1)..(405): Homolog of NCBI NO: 34907248 NR Description: putative ribonucleoprotein [Oryza sativa cultivar- group)] >gi|20160777|dbj|BAB89718.1| putative
  misc_feature (1)..(267): Homolog of NCBI NO: 7488302 NR Description: ribonucleoprotein homolog F21B7.26 - Arabidopsis
  misc_feature (1)..(400): Homolog of NCBI NO: 33354192 NR Description: putative CUG triplet repeat RNA-binding protein 1
  misc_feature (1)..(299): Homolog of NCBI NO: 27369577 NR Description: CUG-BP and ETR-3 like factor 3 [Mus musculus]
  misc_feature (314)..(405): Homolog of NCBI NO: 27369577 NR Description: CUG-BP and ETR-3 like factor 3 [Mus musculus]

SEQ ID NO: 74742 - DNA, 1091 bp, Arabidopsis thaliana
  misc_feature (1)..(1091): Ceres Seq. ID no. 5679369
  misc_feature: MA Experiment ID: 108434 Result: Up-regulated in Transcription
  misc_feature: MA Experiment 108434 PARAMETER Experiment Name: At_Root_Tips_cDNA_P Parameter: Tissue Value: Root Tips
  misc_feature: MA Experiment ID: 108462 Result: Down-regulated in Transcription
  misc_feature: MA Experiment 108462 PARAMETER Experiment Name: At_Germinating_Seeds_cDNA_P Parameter: Age (day) Value: 2 vs. 0
  misc_feature: MA Experiment 108462 PARAMETER Experiment Name: At_Germinating_Seeds_cDNA_P Parameter: Tissue Value: Germinating Seeds
  misc_feature: MA Experiment ID: 108463 Result: Down-regulated in Transcription
  misc_feature: MA Experiment 108463 PARAMETER Experiment Name: At_Germinating_Seeds_cDNA_P Parameter: Age (day) Value: 3 vs. 0
  misc_feature: MA Experiment 108463 PARAMETER Experiment Name: At_Germinating_Seeds_cDNA_P Parameter: Tissue Value: Germinating Seeds
  misc_feature: MA Experiment ID: 108464 Result: Down-regulated in Transcription
  misc_feature: MA Experiment 108464 PARAMETER Experiment Name: At_Germinating_Seeds_cDNA_P Parameter: Age (day) Value: 4 vs. 0
  misc_feature: MA Experiment 108464 PARAMETER Experiment Name: At_Germinating_Seeds_cDNA_P Parameter: Tissue Value: Germinating Seeds
  misc_feature: MA Experiment ID: 20000111 Result: Up-regulated in Transcription
  misc_feature: MA Experiment 20000111 PARAMETER Experiment Name: At_42deg_Heat_cDNA_P Parameter: Temperature (deg C) Value: 42 vs. 22
  misc_feature: MA Experiment 20000111 PARAMETER Experiment Name: At_42deg_Heat_cDNA_P Parameter: Timepoint (hr) Value: 6
  misc_feature: MA Experiment 20000111 PARAMETER Experiment Name: At_42deg_Heat_cDNA_P Parameter: Tissue Value: Aerial
  misc_feature: MA Experiment ID: 20000173 Result: Up-regulated in Transcription
  misc_feature: MA Experiment 20000173 PARAMETER Experiment Name: At_42deg_Heat_P Parameter: Age (day) Value: 14
  misc_feature: MA Experiment 20000173 PARAMETER Experiment Name: At_42deg_Heat_P Parameter: Organism Value: A. thaliana
  misc_feature: MA Experiment 20000173 PARAMETER Experiment Name: At_42deg_Heat_P Parameter: Plant Line Value: WS
  misc_feature: MA Experiment 20000173 PARAMETER Experiment Name: At_42deg_Heat_P Parameter: Temperature (deg C) Value: 42 vs. 22
  misc_feature: MA Experiment 20000173 PARAMETER Experiment Name: At_42deg_Heat_P Parameter: Timepoint (hr) Value: 6
  misc_feature: MA Experiment 20000173 PARAMETER Experiment Name: At_42deg_Heat_P Parameter: Tissue Value: Aerial
  misc_feature: MA Experiment ID: 20000180 Result: Down-regulated in Transcription
  misc_feature: MA Experiment 20000180 PARAMETER Experiment Name: At_Germinating_Seeds_P Parameter: Age (hr) Value: 24 vs. 0
  misc_feature: MA Experiment 20000180 PARAMETER Experiment Name: At_Germinating_Seeds_P Parameter: Tissue Value: Germinating Seeds
ctaaacaaaaccctctcttcctctacttcatattcttcttcatttcctacgctctcttctcgttctcgattcgccatgcctctaattgaaaaggtttcctcttcccgaaccagcctgggcccgtgttacatctcgacccgacccaagacatccgggtccggatactcgccgctgaatgatccttcgccgaattggagcaaccgtccgccgaaggagacgattcttcttgatgggtgcgattatgagcactggctcatcgtcatggagttcactgatcctaaacctactgaagaagagatgatcaattcttatgtcaaaaccttaacttccgtccttggctgtgaggaagaggccaagaagaagatttactctgtttgtacttcgacctacactggctttggtgctttgatctctgaagagctctcttgcaaagtcaaaggtatcaacttctccatatttgcaattaggtttttaagccttttttgctctgacatagcttttctagttgtttacttatgatgttgagatttatcgtaaaaggctttctctgtttggtactgctctgttcaacagctaggaggaaacttctcttgatctttgttttatcgcagttattgtctgtctctagtactataaaatgagaacatattttactgtttgagaaatctgatctagagttgtgtgattcattagcattgcctggtgttctctgggtgctgccggattcctatctcgatgtaccaaacaaagactacggaggtgacttgtacgttgaaggaaaggtcatacccagaccacagtacaggttcacggaacagcgtcatactagaccccgtcctaggccaaggtatgataggcgccgtgagacaatgcaggttgagaggagagagccatccatgggtcttcattctccagtaaatccgggagagttcaacaagcccagtgcttaatattaaacatgaacaatgcattatgtaatggatggagtttattaggattatggtatttacatgcttgtcttaaacactcatgtgagagacttttcagtttttatccacttaatcaaacaaatcaatcatcattcatgtctc

SEQ ID NO: 74743 - protein, 172 aa, Arabidopsis thaliana; identical to SEQ ID NO: 41687
  peptide (1)..(172): Ceres Seq. ID no. 5679370
  misc_feature (1)..(148): Homolog of NCBI NO: 27754695 NR Description: putative DAG protein [Arabidopsis thaliana]
  misc_feature (1)..(148): Homolog of NCBI NO: 15230785 NR Description: DAG protein, putative; protein id: At3g06790.1 thaliana] >gi|7549634|gb|AAF63819.1| DAG protein, putative
  misc_feature (6)..(149): Homolog of NCBI NO: 18400602 NR Description: expressed protein; protein id: At3g15000.1, by cDNA: gi_16226542 [Arabidopsis thaliana] Unknown mitochondrial protein At3g15000
  misc_feature (17)..(148): Homolog of NCBI NO: 6014904 NR Description: DAG PROTEIN, CHLOROPLAST PRECURSOR
  misc_feature (13)..(148): Homolog of NCBI NO: 38636775 NR Description: putative DAG protein [Oryza sativa (japonica
  misc_feature (1)..(148): Homolog of NCBI NO: 15220382 NR Description: DAG protein, putative; protein id: At1g11430.1, by cDNA: 35647. [Arabidopsis thaliana] T23J18.10 [Arabidopsis thaliana] >gi|26450103|dbj|BAC42171.1|
  misc_feature (1)..(148): Homolog of NCBI NO: 21593052 NR Description: DAG protein, putative [Arabidopsis thaliana]
  misc_feature (6)..(155): Homolog of NCBI NO: 15226934 NR Description: unknown protein; protein id: At2g35240.1, by cDNA: gi_18253008 [Arabidopsis thaliana]
  misc_feature (18)..(155): Homolog of NCBI NO: 2440029 NR Description: DAL1 protein [Arabidopsis thaliana]
  misc_feature (18)..(155): Homolog of NCBI NO: 15226108 NR Description: plastid protein; protein id: At2g33430.1, by cDNA: 8717., supported by cDNA: gi_17933284, supported by

SEQ ID NO: 74744 - protein, 147 aa, Arabidopsis thaliana; identical to SEQ ID NO: 41688
  peptide (1)..(147): Ceres Seq. ID no. 5679371
  misc_feature (1)..(123): Homolog of NCBI NO: 27754695 NR Description: putative DAG protein [Arabidopsis thaliana]
  misc_feature (1)..(123): Homolog of NCBI NO: 15230785 NR Description: DAG protein, putative; protein id: At3g06790.1 thaliana] >gi|7549634|gb|AAF63819.1| DAG protein, putative
  misc_feature (1)..(124): Homolog of NCBI NO: 18400602 NR Description: expressed protein; protein id: At3g15000.1, by cDNA: gi_16226542 [Arabidopsis thaliana] Unknown mitochondrial protein At3g15000
  misc_feature (1)..(123): Homolog of NCBI NO: 6014904 NR Description: DAG PROTEIN, CHLOROPLAST PRECURSOR
  misc_feature (1)..(123): Homolog of NCBI NO: 38636775 NR Description: putative DAG protein [Oryza sativa (japonica
  misc_feature (1)..(123): Homolog of NCBI NO: 15220382 NR Description: DAG protein, putative; protein id: At1g11430.1, by cDNA: 35647. [Arabidopsis thaliana] T23J18.10 [Arabidopsis thaliana] >gi|26450103|dbj|BAC42171.1|
  misc_feature (1)..(123): Homolog of NCBI NO: 21593052 NR Description: DAG protein, putative [Arabidopsis thaliana]
  misc_feature (1)..(130): Homolog of NCBI NO: 15226934 NR Description: unknown protein; protein id: At2g35240.1, by cDNA: gi_18253008 [Arabidopsis thaliana]
  misc_feature (1)..(130): Homolog of NCBI NO: 2440029 NR Description: DAL1 protein [Arabidopsis thaliana]
  misc_feature (1)..(130): Homolog of NCBI NO: 15226108 NR Description: plastid protein; protein id: At2g33430.1, by cDNA: 8717., supported by cDNA: gi_17933284, supported by

SEQ ID NO: 74745 - DNA, 764 bp, Arabidopsis thaliana
  misc_feature (1)..(764): Ceres Seq. ID no. 5679376
  misc_feature: MA Experiment ID: 108462 Result: Down-regulated in Transcription
  misc_feature: MA Experiment 108462 PARAMETER Experiment Name: At_Germinating_Seeds_cDNA_P Parameter: Age (day) Value: 2 vs. 0
  misc_feature: MA Experiment 108462 PARAMETER Experiment Name: At_Germinating_Seeds_cDNA_P Parameter: Tissue Value: Germinating Seeds
  misc_feature: MA Experiment ID: 108464 Result: Down-regulated in Transcription
  misc_feature: MA Experiment 108464 PARAMETER Experiment Name: At_Germinating_Seeds_cDNA_P Parameter: Age (day) Value: 4 vs. 0
  misc_feature: MA Experiment 108464 PARAMETER Experiment Name: At_Germinating_Seeds_cDNA_P Parameter: Tissue Value: Germinating Seeds
  misc_feature: MA Experiment ID: 108488 Result: Down-regulated in Transcription
  misc_feature: MA Experiment ID: 20000184 Result: Down-regulated in Transcription
  misc_feature: MA Experiment 20000184 PARAMETER Experiment Name: At_Shoots__P Parameter: Age (day) Value: 7
  misc_feature: MA Experiment 20000184 PARAMETER Experiment Name: At_Shoots__P Parameter: Tissue Value: Shoots vs. Whole Plant
  misc_feature: MA Experiment ID: 20000224 Result: Up-regulated in Transcription
  misc_feature: MA Experiment ID: 20000264 Result: Up-regulated in Transcription
  misc_feature: MA Experiment 20000264 PARAMETER Experiment Name: At_Open_Flower_P Parameter: Age (day) Value: 21
  misc_feature: MA Experiment 20000264 PARAMETER Experiment Name: At_Open_Flower_P Parameter: Plant Line Value: WS
  misc_feature: MA Experiment 20000264 PARAMETER Experiment Name: At_Open_Flower_P Parameter: Tissue Value: Open Flower vs. Whole Plant
  misc_feature: MA Experiment ID: 20000794 Result: Up-regulated in Transcription
  misc_feature: MA Experiment 20000794 PARAMETER Experiment Name: At_Petals_P Parameter: Age (day) Value: 23-25 days
  misc_feature: MA Experiment 20000794 PARAMETER Experiment Name: At_Petals_P Parameter: Plant Line Value: WS
  misc_feature: MA Experiment 20000794 PARAMETER Experiment Name: At_Petals_P Parameter: Tissue Value: Petals vs. Whole plant
  misc_feature: MA Experiment ID: 20001557 Result: Down-regulated in Transcription
  misc_feature: MA Experiment 20001557 PARAMETER Experiment Name: At_Drought_Soil_Dry_P Parameter: Age (day) Value: 27
  misc_feature: MA Experiment 20001557 PARAMETER Experiment Name: At_Drought_Soil_Dry_P Parameter: Organism Value: A. thaliana
  misc_feature: MA Experiment 20001557 PARAMETER Experiment Name: At_Drought_Soil_Dry_P Parameter: Plant Line Value: WS
  misc_feature: MA Experiment 20001557 PARAMETER Experiment Name: At_Drought_Soil_Dry_P Parameter: Post Timepoint (hr) Value: 3
  misc_feature: MA Experiment 20001557 PARAMETER Experiment Name: At_Drought_Soil_Dry_P Parameter: Post-Treatment Value: Re-Water vs. No Drought
  misc_feature: MA Experiment 20001557 PARAMETER Experiment Name: At_Drought_Soil_Dry_P Parameter: Timepoint (day) Value: 13
  misc_feature: MA Experiment 20001557 PARAMETER Experiment Name: At_Drought_Soil_Dry_P Parameter: Treatment Value: Drought vs. No Drought
agagagagtatcgaagagaagaatccaaaaaaatgggatcttcaccaccgaagaagacgactctgcaacggtacttgtcacagcttcaacaacatcctttaagaacaaaggcaataactgctggagttttgtctggtgttagcgatgttgtatcacagaagctctctggcatacagaagattcagctgagaagggttcttctcaaagtgatatttgctggtgggtttcttggaccagcagggcatttctttcatacatatttagataagttttttaaagggaagaaggatacacagactgttgcaaagaaggtaattctggagcaattgacattgtcaccattgaaccatttgcttttcatgatctattatggagtagtcatagaaagaactccctggacccttgttagagaaaggatcaagaagacttatccaacggtccagcttactgcatggacgtttttcccggtggtgggatggattaactacaagtatgtgccactgcacttccgggtcatcttgcacagcctggtcgcattcttttggggaattttcctaaccctgcgagcgaggtcaatgacactagctttggcaaaggctaagtgattaggaaacacatggatcgtgacagagaactcaagccttgggactcattatgatcacttagtactctgtaagttaaagcaaatcaaacagctctgaaaccaaataaaaatctgtattaagatgataccattctaggatagcaatatgttttaagttatt

SEQ ID NO: 74746 - protein, 200 aa, Arabidopsis thaliana; identical to SEQ ID NO: 27721
  peptide (1)..(200): Ceres Seq. ID no. 5679377
  misc_feature (123)..(194): Pfam Name: Mpv17 / PMP22 family Pfam Description: Mpv17 / PMP22 family
  misc_feature (11)..(200): Homolog of NCBI NO: 15233520 NR Description: PEROXISOMAL MEMBRANE PROTEIN PMP22; protein id: [Arabidopsis thaliana] >gi|11282649|pir||T51590 membrane protein,
  misc_feature (40)..(191): Homolog of NCBI NO: 30682784 NR Description: expressed protein [Arabidopsis thaliana]
  misc_feature (40)..(177): Homolog of NCBI NO: 7485192 NR Description: hypothetical protein d13195c - Arabidopsis >gi|2244787|emb|CAB10210.1| hypothetical protein [Arabidopsis >gi|7268136|emb|CAB78473.1| hypothetical protein [Arabidopsis
  misc_feature (5)..(189): Homolog of NCBI NO: 18422298 NR Description: putative protein; protein id: At5g43140.1,
  misc_feature (4)..(189): Homolog of NCBI NO: 21553640 NR Description: contains similarity to 22 kDa peroxisomal
  misc_feature (10)..(190): Homolog of NCBI NO: 31215743 NR Description: ENSANGP00000012562 [Anopheles gambiae]
  misc_feature (14)..(197): Homolog of NCBI NO: 21358267 NR Description: CG7970-PA [Drosophila melanogaster]
  misc_feature (5)..(184): Homolog of NCBI NO: 9757841 NR Description: contains similarity to 22 kDa peroxisomal
  misc_feature (5)..(185): Homolog of NCBI NO: 6679577 NR Description: peroxisomal membrane protein 2; peroxisomal protein 2, 22 kDa [Mus musculus] >gi|1172540|sp|P42925|PMP2_MOUSE kDa peroxisomal membrane protein (Peroxisomal membrane protein 2)
  misc_feature (24)..(192): Homolog of NCBI NO: 4505241 NR Description: MpV17 transgene, murine homolog, Mpv17, human homolog of glomerulosclerosis and nephrotic syndrome sapiens] >gi|730059|sp|P39210|MPV1_HUMAN MPV17 protein

SEQ ID NO: 74747 - protein, 190 aa, Arabidopsis thaliana; identical to SEQ ID NO: 27722
  peptide (1)..(190): Ceres Seq. ID no. 5679378
  misc_feature (113)..(184): Pfam Name: Mpv17 / PMP22 family Pfam Description: Mpv17 / PMP22 family
  misc_feature (1)..(190): Homolog of NCBI NO: 15233520 NR Description: PEROXISOMAL MEMBRANE PROTEIN PMP22; protein id: [Arabidopsis thaliana] >gi|11282649|pir||T51590 membrane protein,
  misc_feature (30)..(181): Homolog of NCBI NO: 30682784 NR Description: expressed protein [Arabidopsis thaliana]
  misc_feature (30)..(167): Homolog of NCBI NO: 7485192 NR Description: hypothetical protein d13195c - Arabidopsis >gi|2244787|emb|CAB10210.1| hypothetical protein [Arabidopsis >gi|7268136|emb|CAB78473.1| hypothetical protein [Arabidopsis
  misc_feature (1)..(179): Homolog of NCBI NO: 18422298 NR Description: putative protein; protein id: At5g43140.1,
  misc_feature (1)..(179): Homolog of NCBI NO: 21553640 NR Description: contains similarity to 22 kDa peroxisomal
  misc_feature (1)..(180): Homolog of NCBI NO: 31215743 NR Description: ENSANGP00000012562 [Anopheles gambiae]
  misc_feature (4)..(187): Homolog of NCBI NO: 21358267 NR Description: CG7970-PA [Drosophila melanogaster]
  misc_feature (1)..(174): Homolog of NCBI NO: 9757841 NR Description: contains similarity to 22 kDa peroxisomal
  misc_feature (1)..(175): Homolog of NCBI NO: 6679577 NR Description: peroxisomal membrane protein 2; peroxisomal protein 2, 22 kDa [Mus musculus] >gi|1172540|sp|P42925|PMP2_MOUSE kDa peroxisomal membrane protein (Peroxisomal membrane protein 2)
  misc_feature (14)..(182): Homolog of NCBI NO: 4505241 NR Description: MpV17 transgene, murine homolog, Mpv17, human homolog of glomerulosclerosis and nephrotic syndrome sapiens] >gi|730059|sp|P39210|MPV1_HUMAN MPV17 protein

SEQ ID NO: 74748 - DNA, 2478 bp, Arabidopsis thaliana
  misc_feature (1)..(2478): Ceres Seq. ID no. 5679398
  misc_feature: MA Experiment ID: 108461 Result: Up-regulated in Transcription
  misc_feature: MA Experiment 108461 PARAMETER Experiment Name: At_Germinating_Seeds_cDNA_P Parameter: Age (day) Value: 1 vs. 0
  misc_feature: MA Experiment 108461 PARAMETER Experiment Name: At_Germinating_Seeds_cDNA_P Parameter: Tissue Value: Germinating Seeds
  misc_feature: MA Experiment ID: 108462 Result: Up-regulated in Transcription
  misc_feature: MA Experiment 108462 PARAMETER Experiment Name: At_Germinating_Seeds_cDNA_P Parameter: Age (day) Value: 2 vs. 0
  misc_feature: MA Experiment 108462 PARAMETER Experiment Name: At_Germinating_Seeds_cDNA_P Parameter: Tissue Value: Germinating Seeds
  misc_feature: MA Experiment ID: 20000180 Result: Up-regulated in Transcription
  misc_feature: MA Experiment 20000180 PARAMETER Experiment Name: At_Germinating_Seeds_P Parameter: Age (hr) Value: 24 vs. 0
  misc_feature: MA Experiment 20000180 PARAMETER Experiment Name: At_Germinating_Seeds_P Parameter: Tissue Value: Germinating Seeds
  misc_feature: MA Experiment ID: 20000264 Result: Up-regulated in Transcription
  misc_feature: MA Experiment 20000264 PARAMETER Experiment Name: At_Open_Flower_P Parameter: Age (day) Value: 21
  misc_feature: MA Experiment 20000264 PARAMETER Experiment Name: At_Open_Flower_P Parameter: Plant Line Value: WS
  misc_feature: MA Experiment 20000264 PARAMETER Experiment Name: At_Open_Flower_P Parameter: Tissue Value: Open Flower vs. Whole Plant
  misc_feature: MA Experiment ID: 20000794 Result: Up-regulated in Transcription
  misc_feature: MA Experiment 20000794 PARAMETER Experiment Name: At_Petals_P Parameter: Age (day) Value: 23-25 days
  misc_feature: MA Experiment 20000794 PARAMETER Experiment Name: At_Petals_P Parameter: Plant Line Value: WS
  misc_feature: MA Experiment 20000794 PARAMETER Experiment Name: At_Petals_P Parameter: Tissue Value: Petals vs. Whole plant
  misc_feature: MA Experiment ID: 20001247 Result: Up-regulated in Transcription
  misc_feature: MA Experiment 20001247 PARAMETER Experiment Name: At_Far-red-induction_P Parameter: Age (day) Value: 7
  misc_feature: MA Experiment 20001247 PARAMETER Experiment Name: At_Far-red-induction_P Parameter: Light Value: Far-red vs. White
  misc_feature: MA Experiment 20001247 PARAMETER Experiment Name: At_Far-red-induction_P Parameter: Organism Value: A. thaliana
  misc_feature: MA Experiment 20001247 PARAMETER Experiment Name: At_Far-red-induction_P Parameter: Plant Line Value: Columbia
  misc_feature: MA Experiment 20001247 PARAMETER Experiment Name: At_Far-red-induction_P Parameter: Timepoint (hr) Value: 1
  misc_feature: MA Experiment 20001247 PARAMETER Experiment Name: At_Far-red-induction_P Parameter: Tissue Value: Whole Plant
  misc_feature: MA Experiment ID: 20001757 Result: Down-regulated in Transcription
  misc_feature: MA Experiment 20001757 PARAMETER Experiment Name: At_50mM_NH4NO3_L-to-H_P Parameter: Timepoint (hr) Value: 6
  misc_feature: MA Experiment 20001757 PARAMETER Experiment Name: At_50mM_NH4NO3_L-to-H_P Parameter: Tissue Value: Leaf
  misc_feature: MA Experiment 20001757 PARAMETER Experiment Name: At_50mM_NH4NO3_L-to-H_P Parameter: Treatment Value: 50mM NH4NO3 vs 100mM Mannitol
  misc_feature: MA Experiment ID: 20001910 Result: Up-regulated in Transcription
  misc_feature: MA Experiment 20001910 PARAMETER Experiment Name: At_Drought_Reproduction_P Parameter: Age (day) Value: 37
  misc_feature: MA Experiment 20001910 PARAMETER Experiment Name: At_Drought_Reproduction_P Parameter: Organism Value: A. thaliana
  misc_feature: MA Experiment 20001910 PARAMETER Experiment Name: At_Drought_Reproduction_P Parameter: Plant Line Value: WS
  misc_feature: MA Experiment 20001910 PARAMETER Experiment Name: At_Drought_Reproduction_P Parameter: Timepoint (day) Value: 7
  misc_feature: MA Experiment 20001910 PARAMETER Experiment Name: At_Drought_Reproduction_P Parameter: Tissue Value: Flowers
  misc_feature: MA Experiment 20001910 PARAMETER Experiment Name: At_Drought_Reproduction_P Parameter: Treatment Value: Drought vs. No Drought
aacacgcgtctccatcaatcttctagctggcaatgagatccattctttagcttctttcttctctgttttttcttttttgaagaaaaaaaaaatggcaccaaagtttgaatggtgggctaaaggaaacaacaacaacactcgtaaaggaacaccagtcgttgtcaaaatggaaaaccctaataactggtcaatggtggaacttgaatcaccttctcatgacgatttcctcgtaagaactcatgagaaatctcgtaacaagaacgcaagacagctcacttgggttctacttctcaaagctcatcgtgccgcaggttgtctcacttctctcggttctgcattattcgctctcggcaccgccgtgcgccgccgtatcgccgccggccgtacagacattgaaatctcctcctcgggagtgggttcattacagaagcaaaaccatacgaagaaatcgaaacttttctactcttgcttaaaggtgtttctatggctttctttaatccttttgggttttgagattgctgcttatttcaaaggttggagctttggaacttctaagcttcagcttcagtttatcttcaataaagggttctttgattgggtttacacgagatgggttttgcttcgtgttgagtatcttgctcctcctcttcagtttcttgctaatggctgcattgttctgtttcttgttcagagtcttgatagactcattctttgtcttggttgtttttggatccggtttaagaagattaaaccggttcctaaaccggattctatctctgatcttgaatctggtgataatggtgctttcctccctatggttcttgttcaaatccctatgtgtaatgagaaagaggtttatcagcaatctattgcagctgtgtgtaacttagactggcctaaagggaagattttgattcaaattctcgatgattcggatgatccgataacgcagagtttgattaaagaagaggttcataaatggcagaagctaggtgcacgcattgtgtatcgtcaccgtgttaatagagaaggttacaaagctggtaatcttaagtctgctatgaactgtagttatgttaaagactacgaattcgttgcgattttcgacgcagattttcaacctctacctgatttcctcaagaagaccattcctcattttaaggacaatgaggaaataggattggttcaagctaggtggtcttttgtgaataaggaagagaacttgttgacaagattacagaatattaacttggcttttcactttgaggttgagcaacaagtgaatagtgtcttcttgaatttcttcgggtttaacgggacagccggtgtgtggaggatcaaagctttggaagattccggtggttggctcgagagaactaccgtcgaggatatggacattgcggttcgtgctcaccttcacggatggaaattcgttttcctaaatgacgttgagtgccaatgtgaattaccggaatcgtatgaagcttatagaaaacagcaacatagatggcattcaggtcctatgcaactatttcgtctttgtttgcccgcggtcattaaatcaaagataagcataggaaagaaattcaatttgatattcctcttctttctcctgaggaagctaatcttgccattctactcattcactctcttttgtattatcctgccaatgactatgtttgtacccgaagctgagcttcccgcttgggttgtttgctacatacctgccacaatgtctttcctcaacatccttcccgccccgaagtcgtttccgtttatcgtcccgtaccttctctttgagaacacaatgtctgtgactaagttcaacgcaatggtctcgggtttgtttcagctaggaagtgcttatgaatgggttgttacaaaaaaatcaggacggtcatcagaaggagatcttgctgcgttagtcgaaaaagacgaaaagacaactaaacatcagagaggtgtgtctgcacccgaaaccgaagccgagaaaaaggcggaaaagactaagaggaagaagaagaagcacaataggatttatatgaaggagctatctctagcgtttctgttactgaccgcggcaactcgaagtcttttatcggcgcaaggaatccatttctacttccttttgtttcaaggaatatctttcttacttgtgggtctagatcttattggagaacaagttgaatgacactcaaagagattgaagtagtgcttgtagaagagacgttgtagaagacaggaaacatgaagagaaaaaggaagagggtctggacccaaaaaaatacaatacaacattgaacatagatcggtttcattgaggaaggacatggattaactctgttggtagtgaatgtgtaaggttttaacttttctctcttttgggtttgcccacagttgtttattctttcgattaaatggggacaactcttttgtaagaaagttttgttcaattatgaaagcaaattgttttagctc

SEQ ID NO: 74749 - protein, 729 aa, Arabidopsis thaliana
  peptide (1)..(729): Ceres Seq. ID no. 5679399
  misc_feature (274)..(449): Pfam Name: Glycosyl transferase Pfam Description: Glycosyl transferase
  misc_feature (31)..(729): Homolog of NCBI NO: 28201308 NR Description: putative CSLC9(cellulose synthase-like) [Oryza
  misc_feature (31)..(728): Homolog of NCBI NO: 15236004 NR Description: putative protein; protein id: At4g31590.1
  misc_feature (31)..(728): Homolog of NCBI NO: 15224178 NR Description: putative glucosyltransferase; protein id: [Arabidopsis thaliana] >gi|25412230|pir||A84639 probable
  misc_feature (194)..(656): Homolog of NCBI NO: 34419220 NR Description: TPA: cellulose synthase-like C3 [Oryza sativa
  misc_feature (37)..(184): Homolog of NCBI NO: 34419220 NR Description: TPA: cellulose synthase-like C3 [Oryza sativa
  misc_feature (634)..(728): Homolog of NCBI NO: 34419220 NR Description: TPA: cellulose synthase-like C3 [Oryza sativa
  misc_feature (153)..(729): Homolog of NCBI NO: 16974749 NR Description: CSLC9 [Oryza sativa]
  misc_feature (153)..(729): Homolog of NCBI NO: 17385963 NR Description: CSLC9 [Oryza sativa]
  misc_feature (111)..(728): Homolog of NCBI NO: 18405677 NR Description: expressed protein; protein id: At3g28180.1, by cDNA: gi_15810494, supported by cDNA: gi_20259272 [Arabidopsis
  misc_feature (52)..(180): Homolog of NCBI NO: 18405677 NR Description: expressed protein; protein id: At3g28180.1, by cDNA: gi_15810494, supported by cDNA: gi_20259272 [Arabidopsis
TRVSINLLAGNEIHSLASFFSVFSFLKKKKMAPKFEWWAKGNNNNTRKGTPVVVKMENPNNWSMVELESPSHDDFLVRTHEKSRNKNARQLTWVLLLKAHRAAGCLTSLGSALFALGTAVRRRIAAGRTDIEISSSGVGSLQKQNHTKKSKLFYSCLKVFLWLSLILLGFEIAAYFKGWSFGTSKLQLQFIFNKGFFDWVYTRWVLLRVEYLAPPLQFLANGCIVLFLVQSLDRLILCLGCFWIRFKKIKPVPKPDSISDLESGDNGAFLPMVLVQIPMCNEKEVYQQSIAAVCNLDWPKGKILIQILDDSDDPITQSLIKEEVHKWQKLGARIVYRHRVNREGYKAGNLKSAMNCSYVKDYEFVAIFDADFQPLPDFLKKTIPHFKDNEEIGLVQARWSFVNKEENLLTRLQNINLAFHFEVEQQVNSVFLNFFGFNGTAGVWRIKALEDSGGWLERTTVEDMDIAVRAHLHGWKFVFLNDVECQCELPESYEAYRKQQHRWHSGPMQLFRLCLPAVIKSKISIGKKFNLIFLFFLLRKLILPFYSFTLFCIILPMTMFVPEAELPAWVVCYIPATMSFLNILPAPKSFPFIVPYLLFENTMSVTKFNAMVSGLFQLGSAYEWVVTKKSGRSSEGDLAALVEKDEKTTKHQRGVSAPETEAEKKAEKTKRKKKKHNRIYMKELSLAFLLLTAATRSLLSAQGIHFYFLLFQGISFLLVGLDLIGEQVE

SEQ ID NO: 74750 - protein, 699 aa, Arabidopsis thaliana; identical to SEQ ID NO: 26599
  peptide (1)..(699): Ceres Seq. ID no. 5679400
  misc_feature (244)..(419): Pfam Name: Glycosyl transferase Pfam Description: Glycosyl transferase
  misc_feature (1)..(699): Homolog of NCBI NO: 28201308 NR Description: putative CSLC9(cellulose synthase-like) [Oryza
  misc_feature (1)..(698): Homolog of NCBI NO: 15236004 NR Description: putative protein; protein id: At4g31590.1
  misc_feature (1)..(698): Homolog of NCBI NO: 15224178 NR Description: putative glucosyltransferase; protein id: [Arabidopsis thaliana] >gi|25412230|pir||A84639 probable
  misc_feature (164)..(626): Homolog of NCBI NO: 34419220 NR Description: TPA: cellulose synthase-like C3 [Oryza sativa
  misc_feature (7)..(154): Homolog of NCBI NO: 34419220 NR Description: TPA: cellulose synthase-like C3 [Oryza sativa
  misc_feature (604)..(698): Homolog of NCBI NO: 34419220 NR Description: TPA: cellulose synthase-like C3 [Oryza sativa
  misc_feature (123)..(699): Homolog of NCBI NO: 16974749 NR Description: CSLC9 [Oryza sativa]
  misc_feature (123)..(699): Homolog of NCBI NO: 17385963 NR Description: CSLC9 [Oryza sativa]
  misc_feature (81)..(698): Homolog of NCBI NO: 18405677 NR Description: expressed protein; protein id: At3g28180.1, by cDNA: gi_15810494, supported by cDNA: gi_20259272 [Arabidopsis
  misc_feature (22)..(150): Homolog of NCBI NO: 18405677 NR Description: expressed protein; protein id: At3g28180.1, by cDNA: gi_15810494, supported by cDNA: gi_20259272 [Arabidopsis

SEQ ID NO: 74751 - protein, 674 aa, Arabidopsis thaliana; identical to SEQ ID NO: 26600
  peptide (1)..(674): Ceres Seq. ID no. 5679401
  misc_feature (219)..(394): Pfam Name: Glycosyl transferase Pfam Description: Glycosyl transferase
  misc_feature (1)..(674): Homolog of NCBI NO: 28201308 NR Description: putative CSLC9(cellulose synthase-like) [Oryza
  misc_feature (1)..(673): Homolog of NCBI NO: 15236004 NR Description: putative protein; protein id: At4g31590.1
  misc_feature (1)..(673): Homolog of NCBI NO: 15224178 NR Description: putative glucosyltransferase; protein id: [Arabidopsis thaliana] >gi|25412230|pir||A84639 probable
  misc_feature (139)..(601): Homolog of NCBI NO: 34419220 NR Description: TPA: cellulose synthase-like C3 [Oryza sativa
  misc_feature (1)..(129): Homolog of NCBI NO: 34419220 NR Description: TPA: cellulose synthase-like C3 [Oryza sativa
  misc_feature (579)..(673): Homolog of NCBI NO: 34419220 NR Description: TPA: cellulose synthase-like C3 [Oryza sativa
  misc_feature (98)..(674): Homolog of NCBI NO: 16974749 NR Description: CSLC9 [Oryza sativa]
  misc_feature (98)..(674): Homolog of NCBI NO: 17385963 NR Description: CSLC9 [Oryza sativa]
  misc_feature (56)..(673): Homolog of NCBI NO: 18405677 NR Description: expressed protein; protein id: At3g28180.1, by cDNA: gi_15810494, supported by cDNA: gi_20259272 [Arabidopsis
  misc_feature (1)..(125): Homolog of NCBI NO: 18405677 NR Description: expressed protein; protein id: At3g28180.1, by cDNA: gi_15810494, supported by cDNA: gi_20259272 [Arabidopsis

SEQ ID NO: 74752 - DNA, 2077 bp, Arabidopsis thaliana
  misc_feature (1)..(2077): Ceres Seq. ID no. 5679428
  misc_feature: MA Experiment ID: 108434 Result: Up-regulated in Transcription
  misc_feature: MA Experiment 108434 PARAMETER Experiment Name: At_Root_Tips_cDNA_P Parameter: Tissue Value: Root Tips
  misc_feature: MA Experiment ID: 108462 Result: Down-regulated in Transcription
  misc_feature: MA Experiment 108462 PARAMETER Experiment Name: At_Germinating_Seeds_cDNA_P Parameter: Age (day) Value: 2 vs. 0
  misc_feature: MA Experiment 108462 PARAMETER Experiment Name: At_Germinating_Seeds_cDNA_P Parameter: Tissue Value: Germinating Seeds
  misc_feature: MA Experiment ID: 20000113 Result: Down-regulated in Transcription
  misc_feature: MA Experiment 20000113 PARAMETER Experiment Name: At_42deg_Heat_cDNA_P Parameter: Temperature (deg C) Value: 42 vs. 22
  misc_feature: MA Experiment 20000113 PARAMETER Experiment Name: At_42deg_Heat_cDNA_P Parameter: Timepoint (hr) Value: 8
  misc_feature: MA Experiment 20000113 PARAMETER Experiment Name: At_42deg_Heat_cDNA_P Parameter: Tissue Value: Aerial
  misc_feature: MA Experiment ID: 20000171 Result: Down-regulated in Transcription
  misc_feature: MA Experiment 20000171 PARAMETER Experiment Name: At_42deg_Heat_P Parameter: Age (day) Value: 14
  misc_feature: MA Experiment 20000171 PARAMETER Experiment Name: At_42deg_Heat_P Parameter: Organism Value: A. thaliana
  misc_feature: MA Experiment 20000171 PARAMETER Experiment Name: At_42deg_Heat_P Parameter: Plant Line Value: WS
  misc_feature: MA Experiment 20000171 PARAMETER Experiment Name: At_42deg_Heat_P Parameter: Temperature (deg C) Value: 42 vs. 22
  misc_feature: MA Experiment 20000171 PARAMETER Experiment Name: At_42deg_Heat_P Parameter: Timepoint (hr) Value: 1
  misc_feature: MA Experiment 20000171 PARAMETER Experiment Name: At_42deg_Heat_P Parameter: Tissue Value: Aerial
  misc_feature: MA Experiment ID: 20000179 Result: Down-regulated in Transcription
  misc_feature: MA Experiment 20000179 PARAMETER Experiment Name: At_Germinating_Seeds_P Parameter: Age (hr) Value: 6 vs. 0
  misc_feature: MA Experiment 20000179 PARAMETER Experiment Name: At_Germinating_Seeds_P Parameter: Tissue Value: Germinating Seeds
  misc_feature: MA Experiment ID: 20000180 Result: Down-regulated in Transcription
  misc_feature: MA Experiment 20000180 PARAMETER Experiment Name: At_Germinating_Seeds_P Parameter: Age (hr) Value: 24 vs. 0
  misc_feature: MA Experiment 20000180 PARAMETER Experiment Name: At_Germinating_Seeds_P Parameter: Tissue Value: Germinating Seeds
  misc_feature: MA Experiment ID: 20000794 Result: Up-regulated in Transcription
  misc_feature: MA Experiment 20000794 PARAMETER Experiment Name: At_Petals_P Parameter: Age (day) Value: 23-25 days
  misc_feature: MA Experiment 20000794 PARAMETER Experiment Name: At_Petals_P Parameter: Plant Line Value: WS
  misc_feature: MA Experiment 20000794 PARAMETER Experiment Name: At_Petals_P Parameter: Tissue Value: Petals vs. Whole plant
gaattgatcgactggaaaacagagaaccaccgtttctacagttggatatggctggtgggcaaatagagaagctagtcaaatacaagagcactgtcaaggatccaggaactcctggatttctcagaattagagaagggatgttgctcttcgtccctaatgatcccaaatcagattctaagctcaaagtacttactcagaacatcaaaagtcaaaaatataccaaagaaggatcaaataaacctccttggctcaatctcaccaacaagcaggcaaagagtcatatctttgagtttgaaaattatcccgacatgcatgcttgccgtgatttcatcactaaggcccttgctaaatgtgaattggagcctaataaatccgttgtctcgacatcttccgagcaactcagtattaaggaattggagctgcgcttcaagcttctgagagaaaatagtgagctgcagagattgcataagcaatttgtggaaagtaaagtactgactgaagatgaattctgggctacaagaaagaaattacttggtaaagattccatcagaaagtcaaaacagcagctcgggcttaagagcatgatggtttctggcatcaaaccatctactgatgggcggactaatagagtgacgtttaacttgacacctgagataatttttcagatttttgctgagaagccagctgttcggcaggcattcatcaattatgttccgagtaagatgacagaaaaagacttctggacaaaatattttagagcagaatatctttacagcaccaaaaatacagcagtagctgcagcagaagctgctgaggacgaggaactcgctgtctttctgaagcctgatgagatattggctcgggaaactcgtcacaagattagacgggttgatccaactcttgacatggaggctgaccagggagacgactacactcatcttatggaccacgggatccagcgtgatggcaccatggatgttgttgaaccacaaaatgatcagtttaaacgatcacttttgcaagatcttaatcgtcatgctgctgttgtattggaaggcagaagcattgatgttgagtcagaagatacaaggattgttgcagaggctctcacacgggttaaacaagtaagcaaagctgatggtgaaaccaccaaggacgctaatcaggagagattggaaagaatgtcccgggtagcaggaatggaggatcttcaagcaccacaaaatttcccattggcgccgctttctatcaaggatcctcgtgattactttgaatctcaacaaggaaacgtcctcaatgtacccagaggagcaaagggcttgaagagaaatgtccatgaagcttatggattactaaaggaatccattttagagattagagctacaggattaagtgatccgttgattaagcctgaagtttctttcgaggttttcagttcgttaacccgaaccattgcaactgctaaaaatattaatgggaagaacccacgagagagctttctggacagattaccaaagtccactaaggatgaagttctacaccattggacatcaatacaagaattactgaaacatttttggtcatcttatccgataacaaccacatatcttcataccaaggttggtaaactgaaggatgcaatgtccaatacatattcaaaacttgaggcaatgaaagagtcggtgcaatctgatctccggcatcaggtttctctactggttcgtccaatgcaacaggctcttgacgctgcgttccatcactacgaagtggatctgcagagaagaacagctaagagcggcgaaagaccaaacggctacgtatagaggacaaaaaaactaaaactaaaaagctttgcaagatctttgaattgtttcatcagccttggttggtgtttttgaaaatcttcatttgtccctttttgtccgaccattgagatacaaaaatgcgtttatattgtagtaatattttcttttcttttttttgttaattaggcgttatattgttaactgcgagagacaacaaagagattttctcgatctgaacatttttaagtttgcaatgtattagtaaattctct

SEQ ID NO: 74753 - protein, 606 aa, Arabidopsis thaliana
  peptide (1)..(606): Ceres Seq. ID no. 5679429
  misc_feature (208)..(254): Pfam Name: BSD domain Pfam Description: BSD domain
  misc_feature (16)..(513): Homolog of NCBI NO: 30696007 NR Description: expressed protein [Arabidopsis thaliana]
  misc_feature (536)..(606): Homolog of NCBI NO: 30696007 NR Description: expressed protein [Arabidopsis thaliana]
  misc_feature (46)..(597): Homolog of NCBI NO: 15233107 NR Description: putative protein; protein id: At3g61420.1
  misc_feature (4)..(374): Homolog of NCBI NO: 8778495 NR Description: F20N2.15 [Arabidopsis thaliana]
  misc_feature (417)..(606): Homolog of NCBI NO: 8778495 NR Description: F20N2.15 [Arabidopsis thaliana]
  misc_feature (375)..(417): Homolog of NCBI NO: 8778495 NR Description: F20N2.15 [Arabidopsis thaliana]
  misc_feature (26)..(605): Homolog of NCBI NO: 38636938 NR Description: unknown protein [Oryza sativa (japonica
  misc_feature (16)..(362): Homolog of NCBI NO: 10440006 NR Description: unnamed protein product [Homo sapiens]
  misc_feature (470)..(597): Homolog of NCBI NO: 10440006 NR Description: unnamed protein product [Homo sapiens]
  misc_feature (16)..(362): Homolog of NCBI NO: 4885365 NR Description: general transcription factor IIH, polypeptide 1 subunit) [Homo sapiens] >gi|416727|sp|P32780|TFH1_HUMAN TFIIH transcription factor complex p62 subunit (Basic transcription
IDRLENREPPFLQLDMAGGQIEKLVKYKSTVKDPGTPGFLRIREGMLLFVPNDPKSDSKLKVLTQNIKSQKYTKEGSNKPPWLNLTNKQAKSHIFEFENYPDMHACRDFITKALAKCELEPNKSVVSTSSEQLSIKELELRFKLLRENSELQRLHKQFVESKVLTEDEFWATRKKLLGKDSIRKSKQQLGLKSMMVSGIKPSTDGRTNRVTFNLTPEIIFQIFAEKPAVRQAFINYVPSKMTEKDFWTKYFRAEYLYSTKNTAVAAAEAAEDEELAVFLKPDEILARETRHKIRRVDPTLDMEADQGDDYTHLMDHGIQRDGTMDVVEPQNDQFKRSLLQDLNRHAAVVLEGRSIDVESEDTRIVAEALTRVKQVSKADGETTKDANQERLERMSRVAGMEDLQAPQNFPLAPLSIKDPRDYFESQQGNVLNVPRGAKGLKRNVHEAYGLLKESILEIRATGLSDPLIKPEVSFEVFSSLTRTIATAKNINGKNPRESFLDRLPKSTKDEVLHHWTSIQELLKHFWSSYPITTTYLHTKVGKLKDAMSNTYSKLEAMKESVQSDLRHQVSLLVRPMQQALDAAFHHYEVDLQRRTAKSGERPNGYV

SEQ ID NO: 74754 - protein, 591 aa, Arabidopsis thaliana
  peptide (1)..(591): Ceres Seq. ID no. 5679430
  misc_feature (193)..(239): Pfam Name: BSD domain Pfam Description: BSD domain
  misc_feature (1)..(498): Homolog of NCBI NO: 30696007 NR Description: expressed protein [Arabidopsis thaliana]
  misc_feature (521)..(591): Homolog of NCBI NO: 30696007 NR Description: expressed protein [Arabidopsis thaliana]
  misc_feature (31)..(582): Homolog of NCBI NO: 15233107 NR Description: putative protein; protein id: At3g61420.1
  misc_feature (1)..(359): Homolog of NCBI NO: 8778495 NR Description: F20N2.15 [Arabidopsis thaliana]
  misc_feature (402)..(591): Homolog of NCBI NO: 8778495 NR Description: F20N2.15 [Arabidopsis thaliana]
  misc_feature (360)..(402): Homolog of NCBI NO: 8778495 NR Description: F20N2.15 [Arabidopsis thaliana]
  misc_feature (11)..(590): Homolog of NCBI NO: 38636938 NR Description: unknown protein [Oryza sativa (japonica
  misc_feature (1)..(347): Homolog of NCBI NO: 10440006 NR Description: unnamed protein product [Homo sapiens]
  misc_feature (455)..(582): Homolog of NCBI NO: 10440006 NR Description: unnamed protein product [Homo sapiens]
  misc_feature (1)..(347): Homolog of NCBI NO: 4885365 NR Description: general transcription factor IIH, polypeptide 1 subunit) [Homo sapiens] >gi|416727|sp|P32780|TFH1_HUMAN TFIIH transcription factor complex p62 subunit (Basic transcription
MAGGQIEKLVKYKSTVKDPGTPGFLRIREGMLLFVPNDPKSDSKLKVLTQNIKSQKYTKEGSNKPPWLNLTNKQAKSHIFEFENYPDMHACRDFITKALAKCELEPNKSVVSTSSEQLSIKELELRFKLLRENSELQRLHKQFVESKVLTEDEFWATRKKLLGKDSIRKSKQQLGLKSMMVSGIKPSTDGRTNRVTFNLTPEIIFQIFAEKPAVRQAFINYVPSKMTEKDFWTKYFRAEYLYSTKNTAVAAAEAAEDEELAVFLKPDEILARETRHKIRRVDPTLDMEADQGDDYTHLMDHGIQRDGTMDVVEPQNDQFKRSLLQDLNRHAAVVLEGRSIDVESEDTRIVAEALTRVKQVSKADGETTKDANQERLERMSRVAGMEDLQAPQNFPLAPLSIKDPRDYFESQQGNVLNVPRGAKGLKRNVHEAYGLLKESILEIRATGLSDPLIKPEVSFEVFSSLTRTIATAKNINGKNPRESFLDRLPKSTKDEVLHHWTSIQELLKHFWSSYPITTTYLHTKVGKLKDAMSNTYSKLEAMKESVQSDLRHQVSLLVRPMQQALDAAFHHYEVDLQRRTAKSGERPNGYV

SEQ ID NO: 74755 - protein, 561 aa, Arabidopsis thaliana
  peptide (1)..(561): Ceres Seq. ID no. 5679431
  misc_feature (163)..(209): Pfam Name: BSD domain Pfam Description: BSD domain
  misc_feature (1)..(468): Homolog of NCBI NO: 30696007 NR Description: expressed protein [Arabidopsis thaliana]
  misc_feature (491)..(561): Homolog of NCBI NO: 30696007 NR Description: expressed protein [Arabidopsis thaliana]
  misc_feature (1)..(552): Homolog of NCBI NO: 15233107 NR Description: putative protein; protein id: At3g61420.1
  misc_feature (1)..(329): Homolog of NCBI NO: 8778495 NR Description: F20N2.15 [Arabidopsis thaliana]
  misc_feature (372)..(561): Homolog of NCBI NO: 8778495 NR Description: F20N2.15 [Arabidopsis thaliana]
  misc_feature (330)..(372): Homolog of NCBI NO: 8778495 NR Description: F20N2.15 [Arabidopsis thaliana]
  misc_feature (1)..(560): Homolog of NCBI NO: 38636938 NR Description: unknown protein [Oryza sativa (japonica
  misc_feature (1)..(317): Homolog of NCBI NO: 10440006 NR Description: unnamed protein product [Homo sapiens]
  misc_feature (425)..(552): Homolog of NCBI NO: 10440006 NR Description: unnamed protein product [Homo sapiens]
  misc_feature (1)..(317): Homolog of NCBI NO: 4885365 NR Description: general transcription factor IIH, polypeptide 1 subunit) [Homo sapiens] >gi|416727|sp|P32780|TFH1_HUMAN TFIIH transcription factor complex p62 subunit (Basic transcription
MLLFVPNDPKSDSKLKVLTQNIKSQKYTKEGSNKPPWLNLTNKQAKSHIFEFENYPDMHACRDFITKALAKCELEPNKSVVSTSSEQLSIKELELRFKLLRENSELQRLHKQFVESKVLTEDEFWATRKKLLGKDSIRKSKQQLGLKSMMVSGIKPSTDGRTNRVTFNLTPEIIFQIFAEKPAVRQAFINYVPSKMTEKDFWTKYFRAEYLYSTKNTAVAAAEAAEDEELAVFLKPDEILARETRHKIRRVDPTLDMEADQGDDYTHLMDHGIQRDGTMDVVEPQNDQFKRSLLQDLNRHAAVVLEGRSIDVESEDTRIVAEALTRVKQVSKADGETTKDANQERLERMSRVAGMEDLQAPQNFPLAPLSIKDPRDYFESQQGNVLNVPRGAKGLKRNVHEAYGLLKESILEIRATGLSDPLIKPEVSFEVFSSLTRTIATAKNINGKNPRESFLDRLPKSTKDEVLHHWTSIQELLKHFWSSYPITTTYLHTKVGKLKDAMSNTYSKLEAMKESVQSDLRHQVSLLVRPMQQALDAAFHHYEVDLQRRTAKSGERPNGYV

SEQ ID NO: 74756 - DNA, 1482 bp, Arabidopsis thaliana
  misc_feature (1)..(1482): Ceres Seq. ID no. 5679470
  misc_feature: MA Experiment ID: 108573 Result: Up-regulated in Transcription
  misc_feature: MA Experiment 108573 PARAMETER Experiment Name: At_Drought_cDNA_P Parameter: Timepoint (hr) Value: 6
  misc_feature: MA Experiment 108573 PARAMETER Experiment Name: At_Drought_cDNA_P Parameter: Tissue Value: Aerial
  misc_feature: MA Experiment 108573 PARAMETER Experiment Name: At_Drought_cDNA_P Parameter: Treatment Value: Drought vs. No Drought
  misc_feature: MA Experiment ID: 108579 Result: Down-regulated in Transcription
  misc_feature: MA Experiment 108579 PARAMETER Experiment Name: At_4deg_Cold_cDNA_P Parameter: Temperature (deg C) Value: 4 vs. 22
  misc_feature: MA Experiment 108579 PARAMETER Experiment Name: At_4deg_Cold_cDNA_P Parameter: Timepoint (hr) Value: 6
  misc_feature: MA Experiment 108579 PARAMETER Experiment Name: At_4deg_Cold_cDNA_P Parameter: Tissue Value: Aerial
  misc_feature: MA Experiment ID: 20001905 Result: Down-regulated in Transcription
  misc_feature: MA Experiment 20001905 PARAMETER Experiment Name: At_Drought_Reproduction_P Parameter: Age (day) Value: 40
  misc_feature: MA Experiment 20001905 PARAMETER Experiment Name: At_Drought_Reproduction_P Parameter: Organism Value: A. thaliana
  misc_feature: MA Experiment 20001905 PARAMETER Experiment Name: At_Drought_Reproduction_P Parameter: Plant Line Value: WS
  misc_feature: MA Experiment 20001905 PARAMETER Experiment Name: At_Drought_Reproduction_P Parameter: Timepoint (day) Value: 10
  misc_feature: MA Experiment 20001905 PARAMETER Experiment Name: At_Drought_Reproduction_P Parameter: Tissue Value: Rosettes
  misc_feature: MA Experiment 20001905 PARAMETER Experiment Name: At_Drought_Reproduction_P Parameter: Treatment Value: Drought vs. No Drought
  misc_feature: Pfam Name: Endonuclease_5 Pfam Description: Endonuclease V
aaatggatagtgaaggagcttcaagcgagtcttcttcttctggagatcagctcgagaagtggacagagtagtttcacatttgatttcagtttcattccgcacaatcaaatcggttgatgatttgtttgacttctttcagagagcaggatgagctgaagaagaaactgatcgcgtacgatgacttcacatggaagttatcttcatcaacggaactgtctcagggatcggagatacttaagtatgttggaggtgtagacatgagcttttgcaaagaagattcttccgtcgcatgcgcttgtctcgtcgttcttgagcttccttctctccgtgtagtccaccatgacttctctcttctccgcctccatgttccttatgtccctggatttcttgcctttcgtgaggctccggttcttttgcagattctgcagaagatgagagatgagaagcatccattctatcctcaggtactgatggtggatggaaatggaatacttcatccacgaggtataaacacacaactttacctttgttttgtagttgcatttcaagctctgtaattatggtgttagatgtaattgtcttctataggatttggcttggcgtgtcatttaggtgttcttgctcacctaccaaccattggggtcggaaagaatctgcatcatgtggatggtctgaatcaatctgaggttaaacagtcgcttcagctccaaataaacgagcatgagcaaactatcactttggtaggaaactctggaattacatggggagtagtaagtgactttgactgaacatctactgtagttgttgtgtctctttggtaataccgcgttatattagtagtgacttatcagttttagcaacgaaacttctccatagttgtggttttgataatcttgtgtaagatagtgaatttaatgatcaagttttacatattacgttcaacagggatttaggccaactctgagttctctaaagcccatatatgtatcggttggccatcgcatatcactggactctgccgttgaagttgtcaagataacctgcaagtaccgtgttccagaacctattagacaggcagatattagatcaagagcatatctccagaagcatcaaactgagtcttttaaagaactggcagtgcgaccaccggatcagactgaaccttaatccctcaagcaaccaagaacactattccacattacatagaaactctccaaagtctttaccaaagattgttaaatggacagattcaggcactgaagatccgccccaattatctccttcatttatctcactgacttgaagattgcaagctaaccaaggtaatcatgttatatccgatacattggaatttcctttccatacataccttaaacaagtgtaaatagaaaggctaggcaactggtaatttggttgtttgggcactgtatattgggagattttggggttctcgacaaacaattctatagctttgggtttggt

SEQ ID NO: 74757 - protein, 99 aa, Arabidopsis thaliana; identical to SEQ ID NO: 36617
  peptide (1)..(99): Ceres Seq. ID no. 5679471
  misc_feature: Pfam Name: Endonuclease_5 Pfam Description: Endonuclease V
  misc_feature (1)..(90): Homolog of NCBI NO: 18417747 NR Description: putative protein; protein id: At4g31150.1, by cDNA: 5161. [Arabidopsis thaliana] >gi|21593853|gb|AAM65820.1|
  misc_feature (1)..(99): Homolog of NCBI NO: 7486498 NR Description: hypothetical protein F6E21.70 - Arabidopsis >gi|7270017|emb|CAB79833.1| putative protein [Arabidopsis
  misc_feature (1)..(90): Homolog of NCBI NO: 28828773 NR Description: similar to Arabidopsis thaliana (Mouse-ear
  misc_feature (1)..(90): Homolog of NCBI NO: 31542775 NR Description: hypothetical protein FLJ35220 [Homo sapiens]
  misc_feature (1)..(90): Homolog of NCBI NO: 34875599 NR Description: similar to chromosome 17 open reading frame 27
  misc_feature (1)..(26): Homolog of NCBI NO: 21751158 NR Description: unnamed protein product [Homo sapiens]
  misc_feature (1)..(26): Homolog of NCBI NO: 40555767 NR Description: Unknown (protein for MGC:74455) [Homo sapiens]
  misc_feature (32)..(90): Homolog of NCBI NO: 28893575 NR Description: RIKEN cDNA A730011L01 gene [Mus musculus]
  misc_feature (1)..(83): Homolog of NCBI NO: 15606007 NR Description: hypothetical protein [Aquifex aeolicus]
  misc_feature (1)..(90): Homolog of NCBI NO: 19115244 NR Description: putative endonuclease [Schizosaccharomyces pombe]

SEQ ID NO: 74758 - protein, 146 aa, Arabidopsis thaliana; identical to SEQ ID NO: 36616
  peptide (1)..(146): Ceres Seq. ID no. 5679472
  misc_feature: Pfam Name: Endonuclease_5 Pfam Description: Endonuclease V
  misc_feature (9)..(137): Homolog of NCBI NO: 18417747 NR Description: putative protein; protein id: At4g31150.1, by cDNA: 5161. [Arabidopsis thaliana] >gi|21593853|gb|AAM65820.1|
  misc_feature (9)..(146): Homolog of NCBI NO: 7486498 NR Description: hypothetical protein F6E21.70 - Arabidopsis >gi|7270017|emb|CAB79833.1| putative protein [Arabidopsis
  misc_feature (10)..(137): Homolog of NCBI NO: 28828773 NR Description: similar to Arabidopsis thaliana (Mouse-ear
  misc_feature (8)..(137): Homolog of NCBI NO: 31542775 NR Description: hypothetical protein FLJ35220 [Homo sapiens]
  misc_feature (8)..(137): Homolog of NCBI NO: 34875599 NR Description: similar to chromosome 17 open reading frame 27
  misc_feature (9)..(73): Homolog of NCBI NO: 21751158 NR Description: unnamed protein product [Homo sapiens]
  misc_feature (8)..(73): Homolog of NCBI NO: 40555767 NR Description: Unknown (protein for MGC:74455) [Homo sapiens]
  misc_feature (79)..(137): Homolog of NCBI NO: 28893575 NR Description: RIKEN cDNA A730011L01 gene [Mus musculus]
  misc_feature (46)..(130): Homolog of NCBI NO: 15606007 NR Description: hypothetical protein [Aquifex aeolicus]
  misc_feature (11)..(137): Homolog of NCBI NO: 19115244 NR Description: putative endonuclease [Schizosaccharomyces pombe]

SEQ ID NO: 74759 - DNA, 968 bp, Arabidopsis thaliana
  misc_feature (1)..(968): Ceres Seq. ID no. 5679481
  misc_feature: MA Experiment ID: 108435 Result: Down-regulated in Transcription
  misc_feature: MA Experiment 108435 PARAMETER Experiment Name: At_stm_Mutants_cDNA_P Parameter: Plant Line Value: wt Landsburg vs stm
  misc_feature: MA Experiment 108435 PARAMETER Experiment Name: At_stm_Mutants_cDNA_P Parameter: Tissue Value: Shoot Apical Meristem Region
  misc_feature: MA Experiment ID: 108461 Result: Up-regulated in Transcription
  misc_feature: MA Experiment 108461 PARAMETER Experiment Name: At_Germinating_Seeds_cDNA_P Parameter: Age (day) Value: 1 vs. 0
  misc_feature: MA Experiment 108461 PARAMETER Experiment Name: At_Germinating_Seeds_cDNA_P Parameter: Tissue Value: Germinating Seeds
  misc_feature: MA Experiment ID: 108462 Result: Up-regulated in Transcription
  misc_feature: MA Experiment 108462 PARAMETER Experiment Name: At_Germinating_Seeds_cDNA_P Parameter: Age (day) Value: 2 vs. 0
  misc_feature: MA Experiment 108462 PARAMETER Experiment Name: At_Germinating_Seeds_cDNA_P Parameter: Tissue Value: Germinating Seeds
  misc_feature: MA Experiment ID: 108463 Result: Up-regulated in Transcription
  misc_feature: MA Experiment 108463 PARAMETER Experiment Name: At_Germinating_Seeds_cDNA_P Parameter: Age (day) Value: 3 vs. 0
  misc_feature: MA Experiment 108463 PARAMETER Experiment Name: At_Germinating_Seeds_cDNA_P Parameter: Tissue Value: Germinating Seeds
  misc_feature: MA Experiment ID: 108464 Result: Up-regulated in Transcription
  misc_feature: MA Experiment 108464 PARAMETER Experiment Name: At_Germinating_Seeds_cDNA_P Parameter: Age (day) Value: 4 vs. 0
  misc_feature: MA Experiment 108464 PARAMETER Experiment Name: At_Germinating_Seeds_cDNA_P Parameter: Tissue Value: Germinating Seeds
  misc_feature: MA Experiment ID: 108561 Result: Down-regulated in Transcription
  misc_feature: MA Experiment 108561 PARAMETER Experiment Name: At_100uM_ABA_cDNA_P Parameter: Timepoint (hr) Value: 6
  misc_feature: MA Experiment 108561 PARAMETER Experiment Name: At_100uM_ABA_cDNA_P Parameter: Tissue Value: Aerial
  misc_feature: MA Experiment 108561 PARAMETER Experiment Name: At_100uM_ABA_cDNA_P Parameter: Treatment Value: 100uM ABA vs. No Treatment
  misc_feature: MA Experiment ID: 108572 Result: Down-regulated in Transcription
  misc_feature: MA Experiment 108572 PARAMETER Experiment Name: At_Drought_cDNA_P Parameter: Timepoint (hr) Value: 1
  misc_feature: MA Experiment 108572 PARAMETER Experiment Name: At_Drought_cDNA_P Parameter: Tissue Value: Aerial
  misc_feature: MA Experiment 108572 PARAMETER Experiment Name: At_Drought_cDNA_P Parameter: Treatment Value: Drought vs. No Drought
  misc_feature: MA Experiment ID: 108573 Result: Down-regulated in Transcription
  misc_feature: MA Experiment 108573 PARAMETER Experiment Name: At_Drought_cDNA_P Parameter: Timepoint (hr) Value: 6
  misc_feature: MA Experiment 108573 PARAMETER Experiment Name: At_Drought_cDNA_P Parameter: Tissue Value: Aerial
  misc_feature: MA Experiment 108573 PARAMETER Experiment Name: At_Drought_cDNA_P Parameter: Treatment Value: Drought vs. No Drought
  misc_feature: MA Experiment ID: 108585 Result: Down-regulated in Transcription
  misc_feature: MA Experiment 108585 PARAMETER Experiment Name: At_5mM_NaNP_cDNA_P Parameter: Timepoint (hr) Value: 6
  misc_feature: MA Experiment 108585 PARAMETER Experiment Name: At_5mM_NaNP_cDNA_P Parameter: Tissue Value: Aerial
  misc_feature: MA Experiment 108585 PARAMETER Experiment Name: At_5mM_NaNP_cDNA_P Parameter: Treatment Value: null
  misc_feature: MA Experiment ID: 108595 Result: Down-regulated in Transcription
  misc_feature: MA Experiment 108595 PARAMETER Experiment Name: At_Ler-pi_Ovule_cDNA_P Parameter: Plant Line Value: null
  misc_feature: MA Experiment ID: 108607 Result: Down-regulated in Transcription
  misc_feature: MA Experiment 108607 PARAMETER Experiment Name: At_100uM_ABA_cDNA_P Parameter: Timepoint (hr) Value: 4
  misc_feature: MA Experiment 108607 PARAMETER Experiment Name: At_100uM_ABA_cDNA_P Parameter: Tissue Value: Aerial
  misc_feature: MA Experiment 108607 PARAMETER Experiment Name: At_100uM_ABA_cDNA_P Parameter: Treatment Value: 100uM ABA vs. No Treatment
  misc_feature: MA Experiment ID: 20000069 Result: Down-regulated in Transcription
  misc_feature: MA Experiment 20000069 PARAMETER Experiment Name: At_100uM_ABA_Mutants_cDNA_P Parameter: Plant Line Value: CS23
  misc_feature: MA Experiment 20000069 PARAMETER Experiment Name: At_100uM_ABA_Mutants_cDNA_P Parameter: Timepoint (hr) Value: 6
  misc_feature: MA Experiment 20000069 PARAMETER Experiment Name: At_100uM_ABA_Mutants_cDNA_P Parameter: Tissue Value: Aerial
  misc_feature: MA Experiment 20000069 PARAMETER Experiment Name: At_100uM_ABA_Mutants_cDNA_P Parameter: Treatment Value: 100uM ABA vs. No Treatment
  misc_feature: MA Experiment ID: 20000086 Result: Down-regulated in Transcription
  misc_feature: MA Experiment 20000086 PARAMETER Experiment Name: At_100uM_ABA_Mutants_cDNA_P Parameter: Plant Line Value: CS22
  misc_feature: MA Experiment 20000086 PARAMETER Experiment Name: At_100uM_ABA_Mutants_cDNA_P Parameter: Timepoint (hr) Value: 6
  misc_feature: MA Experiment 20000086 PARAMETER Experiment Name: At_100uM_ABA_Mutants_cDNA_P Parameter: Tissue Value: Aerial
  misc_feature: MA Experiment 20000086 PARAMETER Experiment Name: At_100uM_ABA_Mutants_cDNA_P Parameter: Treatment Value: 100uM ABA vs. No Treatment
  misc_feature: MA Experiment ID: 20000087 Result: Down-regulated in Transcription
  misc_feature: MA Experiment 20000087 PARAMETER Experiment Name: At_100uM_ABA_Mutants_cDNA_P Parameter: Plant Line Value: WS
  misc_feature: MA Experiment 20000087 PARAMETER Experiment Name: At_100uM_ABA_Mutants_cDNA_P Parameter: Timepoint (hr) Value: 6
  misc_feature: MA Experiment 20000087 PARAMETER Experiment Name: At_100uM_ABA_Mutants_cDNA_P Parameter: Tissue Value: Aerial
  misc_feature: MA Experiment 20000087 PARAMETER Experiment Name: At_100uM_ABA_Mutants_cDNA_P Parameter: Treatment Value: 100uM ABA vs. No Treatment
  misc_feature: MA Experiment ID: 20000088 Result: Down-regulated in Transcription
  misc_feature: MA Experiment 20000088 PARAMETER Experiment Name: At_100uM_ABA_Mutants_cDNA_P Parameter: Plant Line Value: Landsberg
  misc_feature: MA Experiment 20000088 PARAMETER Experiment Name: At_100uM_ABA_Mutants_cDNA_P Parameter: Timepoint (hr) Value: 6
  misc_feature: MA Experiment 20000088 PARAMETER Experiment Name: At_100uM_ABA_Mutants_cDNA_P Parameter: Tissue Value: Aerial
  misc_feature: MA Experiment 20000088 PARAMETER Experiment Name: At_100uM_ABA_Mutants_cDNA_P Parameter: Treatment Value: 100uM ABA vs. No Treatment
  misc_feature: MA Experiment ID: 20000117 Result: Down-regulated in Transcription
  misc_feature: MA Experiment 20000117 PARAMETER Experiment Name: At_100uM_ABA_Mutants_cDNA_P Parameter: Plant Line Value: Columbia
  misc_feature: MA Experiment 20000117 PARAMETER Experiment Name: At_100uM_ABA_Mutants_cDNA_P Parameter: Timepoint (hr) Value: 6
  misc_feature: MA Experiment 20000117 PARAMETER Experiment Name: At_100uM_ABA_Mutants_cDNA_P Parameter: Tissue Value: Aerial
  misc_feature: MA Experiment 20000117 PARAMETER Experiment Name: At_100uM_ABA_Mutants_cDNA_P Parameter: Treatment Value: 100uM ABA vs. No Treatment
  misc_feature: MA Experiment ID: 20000179 Result: Up-regulated in Transcription
  misc_feature: MA Experiment 20000179 PARAMETER Experiment Name: At_Germinating_Seeds_P Parameter: Age (hr) Value: 6 vs. 0
  misc_feature: MA Experiment 20000179 PARAMETER Experiment Name: At_Germinating_Seeds_P Parameter: Tissue Value: Germinating Seeds
  misc_feature: MA Experiment ID: 20000180 Result: Up-regulated in Transcription
  misc_feature: MA Experiment 20000180 PARAMETER Experiment Name: At_Germinating_Seeds_P Parameter: Age (hr) Value: 24 vs. 0
  misc_feature: MA Experiment 20000180 PARAMETER Experiment Name: At_Germinating_Seeds_P Parameter: Tissue Value: Germinating Seeds
  misc_feature: MA Experiment ID: 20000185 Result: Down-regulated in Transcription
  misc_feature: MA Experiment 20000185 PARAMETER Experiment Name: At_Roots__P Parameter: Age (day) Value: 7 vs. 21
  misc_feature: MA Experiment 20000185 PARAMETER Experiment Name: At_Roots__P Parameter: Organism Value: A. thaliana
  misc_feature: MA Experiment 20000185 PARAMETER Experiment Name: At_Roots__P Parameter: Tissue Value: Roots vs. Whole Plant
  misc_feature: MA Experiment ID: 20000234 Result: Up-regulated in Transcription
  misc_feature: MA Experiment 20000234 PARAMETER Experiment Name: At_Siliques_P Parameter: Age (day) Value: 21
  misc_feature: MA Experiment 20000234 PARAMETER Experiment Name: At_Siliques_P Parameter: Organism Value: A. thaliana
  misc_feature: MA Experiment 20000234 PARAMETER Experiment Name: At_Siliques_P Parameter: Plant Line Value: WS
  misc_feature: MA Experiment 20000234 PARAMETER Experiment Name: At_Siliques_P Parameter: Tissue Value: Less Than 5mm Siliques vs. Whole Plant
  misc_feature: MA Experiment ID: 20000235 Result: Up-regulated in Transcription
  misc_feature: MA Experiment 20000235 PARAMETER Experiment Name: At_Siliques_P Parameter: Age (day) Value: 21
  misc_feature: MA Experiment 20000235 PARAMETER Experiment Name: At_Siliques_P Parameter: Organism Value: A. thaliana
  misc_feature: MA Experiment 20000235 PARAMETER Experiment Name: At_Siliques_P Parameter: Plant Line Value: WS
  misc_feature: MA Experiment 20000235 PARAMETER Experiment Name: At_Siliques_P Parameter: Tissue Value: 5-10mm Siliques vs. Whole Plant
  misc_feature: MA Experiment ID: 20000436 Result: Down-regulated in Transcription
  misc_feature: MA Experiment 20000436 PARAMETER Experiment Name: At_Drought_P Parameter: Age (day) Value: 7
  misc_feature: MA Experiment 20000436 PARAMETER Experiment Name: At_Drought_P Parameter: Organism Value: A. thaliana
  misc_feature: MA Experiment 20000436 PARAMETER Experiment Name: At_Drought_P Parameter: Plant Line Value: WS
  misc_feature: MA Experiment 20000436 PARAMETER Experiment Name: At_Drought_P Parameter: Timepoint (hr) Value: 12
  misc_feature: MA Experiment 20000436 PARAMETER Experiment Name: At_Drought_P Parameter: Tissue Value: Whole Plant
  misc_feature: MA Experiment 20000436 PARAMETER Experiment Name: At_Drought_P Parameter: Treatment Value: Drought vs. No Drought
  misc_feature: MA Experiment ID: 20000437 Result: Down-regulated in Transcription
  misc_feature: MA Experiment 20000437 PARAMETER Experiment Name: At_Drought_P Parameter: Age (day) Value: 8
  misc_feature: MA Experiment 20000437 PARAMETER Experiment Name: At_Drought_P Parameter: Organism Value: A. thaliana
  misc_feature: MA Experiment 20000437 PARAMETER Experiment Name: At_Drought_P Parameter: Plant Line Value: WS
  misc_feature: MA Experiment 20000437 PARAMETER Experiment Name: At_Drought_P Parameter: Timepoint (hr) Value: 24
  misc_feature: MA Experiment 20000437 PARAMETER Experiment Name: At_Drought_P Parameter: Tissue Value: Whole Plant
  misc_feature: MA Experiment 20000437 PARAMETER Experiment Name: At_Drought_P Parameter: Treatment Value: Drought vs. No Drought
  misc_feature: MA Experiment ID: 20000438 Result: Up-regulated in Transcription
  misc_feature: MA Experiment 20000438 PARAMETER Experiment Name: At_Shoots__P Parameter: Age (day) Value: 14
  misc_feature: MA Experiment 20000438 PARAMETER Experiment Name: At_Shoots__P Parameter: Tissue Value: Shoots vs. Whole Plant
  misc_feature: MA Experiment ID: 20000439 Result: Down-regulated in Transcription
  misc_feature: MA Experiment 20000439 PARAMETER Experiment Name: At_Roots__P Parameter: Age (day) Value: 14 vs. 21
  misc_feature: MA Experiment 20000439 PARAMETER Experiment Name: At_Roots__P Parameter: Organism Value: A. thaliana
  misc_feature: MA Experiment 20000439 PARAMETER Experiment Name: At_Roots__P Parameter: Tissue Value: Roots vs. Whole Plant
  misc_feature: MA Experiment ID: 20001247 Result: Down-regulated in Transcription
  misc_feature: MA Experiment 20001247 PARAMETER Experiment Name: At_Far-red-induction_P Parameter: Age (day) Value: 7
  misc_feature: MA Experiment 20001247 PARAMETER Experiment Name: At_Far-red-induction_P Parameter: Light Value: Far-red vs. White
  misc_feature: MA Experiment 20001247 PARAMETER Experiment Name: At_Far-red-induction_P Parameter: Organism Value: A. thaliana
  misc_feature: MA Experiment 20001247 PARAMETER Experiment Name: At_Far-red-induction_P Parameter: Plant Line Value: Columbia
  misc_feature: MA Experiment 20001247 PARAMETER Experiment Name: At_Far-red-induction_P Parameter: Timepoint (hr) Value: 1
  misc_feature: MA Experiment 20001247 PARAMETER Experiment Name: At_Far-red-induction_P Parameter: Tissue Value: Whole Plant
  misc_feature: MA Experiment ID: 20001248 Result: Down-regulated in Transcription
  misc_feature: MA Experiment 20001248 PARAMETER Experiment Name: At_Far-red-induction_P Parameter: Age (day) Value: 7
  misc_feature: MA Experiment 20001248 PARAMETER Experiment Name: At_Far-red-induction_P Parameter: Light Value: Far-red vs. White
  misc_feature: MA Experiment 20001248 PARAMETER Experiment Name: At_Far-red-induction_P Parameter: Organism Value: A. thaliana
  misc_feature: MA Experiment 20001248 PARAMETER Experiment Name: At_Far-red-induction_P Parameter: Plant Line Value: Columbia
  misc_feature: MA Experiment 20001248 PARAMETER Experiment Name: At_Far-red-induction_P Parameter: Timepoint (hr) Value: 4
  misc_feature: MA Experiment 20001248 PARAMETER Experiment Name: At_Far-red-induction_P Parameter: Tissue Value: Whole Plant
  misc_feature: MA Experiment ID: 20001450 Result: Down-regulated in Transcription
  misc_feature: MA Experiment 20001450 PARAMETER Experiment Name: At_Far-red-induction_P Parameter: Age (day) Value: 7
  misc_feature: MA Experiment 20001450 PARAMETER Experiment Name: At_Far-red-induction_P Parameter: Light Value: Far-red vs. White
  misc_feature: MA Experiment 20001450 PARAMETER Experiment Name: At_Far-red-induction_P Parameter: Organism Value: A. thaliana
  misc_feature: MA Experiment 20001450 PARAMETER Experiment Name: At_Far-red-induction_P Parameter: Plant Line Value: Columbia
  misc_feature: MA Experiment 20001450 PARAMETER Experiment Name: At_Far-red-induction_P Parameter: Timepoint (hr) Value: 8
  misc_feature: MA Experiment 20001450 PARAMETER Experiment Name: At_Far-red-induction_P Parameter: Tissue Value: Whole Plant
  misc_feature: MA Experiment ID: 20001560 Result: Up-regulated in Transcription
  misc_feature: MA Experiment 20001560 PARAMETER Experiment Name: At_Drought_Soil_Dry_P Parameter: Age (day) Value: 28
  misc_feature: MA Experiment 20001560 PARAMETER Experiment Name: At_Drought_Soil_Dry_P Parameter: Organism Value: A. thaliana
  misc_feature: MA Experiment 20001560 PARAMETER Experiment Name: At_Drought_Soil_Dry_P Parameter: Plant Line Value: WS
  misc_feature: MA Experiment 20001560 PARAMETER Experiment Name: At_Drought_Soil_Dry_P Parameter: Post Timepoint (hr) Value: None
  misc_feature: MA Experiment 20001560 PARAMETER Experiment Name: At_Drought_Soil_Dry_P Parameter: Post-Treatment Value: None
  misc_feature: MA Experiment 20001560 PARAMETER Experiment Name: At_Drought_Soil_Dry_P Parameter: Timepoint (day) Value: 14
  misc_feature: MA Experiment 20001560 PARAMETER Experiment Name: At_Drought_Soil_Dry_P Parameter: Treatment Value: Drought vs. No Drought
  misc_feature: MA Experiment ID: 20001757 Result: Up-regulated in Transcription
  misc_feature: MA Experiment 20001757 PARAMETER Experiment Name: At_50mM_NH4NO3_L-to-H_P Parameter: Timepoint (hr) Value: 6
  misc_feature: MA Experiment 20001757 PARAMETER Experiment Name: At_50mM_NH4NO3_L-to-H_P Parameter: Tissue Value: Leaf
  misc_feature: MA Experiment 20001757 PARAMETER Experiment Name: At_50mM_NH4NO3_L-to-H_P Parameter: Treatment Value: 50mM NH4NO3 vs 100mM Mannitol
  misc_feature: MA Experiment ID: 20001905 Result: Down-regulated in Transcription
  misc_feature: MA Experiment 20001905 PARAMETER Experiment Name: At_Drought_Reproduction_P Parameter: Age (day) Value: 40
  misc_feature: MA Experiment 20001905 PARAMETER Experiment Name: At_Drought_Reproduction_P Parameter: Organism Value: A. thaliana
  misc_feature: MA Experiment 20001905 PARAMETER Experiment Name: At_Drought_Reproduction_P Parameter: Plant Line Value: WS
  misc_feature: MA Experiment 20001905 PARAMETER Experiment Name: At_Drought_Reproduction_P Parameter: Timepoint (day) Value: 10
  misc_feature: MA Experiment 20001905 PARAMETER Experiment Name: At_Drought_Reproduction_P Parameter: Tissue Value: Rosettes
  misc_feature: MA Experiment 20001905 PARAMETER Experiment Name: At_Drought_Reproduction_P Parameter: Treatment Value: Drought vs. No Drought
actcttttggccttatccgaaatctttttgtgggcagaaacgtttgtgtcttaggccaatctctgtgtctctctgtccagagagaaatggcagcatcatcagtactactctcgtgcttcaaatcccatcatcaaccaaaccttctccatggctgcaactactcatctaaccaaacactcctcagattcaacttttcaaccccaaaacctctcctgatctcctcacggagctgctcacgacgattcagagtcttgtcagagaccatcaccgtcaaattggaagaggaggagaaggatgatggtgcaagtgctgttcttgatcctcctgccgccgttaacactaagctctacttcggtaacttgccttacaatgttgacagtgcaactctggctcaaatcattcaagatttcgctaaccctgagctcgttgaggttctttacaacagagataccggacagagtcgtggattcgccttcgttaccatgagcaatgtcgaagattgcaacatcatcatcgataacctcgatggaactgagtatcttggtcgtgctttgaaagtgaactttgcagacaaaccaaagcctaacaaagaacctctgtatccagaaacagagcacaagctctttgttggtaacttatcatggactgttacttccgagtcattagctggagcgtttcgagaatgtggagatgtggttggggctagagttgtgtttgatggagatacaggaagatcacggggttatggctttgtatgttactcttccaaagcagaaatggaaaccgctcttgaatcgcttgacggatttgagctggagggtcgggcgattcgagtaaaccttgctcaagggaagaaattttgatatcatacaacaacattgtgtaatcatttagagttttatacattagagttatgtttatattgattgaactaattaactcaaaagatcaataaaactttttatgct

SEQ ID NO: 74760 - protein, 286 aa, Arabidopsis thaliana; identical to SEQ ID NO: 37614
  peptide (1)..(286): Ceres Seq. ID no. 5679482
  misc_feature (115)..(186): Pfam Name: RNA recognition motif. (a.k.a. RRM, RBD, or RNP domain) Pfam Description: RNA recognition motif. (a.k.a. RRM, RBD, or RNP
  misc_feature (29)..(286): Homolog of NCBI NO: 15218972 NR Description: chloroplast RNA-binding protein, putative; id: At1g60000.1, supported by cDNA: 41722., supported by cDNA: [Arabidopsis thaliana] >gi|25386566|pir||C96624 hypothetical
  misc_feature (72)..(285): Homolog of NCBI NO: 1076509 NR Description: RNA-binding protein RNP1 precursor - kidney bean
  misc_feature (86)..(285): Homolog of NCBI NO: 7446361 NR Description: RNA-binding protein - fava bean (fragment)
  misc_feature (29)..(94): Homolog of NCBI NO: 30696379 NR Description: 29 kDa ribonucleoprotein, chloroplast protein cp29), putative [Arabidopsis thaliana]
  misc_feature (30)..(197): Homolog of NCBI NO: 21617920 NR Description: putative RNA-binding protein [Arabidopsis
  misc_feature (205)..(284): Homolog of NCBI NO: 21617920 NR Description: putative RNA-binding protein [Arabidopsis
  misc_feature (30)..(197): Homolog of NCBI NO: 15228102 NR Description: chloroplast RNA-binding protein cp29, putative; id: At2g37220.1, supported by cDNA: 8849., supported by cDNA: supported by cDNA: gi_15081716, supported by cDNA: gi_16323481
  misc_feature (205)..(284): Homolog of NCBI NO: 15228102 NR Description: chloroplast RNA-binding protein cp29, putative; id: At2g37220.1, supported by cDNA: 8849., supported by cDNA: supported by cDNA: gi_15081716, supported by cDNA: gi_16323481
  misc_feature (54)..(284): Homolog of NCBI NO: 12230584 NR Description: 29 kDa ribonucleoprotein A, chloroplast precursor
  misc_feature (67)..(284): Homolog of NCBI NO: 34913270 NR Description: putative ribonucleoprotein [Oryza sativa cultivar- group)] >gi|22296371|dbj|BAC10140.1| putative 29 kDa

SEQ ID NO: 74761 - protein, 258 aa, Arabidopsis thaliana; identical to SEQ ID NO: 37615
  peptide (1)..(258): Ceres Seq. ID no. 5679483
  misc_feature (87)..(158): Pfam Name: RNA recognition motif. (a.k.a. RRM, RBD, or RNP domain) Pfam Description: RNA recognition motif. (a.k.a. RRM, RBD, or RNP
  misc_feature (1)..(258): Homolog of NCBI NO: 15218972 NR Description: chloroplast RNA-binding protein, putative; id: At1g60000.1, supported by cDNA: 41722., supported by cDNA: [Arabidopsis thaliana] >gi|25386566|pir||C96624 hypothetical
  misc_feature (44)..(257): Homolog of NCBI NO: 1076509 NR Description: RNA-binding protein RNP1 precursor - kidney bean
  misc_feature (58)..(257): Homolog of NCBI NO: 7446361 NR Description: RNA-binding protein - fava bean (fragment)
  misc_feature (1)..(66): Homolog of NCBI NO: 30696379 NR Description: 29 kDa ribonucleoprotein, chloroplast protein cp29), putative [Arabidopsis thaliana]
  misc_feature (2)..(169): Homolog of NCBI NO: 21617920 NR Description: putative RNA-binding protein [Arabidopsis
  misc_feature (177)..(256): Homolog of NCBI NO: 21617920 NR Description: putative RNA-binding protein [Arabidopsis
  misc_feature (2)..(169): Homolog of NCBI NO: 15228102 NR Description: chloroplast RNA-binding protein cp29, putative; id: At2g37220.1, supported by cDNA: 8849., supported by cDNA: supported by cDNA: gi_15081716, supported by cDNA: gi_16323481
  misc_feature (177)..(256): Homolog of NCBI NO: 15228102 NR Description: chloroplast RNA-binding protein cp29, putative; id: At2g37220.1, supported by cDNA: 8849., supported by cDNA: supported by cDNA: gi_15081716, supported by cDNA: gi_16323481
  misc_feature (26)..(256): Homolog of NCBI NO: 12230584 NR Description: 29 kDa ribonucleoprotein A, chloroplast precursor
  misc_feature (39)..(256): Homolog of NCBI NO: 34913270 NR Description: putative ribonucleoprotein [Oryza sativa cultivar- group)] >gi|22296371|dbj|BAC10140.1| putative 29 kDa

SEQ ID NO: 74762 - DNA, 1194 bp, Arabidopsis thaliana
  misc_feature (1)..(1194): Ceres Seq. ID no. 5679484
  misc_feature: MA Experiment ID: 108579 Result: Down-regulated in Transcription
  misc_feature: MA Experiment 108579 PARAMETER Experiment Name: At_4deg_Cold_cDNA_P Parameter: Temperature (deg C) Value: 4 vs. 22
  misc_feature: MA Experiment 108579 PARAMETER Experiment Name: At_4deg_Cold_cDNA_P Parameter: Timepoint (hr) Value: 6
  misc_feature: MA Experiment 108579 PARAMETER Experiment Name: At_4deg_Cold_cDNA_P Parameter: Tissue Value: Aerial
  misc_feature: MA Experiment ID: 20000111 Result: Down-regulated in Transcription
  misc_feature: MA Experiment 20000111 PARAMETER Experiment Name: At_42deg_Heat_cDNA_P Parameter: Temperature (deg C) Value: 42 vs. 22
  misc_feature: MA Experiment 20000111 PARAMETER Experiment Name: At_42deg_Heat_cDNA_P Parameter: Timepoint (hr) Value: 6
  misc_feature: MA Experiment 20000111 PARAMETER Experiment Name: At_42deg_Heat_cDNA_P Parameter: Tissue Value: Aerial
  misc_feature: MA Experiment ID: 20001905 Result: Down-regulated in Transcription
  misc_feature: MA Experiment 20001905 PARAMETER Experiment Name: At_Drought_Reproduction_P Parameter: Age (day) Value: 40
  misc_feature: MA Experiment 20001905 PARAMETER Experiment Name: At_Drought_Reproduction_P Parameter: Organism Value: A. thaliana
  misc_feature: MA Experiment 20001905 PARAMETER Experiment Name: At_Drought_Reproduction_P Parameter: Plant Line Value: WS
  misc_feature: MA Experiment 20001905 PARAMETER Experiment Name: At_Drought_Reproduction_P Parameter: Timepoint (day) Value: 10
  misc_feature: MA Experiment 20001905 PARAMETER Experiment Name: At_Drought_Reproduction_P Parameter: Tissue Value: Rosettes
  misc_feature: MA Experiment 20001905 PARAMETER Experiment Name: At_Drought_Reproduction_P Parameter: Treatment Value: Drought vs. No Drought
  misc_feature: Pfam Name: Endonuclease_5 Pfam Description: Endonuclease V
gttccgattaggaacttcctctccggcgactgaactttttctggaaatggatagtgaaggagcttcaagcgagtcttcttcttctggagatcagctcgagaagtggacagaagagcaggatgagctgaagaagaaactgatcgcgtacgatgacttcacatggaagttatcttcatcaacggaactgtctcagggatcggagatacttaagtatgttggaggtgtagacatgagcttttgcaaagaagattcttccgtcgcatgcgcttgtctcgtcgttcttgagcttccttctctccgtgtagtccaccatgacttctctcttctccgcctccatgttccttatgtccctggatttcttgcctttcgtgaggctccggttcttttgcagattctgcagaagatgagagatgagaagcatccattctatcctcaggtactgatggtggatggaaatggaatacttcatccacgaggatttggcttggcgtgtcatttaggtgttcttgctcacctaccaaccattggggtcggaaagaatctgcatcatgtggatggtctgaatcaatctgaggttaaacagtcgcttcagctccaaataaacgagcatgagcaaactatcactttggtaggaaactctggaattacatggggagtaggatttaggccaactctgagttctctaaagcccatatatgtatcggttggccatcgcatatcactggactctgccgttgaagttgtcaagataacctgcaagtaccgtgttccagaacctattagacaggcagatattagatcaagagcatatctccagaagcatcaaactgagtcttttaaagaactggcagtgcgaccaccggatcagactgaaccttaatccctcaagcaaccaagaacactattccacattacatagaaactctccaaagtctttaccaaagattgttaaatggacagattcaggcactgaagatccgccccaattatctccttcatttatctcactgacttgaagattgcaagctaaccaaggtaatcatgttatatccgatacattggaatttcctttccatacataccttaaacaagtgtaaatagaaaggctaggcaactggtaatttggttgtttgggcactgtatattgggagattttggggttctcgacaaacaattctatagctttgggtttgg

SEQ ID NO: 74763 - protein, 292 aa, Arabidopsis thaliana; identical to SEQ ID NO: 27038
  peptide (1)..(292): Ceres Seq. ID no. 5679485
  misc_feature: Pfam Name: Endonuclease_5 Pfam Description: Endonuclease V
  misc_feature (16)..(292): Homolog of NCBI NO: 18417747 NR Description: putative protein; protein id: At4g31150.1, by cDNA: 5161. [Arabidopsis thaliana] >gi|21593853|gb|AAM65820.1|
  misc_feature (145)..(289): Homolog of NCBI NO: 7486498 NR Description: hypothetical protein F6E21.70 - Arabidopsis >gi|7270017|emb|CAB79833.1| putative protein [Arabidopsis
  misc_feature (16)..(146): Homolog of NCBI NO: 7486498 NR Description: hypothetical protein F6E21.70 - Arabidopsis >gi|7270017|emb|CAB79833.1| putative protein [Arabidopsis
  misc_feature (30)..(208): Homolog of NCBI NO: 28828773 NR Description: similar to Arabidopsis thaliana (Mouse-ear
  misc_feature (207)..(272): Homolog of NCBI NO: 28828773 NR Description: similar to Arabidopsis thaliana (Mouse-ear
  misc_feature (30)..(273): Homolog of NCBI NO: 31542775 NR Description: hypothetical protein FLJ35220 [Homo sapiens]
  misc_feature (34)..(278): Homolog of NCBI NO: 34875599 NR Description: similar to chromosome 17 open reading frame 27
  misc_feature (108)..(292): Homolog of NCBI NO: 28893575 NR Description: RIKEN cDNA A730011L01 gene [Mus musculus]
  misc_feature (145)..(273): Homolog of NCBI NO: 40555767 NR Description: Unknown (protein for MGC:74455) [Homo sapiens]
  misc_feature (30)..(102): Homolog of NCBI NO: 40555767 NR Description: Unknown (protein for MGC:74455) [Homo sapiens]

SEQ ID NO: 74764 - protein, 277 aa, Arabidopsis thaliana; identical to SEQ ID NO: 27039
  peptide (1)..(277): Ceres Seq. ID no. 5679486
  misc_feature: Pfam Name: Endonuclease_5 Pfam Description: Endonuclease V
  misc_feature (1)..(277): Homolog of NCBI NO: 18417747 NR Description: putative protein; protein id: At4g31150.1, by cDNA: 5161. [Arabidopsis thaliana] >gi|21593853|gb|AAM65820.1|
  misc_feature (130)..(274): Homolog of NCBI NO: 7486498 NR Description: hypothetical protein F6E21.70 - Arabidopsis >gi|7270017|emb|CAB79833.1| putative protein [Arabidopsis
  misc_feature (1)..(131): Homolog of NCBI NO: 7486498 NR Description: hypothetical protein F6E21.70 - Arabidopsis >gi|7270017|emb|CAB79833.1| putative protein [Arabidopsis
  misc_feature (15)..(193): Homolog of NCBI NO: 28828773 NR Description: similar to Arabidopsis thaliana (Mouse-ear
  misc_feature (192)..(257): Homolog of NCBI NO: 28828773 NR Description: similar to Arabidopsis thaliana (Mouse-ear
  misc_feature (15)..(258): Homolog of NCBI NO: 31542775 NR Description: hypothetical protein FLJ35220 [Homo sapiens]
  misc_feature (19)..(263): Homolog of NCBI NO: 34875599 NR Description: similar to chromosome 17 open reading frame 27
  misc_feature (93)..(277): Homolog of NCBI NO: 28893575 NR Description: RIKEN cDNA A730011L01 gene [Mus musculus]
  misc_feature (130)..(258): Homolog of NCBI NO: 40555767 NR Description: Unknown (protein for MGC:74455) [Homo sapiens]
  misc_feature (15)..(87): Homolog of NCBI NO: 40555767 NR Description: Unknown (protein for MGC:74455) [Homo sapiens]

SEQ ID NO: 74765 - protein, 216 aa, Arabidopsis thaliana; identical to SEQ ID NO: 27040
  peptide (1)..(216): Ceres Seq. ID no. 5679487
  misc_feature: Pfam Name: Endonuclease_5 Pfam Description: Endonuclease V
  misc_feature (1)..(216): Homolog of NCBI NO: 18417747 NR Description: putative protein; protein id: At4g31150.1, by cDNA: 5161. [Arabidopsis thaliana] >gi|21593853|gb|AAM65820.1|
  misc_feature (69)..(213): Homolog of NCBI NO: 7486498 NR Description: hypothetical protein F6E21.70 - Arabidopsis >gi|7270017|emb|CAB79833.1| putative protein [Arabidopsis
  misc_feature (1)..(70): Homolog of NCBI NO: 7486498 NR Description: hypothetical protein F6E21.70 - Arabidopsis >gi|7270017|emb|CAB79833.1| putative protein [Arabidopsis
  misc_feature (1)..(132): Homolog of NCBI NO: 28828773 NR Description: similar to Arabidopsis thaliana (Mouse-ear
  misc_feature (131)..(196): Homolog of NCBI NO: 28828773 NR Description: similar to Arabidopsis thaliana (Mouse-ear
  misc_feature (1)..(197): Homolog of NCBI NO: 31542775 NR Description: hypothetical protein FLJ35220 [Homo sapiens]
  misc_feature (1)..(202): Homolog of NCBI NO: 34875599 NR Description: similar to chromosome 17 open reading frame 27
  misc_feature (32)..(216): Homolog of NCBI NO: 28893575 NR Description: RIKEN cDNA A730011L01 gene [Mus musculus]
  misc_feature (69)..(197): Homolog of NCBI NO: 40555767 NR Description: Unknown (protein for MGC:74455) [Homo sapiens]
  misc_feature (1)..(26): Homolog of NCBI NO: 40555767 NR Description: Unknown (protein for MGC:74455) [Homo sapiens]

SEQ ID NO: 74766 - DNA, 1290 bp, Arabidopsis thaliana
  misc_feature (1)..(1290): Ceres Seq. ID no. 5679508
  misc_feature: MA Experiment ID: 108463 Result: Up-regulated in Transcription
  misc_feature: MA Experiment 108463 PARAMETER Experiment Name: At_Germinating_Seeds_cDNA_P Parameter: Age (day) Value: 3 vs. 0
  misc_feature: MA Experiment 108463 PARAMETER Experiment Name: At_Germinating_Seeds_cDNA_P Parameter: Tissue Value: Germinating Seeds
  misc_feature: MA Experiment ID: 20000184 Result: Down-regulated in Transcription
  misc_feature: MA Experiment 20000184 PARAMETER Experiment Name: At_Shoots__P Parameter: Age (day) Value: 7
  misc_feature: MA Experiment 20000184 PARAMETER Experiment Name: At_Shoots__P Parameter: Tissue Value: Shoots vs. Whole Plant
  misc_feature: MA Experiment ID: 20000224 Result: Up-regulated in Transcription
  misc_feature: MA Experiment ID: 20000234 Result: Down-regulated in Transcription
  misc_feature: MA Experiment 20000234 PARAMETER Experiment Name: At_Siliques_P Parameter: Age (day) Value: 21
  misc_feature: MA Experiment 20000234 PARAMETER Experiment Name: At_Siliques_P Parameter: Organism Value: A. thaliana
  misc_feature: MA Experiment 20000234 PARAMETER Experiment Name: At_Siliques_P Parameter: Plant Line Value: WS
  misc_feature: MA Experiment 20000234 PARAMETER Experiment Name: At_Siliques_P Parameter: Tissue Value: Less Than 5mm Siliques vs. Whole Plant
  misc_feature: MA Experiment ID: 20000264 Result: Down-regulated in Transcription
  misc_feature: MA Experiment 20000264 PARAMETER Experiment Name: At_Open_Flower_P Parameter: Age (day) Value: 21
  misc_feature: MA Experiment 20000264 PARAMETER Experiment Name: At_Open_Flower_P Parameter: Plant Line Value: WS
  misc_feature: MA Experiment 20000264 PARAMETER Experiment Name: At_Open_Flower_P Parameter: Tissue Value: Open Flower vs. Whole Plant
  misc_feature: MA Experiment ID: 20000265 Result: Down-regulated in Transcription
  misc_feature: MA Experiment 20000265 PARAMETER Experiment Name: At_Open_Flower_P Parameter: Age (day) Value: 21
  misc_feature: MA Experiment 20000265 PARAMETER Experiment Name: At_Open_Flower_P Parameter: Plant Line Value: WS
  misc_feature: MA Experiment 20000265 PARAMETER Experiment Name: At_Open_Flower_P Parameter: Tissue Value: Closed Flower vs. Whole Plant
  misc_feature: MA Experiment ID: 20000286 Result: Down-regulated in Transcription
  misc_feature: MA Experiment 20000286 PARAMETER Experiment Name: At_Open_Flower_P Parameter: Age (day) Value: 21
  misc_feature: MA Experiment 20000286 PARAMETER Experiment Name: At_Open_Flower_P Parameter: Plant Line Value: WS
  misc_feature: MA Experiment 20000286 PARAMETER Experiment Name: At_Open_Flower_P Parameter: Tissue Value: Half Open vs. Whole Plant
  misc_feature: MA Experiment ID: 20001247 Result: Up-regulated in Transcription
  misc_feature: MA Experiment 20001247 PARAMETER Experiment Name: At_Far-red-induction_P Parameter: Age (day) Value: 7
  misc_feature: MA Experiment 20001247 PARAMETER Experiment Name: At_Far-red-induction_P Parameter: Light Value: Far-red vs. White
  misc_feature: MA Experiment 20001247 PARAMETER Experiment Name: At_Far-red-induction_P Parameter: Organism Value: A. thaliana
  misc_feature: MA Experiment 20001247 PARAMETER Experiment Name: At_Far-red-induction_P Parameter: Plant Line Value: Columbia
  misc_feature: MA Experiment 20001247 PARAMETER Experiment Name: At_Far-red-induction_P Parameter: Timepoint (hr) Value: 1
  misc_feature: MA Experiment 20001247 PARAMETER Experiment Name: At_Far-red-induction_P Parameter: Tissue Value: Whole Plant
  misc_feature: MA Experiment ID: 20001451 Result: Up-regulated in Transcription
  misc_feature: MA Experiment 20001451 PARAMETER Experiment Name: At_Far-red-induction_P Parameter: Age (day) Value: 7
  misc_feature: MA Experiment 20001451 PARAMETER Experiment Name: At_Far-red-induction_P Parameter: Light Value: Far-red vs. White
  misc_feature: MA Experiment 20001451 PARAMETER Experiment Name: At_Far-red-induction_P Parameter: Organism Value: A. thaliana
  misc_feature: MA Experiment 20001451 PARAMETER Experiment Name: At_Far-red-induction_P Parameter: Plant Line Value: Columbia
  misc_feature: MA Experiment 20001451 PARAMETER Experiment Name: At_Far-red-induction_P Parameter: Timepoint (hr) Value: 24
  misc_feature: MA Experiment 20001451 PARAMETER Experiment Name: At_Far-red-induction_P Parameter: Tissue Value: Whole Plant
agaaaaaaggatatcgacaatttcgcttttgctttcaaaatctcattctatcactttgtgccttttttagccatcgcgaaaaacctctgaatcgcatcccttgattttctgggtttgtgactttgtgtagtggaaattaggcttgttgtttgatttcgctacgagaaaatggacaagtacgagcttgttaaagacatcggtgctgggaattttggagtggcgaggctcatgagagtcaaaaactccaaggaactcgttgctatgaagtacatcgagcgtggacctaagattgatgagaacgtggcgagagagattattaaccacagatcacttcgtcatcccaatattatccggtttaaggaggtggttttgacaccaacgcacatcgccattgctatggaatatgctgctggcggtgagctatttgagcgtatatgtagcgctggaagattcagtgaggatgaggcaagatactttttccagcagcttatctcaggagtcagctattgtcatgctatgcaaatatgccacagagatctgaagcttgaaaataccctcttagatggaagtcctgctccacgcctgaagatctgtgattttggttattccaagtcctcactgttgcactctatgcccaaatcaactgttggaactccagcatatattgcacctgaggttctttctcgcggagagtatgatggcaagatggctgatgtatggtcttgtggtgtgactctttatgtcatgctggtgggagcatacccatttgaagaccaagaggatcccaaaaacttcaaaaaaacaatacaaagaataatggctgtcaagtacaagatcccggactatgtccatatctcacaagattgcaaacatctcctctcccgtatatttgtcaccaactcgaataagaggattacgataggtgacatcaagaaacatccatggttcctaaagaacctgccaagggaacttacagaaatagctcaagctgcatacttcaggaaagagaacccgacattctcactccaaagcgtcgaagagataatgaagattgtggaagaggcaaaaactccagctcgtgtttctcggtcgattggagcatttgggtggggaggaggagaagatgccgagggcaaggaggaagatgcagaggaagaagttgaggaagtagaagaagaagaagacgaagaagatgagtatgataagacggtgaagcaagtgcatgctagcatgggagaagtccgagtcagttaaaaaaaaagattgattttcttttcacgaaagtattct

SEQ ID NO: 74767 - protein, 361 aa, Arabidopsis thaliana; identical to SEQ ID NO: 36961
  peptide (1)..(361): Ceres Seq. ID no. 5679509
  misc_feature (4)..(260): Pfam Name: Protein kinase domain Pfam Description: Protein kinase domain
  misc_feature (1)..(361): Homolog of NCBI NO: 15219836 NR Description: putative serine/threonine-protein kinase; protein At1g60940.1, supported by cDNA: 95559., supported by cDNA: [Arabidopsis thaliana] >gi|25287615|pir||H96634 hypothetical
  misc_feature (1)..(361): Homolog of NCBI NO: 21618062 NR Description: putative serine/threonine-protein kinase
  misc_feature (1)..(361): Homolog of NCBI NO: 15220251 NR Description: Ser/Thr kinase; protein id: At1g10940.1, by cDNA: 100245., supported by cDNA: gi_20260461, supported by gi_401854 [Arabidopsis thaliana] >gi|1168529|sp|P43291|ASK1_ARATH
  misc_feature (1)..(361): Homolog of NCBI NO: 1362026 NR Description: probable serine/threonine-specific protein kinase
  misc_feature (1)..(358): Homolog of NCBI NO: 2129803 NR Description: probable serine/threonine-specific protein kinase
  misc_feature (1)..(361): Homolog of NCBI NO: 19568098 NR Description: osmotic stress-activated protein kinase

SEQ ID NO: 74768 - protein, 341 aa, Arabidopsis thaliana; identical to SEQ ID NO: 36962
  peptide (1)..(341): Ceres Seq. ID no. 5679510
  misc_feature (1)..(240): Pfam Name: Protein kinase domain Pfam Description: Protein kinase domain
  misc_feature (1)..(341): Homolog of NCBI NO: 15219836 NR Description: putative serine/threonine-protein kinase; protein At1g60940.1, supported by cDNA: 95559., supported by cDNA: [Arabidopsis thaliana] >gi|25287615|pir||H96634 hypothetical
  misc_feature (1)..(341): Homolog of NCBI NO: 21618062 NR Description: putative serine/threonine-protein kinase
  misc_feature (1)..(341): Homolog of NCBI NO: 15220251 NR Description: Ser/Thr kinase; protein id: At1g10940.1, by cDNA: 100245., supported by cDNA: gi_20260461, supported by gi_401854 [Arabidopsis thaliana] >gi|1168529|sp|P43291|ASK1_ARATH
  misc_feature (1)..(341): Homolog of NCBI NO: 1362026 NR Description: probable serine/threonine-specific protein kinase
  misc_feature (1)..(338): Homolog of NCBI NO: 2129803 NR Description: probable serine/threonine-specific protein kinase
  misc_feature (1)..(341): Homolog of NCBI NO: 19568098 NR Description: osmotic stress-activated protein kinase

SEQ ID NO: 74769 - protein, 330 aa, Arabidopsis thaliana; identical to SEQ ID NO: 36963
  peptide (1)..(330): Ceres Seq. ID no. 5679511
  misc_feature (1)..(229): Pfam Name: Protein kinase domain Pfam Description: Protein kinase domain
  misc_feature (1)..(330): Homolog of NCBI NO: 15219836 NR Description: putative serine/threonine-protein kinase; protein At1g60940.1, supported by cDNA: 95559., supported by cDNA: [Arabidopsis thaliana] >gi|25287615|pir||H96634 hypothetical
  misc_feature (1)..(330): Homolog of NCBI NO: 21618062 NR Description: putative serine/threonine-protein kinase
  misc_feature (1)..(330): Homolog of NCBI NO: 15220251 NR Description: Ser/Thr kinase; protein id: At1g10940.1, by cDNA: 100245., supported by cDNA: gi_20260461, supported by gi_401854 [Arabidopsis thaliana] >gi|1168529|sp|P43291|ASK1_ARATH
  misc_feature (1)..(330): Homolog of NCBI NO: 1362026 NR Description: probable serine/threonine-specific protein kinase
  misc_feature (1)..(327): Homolog of NCBI NO: 2129803 NR Description: probable serine/threonine-specific protein kinase
  misc_feature (1)..(330): Homolog of NCBI NO: 19568098 NR Description: osmotic stress-activated protein kinase

SEQ ID NO: 74770 - DNA, 1043 bp, Arabidopsis thaliana
  misc_feature (1)..(1043): Ceres Seq. ID no. 5679520
  misc_feature: MA Experiment ID: 108434 Result: Down-regulated in Transcription
  misc_feature: MA Experiment 108434 PARAMETER Experiment Name: At_Root_Tips_cDNA_P Parameter: Tissue Value: Root Tips
  misc_feature: MA Experiment ID: 108595 Result: Down-regulated in Transcription
  misc_feature: MA Experiment 108595 PARAMETER Experiment Name: At_Ler-pi_Ovule_cDNA_P Parameter: Plant Line Value: null
gaaatttcctctcttcttcttttgcttgagctttaggttttgagagcaaagaaaaacgaagacgcgtcaaagagcttttgtggagaggttctgcttgcttgctacaatgggttacgcccagctagttattggtccagcaggcagtggaaagtcaacttattgctcgtctttgtatgaacattgtgaaactatcggtcgaacaatgcatgttgttaaccttgatcctgctgcggagatcttcaactatcctgtggctatggatatcagagaacttatttctttggaagatgtgatggaggatctaaagcttggtcctaatggtgcccttatgtattgcatggagtatcttgaggatagcttacatgattgggtggatgaagaattggagaactacagggatgacgattaccttatctttgattgtccaggccagatagagctgtttacacatgttcctgtgctcaagaactttgtggagcatttgaagcagaagaacttcaacgtctgtgttgtttatctgcttgattcacagttcatcacagatgtaaccaagtttatcagtggttgcatgtcatctctcgctgcaatgatccagcttgaattaccacatgtcaacatcctctcaaaaatggacctcttgcaggacaaaagcaacattgatgattacttgaatccggagcctcgcacattgctagcagagttaaacaaaaggatgggtcctcaatatgcaaaactaaacaaagccttgattgagatggtgggagagtatgggatggtgaatttcatacccattaacttgaggaaagaaaagagcattcaatatgttctgtcgcaaatcgacgtctgtattcagtttggagaagatgctgatgtgaacatcaaagatgatgacgattttagtgacgatggtcctgacctataattgttatattcggtttctacaacttttgttaaaagtctaaacaagcttggtctcattgttcttgtcagttaccaatggcgtttgtgagaacttttgttgaatatcaaaagccttcaatgtg

SEQ ID NO: 74771 - protein, 271 aa, Arabidopsis thaliana; identical to SEQ ID NO: 28955
  peptide (1)..(271): Ceres Seq. ID no. 5679521
  misc_feature (7)..(250): Pfam Name: Conserved hypothetical ATP binding protein Pfam Description: Conserved hypothetical ATP binding protein
  misc_feature (1)..(271): Homolog of NCBI NO: 18413871 NR Description: putative protein; protein id: At4g12790.1, by cDNA: 12532., supported by cDNA: gi_17065185 [Arabidopsis >gi|17065186|gb|AAL32747.1| putative protein [Arabidopsis
  misc_feature (1)..(266): Homolog of NCBI NO: 18071342 NR Description: putative ATP(GTP)-binding protein [Oryza sativa
  misc_feature (59)..(271): Homolog of NCBI NO: 7487264 NR Description: hypothetical protein T20K18.140 - Arabidopsis >gi|4586255|emb|CAB40996.1| putative protein [Arabidopsis >gi|7267980|emb|CAB78321.1| putative protein [Arabidopsis
  misc_feature (3)..(256): Homolog of NCBI NO: 37606123 NR Description: SI:zK83D9.3 (novel protein similar to human x
  misc_feature (1)..(261): Homolog of NCBI NO: 32399003 NR Description: conserved hypothetical ATP binding protein
  misc_feature (3)..(255): Homolog of NCBI NO: 34872358 NR Description: similar to RIKEN cDNA A930018B01 [Rattus
  misc_feature (1)..(256): Homolog of NCBI NO: 17556506 NR Description: ATP-binding protein like (31.0 kD)
  misc_feature (3)..(255): Homolog of NCBI NO: 21312642 NR Description: RIKEN cDNA A930018B01 [Mus musculus] unnamed protein product [Mus musculus] RIKEN cDNA A930018B01 gene [Mus musculus]
  misc_feature (6)..(261): Homolog of NCBI NO: 6323272 NR Description: Protein required for cell viability; Ylr243wp
  misc_feature (3)..(271): Homolog of NCBI NO: 21410245 NR Description: protein x 0004 [Homo sapiens]

SEQ ID NO: 74772 - protein, 239 aa, Arabidopsis thaliana; identical to SEQ ID NO: 28956
  peptide (1)..(239): Ceres Seq. ID no. 5679522
  misc_feature (1)..(218): Pfam Name: Conserved hypothetical ATP binding protein Pfam Description: Conserved hypothetical ATP binding protein
  misc_feature (1)..(239): Homolog of NCBI NO: 18413871 NR Description: putative protein; protein id: At4g12790.1, by cDNA: 12532., supported by cDNA: gi_17065185 [Arabidopsis >gi|17065186|gb|AAL32747.1| putative protein [Arabidopsis
  misc_feature (1)..(234): Homolog of NCBI NO: 18071342 NR Description: putative ATP(GTP)-binding protein [Oryza sativa
  misc_feature (27)..(239): Homolog of NCBI NO: 7487264 NR Description: hypothetical protein T20K18.140 - Arabidopsis >gi|4586255|emb|CAB40996.1| putative protein [Arabidopsis >gi|7267980|emb|CAB78321.1| putative protein [Arabidopsis
  misc_feature (1)..(224): Homolog of NCBI NO: 37606123 NR Description: SI:zK83D9.3 (novel protein similar to human x
  misc_feature (1)..(229): Homolog of NCBI NO: 32399003 NR Description: conserved hypothetical ATP binding protein
  misc_feature (1)..(223): Homolog of NCBI NO: 34872358 NR Description: similar to RIKEN cDNA A930018B01 [Rattus
  misc_feature (1)..(224): Homolog of NCBI NO: 17556506 NR Description: ATP-binding protein like (31.0 kD)
  misc_feature (1)..(223): Homolog of NCBI NO: 21312642 NR Description: RIKEN cDNA A930018B01 [Mus musculus] unnamed protein product [Mus musculus] RIKEN cDNA A930018B01 gene [Mus musculus]
  misc_feature (1)..(229): Homolog of NCBI NO: 6323272 NR Description: Protein required for cell viability; Ylr243wp
  misc_feature (1)..(239): Homolog of NCBI NO: 21410245 NR Description: protein x 0004 [Homo sapiens]

SEQ ID NO: 74773 - protein, 221 aa, Arabidopsis thaliana; identical to SEQ ID NO: 28957
  peptide (1)..(221): Ceres Seq. ID no. 5679523
  misc_feature (1)..(200): Pfam Name: Conserved hypothetical ATP binding protein Pfam Description: Conserved hypothetical ATP binding protein
  misc_feature (1)..(221): Homolog of NCBI NO: 18413871 NR Description: putative protein; protein id: At4g12790.1, by cDNA: 12532., supported by cDNA: gi_17065185 [Arabidopsis >gi|17065186|gb|AAL32747.1| putative protein [Arabidopsis
  misc_feature (1)..(216): Homolog of NCBI NO: 18071342 NR Description: putative ATP(GTP)-binding protein [Oryza sativa
  misc_feature (9)..(221): Homolog of NCBI NO: 7487264 NR Description: hypothetical protein T20K18.140 - Arabidopsis >gi|4586255|emb|CAB40996.1| putative protein [Arabidopsis >gi|7267980|emb|CAB78321.1| putative protein [Arabidopsis
  misc_feature (1)..(206): Homolog of NCBI NO: 37606123 NR Description: SI:zK83D9.3 (novel protein similar to human x
  misc_feature (1)..(211): Homolog of NCBI NO: 32399003 NR Description: conserved hypothetical ATP binding protein
  misc_feature (1)..(205): Homolog of NCBI NO: 34872358 NR Description: similar to RIKEN cDNA A930018B01 [Rattus
  misc_feature (1)..(206): Homolog of NCBI NO: 17556506 NR Description: ATP-binding protein like (31.0 kD)
  misc_feature (1)..(205): Homolog of NCBI NO: 21312642 NR Description: RIKEN cDNA A930018B01 [Mus musculus] unnamed protein product [Mus musculus] RIKEN cDNA A930018B01 gene [Mus musculus]
  misc_feature (1)..(211): Homolog of NCBI NO: 6323272 NR Description: Protein required for cell viability; Ylr243wp
  misc_feature (1)..(221): Homolog of NCBI NO: 21410245 NR Description: protein x 0004 [Homo sapiens]

SEQ ID NO: 74774 - DNA, 1205 bp, Arabidopsis thaliana
  misc_feature (1)..(1205): Ceres Seq. ID no. 5679589
  misc_feature: MA Experiment ID: 108577 Result: Down-regulated in Transcription
  misc_feature: MA Experiment 108577 PARAMETER Experiment Name: At_42deg_Heat_cDNA_P Parameter: Temperature (deg C) Value: 42 vs. 22
  misc_feature: MA Experiment 108577 PARAMETER Experiment Name: At_42deg_Heat_cDNA_P Parameter: Timepoint (hr) Value: 6
  misc_feature: MA Experiment 108577 PARAMETER Experiment Name: At_42deg_Heat_cDNA_P Parameter: Tissue Value: Aerial
  misc_feature: MA Experiment ID: 20000069 Result: Up-regulated in Transcription
  misc_feature: MA Experiment 20000069 PARAMETER Experiment Name: At_100uM_ABA_Mutants_cDNA_P Parameter: Plant Line Value: CS23
  misc_feature: MA Experiment 20000069 PARAMETER Experiment Name: At_100uM_ABA_Mutants_cDNA_P Parameter: Timepoint (hr) Value: 6
  misc_feature: MA Experiment 20000069 PARAMETER Experiment Name: At_100uM_ABA_Mutants_cDNA_P Parameter: Tissue Value: Aerial
  misc_feature: MA Experiment 20000069 PARAMETER Experiment Name: At_100uM_ABA_Mutants_cDNA_P Parameter: Treatment Value: 100uM ABA vs. No Treatment
  misc_feature: MA Experiment ID: 20000070 Result: Up-regulated in Transcription
  misc_feature: MA Experiment 20000070 PARAMETER Experiment Name: At_100uM_ABA_Mutants_cDNA_P Parameter: Plant Line Value: CS24
  misc_feature: MA Experiment 20000070 PARAMETER Experiment Name: At_100uM_ABA_Mutants_cDNA_P Parameter: Timepoint (hr) Value: 6
  misc_feature: MA Experiment 20000070 PARAMETER Experiment Name: At_100uM_ABA_Mutants_cDNA_P Parameter: Tissue Value: Aerial
  misc_feature: MA Experiment 20000070 PARAMETER Experiment Name: At_100uM_ABA_Mutants_cDNA_P Parameter: Treatment Value: 100uM ABA vs. No Treatment
  misc_feature: MA Experiment ID: 20000071 Result: Up-regulated in Transcription
  misc_feature: MA Experiment 20000071 PARAMETER Experiment Name: At_100uM_ABA_Mutants_cDNA_P Parameter: Plant Line Value: CS8104
  misc_feature: MA Experiment 20000071 PARAMETER Experiment Name: At_100uM_ABA_Mutants_cDNA_P Parameter: Timepoint (hr) Value: 6
  misc_feature: MA Experiment 20000071 PARAMETER Experiment Name: At_100uM_ABA_Mutants_cDNA_P Parameter: Tissue Value: Aerial
  misc_feature: MA Experiment 20000071 PARAMETER Experiment Name: At_100uM_ABA_Mutants_cDNA_P Parameter: Treatment Value: 100uM ABA vs. No Treatment
  misc_feature: MA Experiment ID: 20000089 Result: Up-regulated in Transcription
  misc_feature: MA Experiment ID: 20000111 Result: Down-regulated in Transcription
  misc_feature: MA Experiment 20000111 PARAMETER Experiment Name: At_42deg_Heat_cDNA_P Parameter: Temperature (deg C) Value: 42 vs. 22
  misc_feature: MA Experiment 20000111 PARAMETER Experiment Name: At_42deg_Heat_cDNA_P Parameter: Timepoint (hr) Value: 6
  misc_feature: MA Experiment 20000111 PARAMETER Experiment Name: At_42deg_Heat_cDNA_P Parameter: Tissue Value: Aerial
  misc_feature: MA Experiment ID: 20000113 Result: Down-regulated in Transcription
  misc_feature: MA Experiment 20000113 PARAMETER Experiment Name: At_42deg_Heat_cDNA_P Parameter: Temperature (deg C) Value: 42 vs. 22
  misc_feature: MA Experiment 20000113 PARAMETER Experiment Name: At_42deg_Heat_cDNA_P Parameter: Timepoint (hr) Value: 8
  misc_feature: MA Experiment 20000113 PARAMETER Experiment Name: At_42deg_Heat_cDNA_P Parameter: Tissue Value: Aerial
  misc_feature: MA Experiment ID: 20000117 Result: Up-regulated in Transcription
  misc_feature: MA Experiment 20000117 PARAMETER Experiment Name: At_100uM_ABA_Mutants_cDNA_P Parameter: Plant Line Value: Columbia
  misc_feature: MA Experiment 20000117 PARAMETER Experiment Name: At_100uM_ABA_Mutants_cDNA_P Parameter: Timepoint (hr) Value: 6
  misc_feature: MA Experiment 20000117 PARAMETER Experiment Name: At_100uM_ABA_Mutants_cDNA_P Parameter: Tissue Value: Aerial
  misc_feature: MA Experiment 20000117 PARAMETER Experiment Name: At_100uM_ABA_Mutants_cDNA_P Parameter: Treatment Value: 100uM ABA vs. No Treatment
  misc_feature: MA Experiment ID: 20000182 Result: Up-regulated in Transcription
  misc_feature: MA Experiment 20000182 PARAMETER Experiment Name: At_2mM_SA_P Parameter: Age (day) Value: 14
  misc_feature: MA Experiment 20000182 PARAMETER Experiment Name: At_2mM_SA_P Parameter: Organism Value: A. thaliana
  misc_feature: MA Experiment 20000182 PARAMETER Experiment Name: At_2mM_SA_P Parameter: Plant Line Value: WS
  misc_feature: MA Experiment 20000182 PARAMETER Experiment Name: At_2mM_SA_P Parameter: Timepoint (hr) Value: 6
  misc_feature: MA Experiment 20000182 PARAMETER Experiment Name: At_2mM_SA_P Parameter: Tissue Value: Aerial
  misc_feature: MA Experiment 20000182 PARAMETER Experiment Name: At_2mM_SA_P Parameter: Treatment Value: 2mM SA vs. No Treatment
  misc_feature: MA Experiment ID: 20000437 Result: Up-regulated in Transcription
  misc_feature: MA Experiment 20000437 PARAMETER Experiment Name: At_Drought_P Parameter: Age (day) Value: 8
  misc_feature: MA Experiment 20000437 PARAMETER Experiment Name: At_Drought_P Parameter: Organism Value: A. thaliana
  misc_feature: MA Experiment 20000437 PARAMETER Experiment Name: At_Drought_P Parameter: Plant Line Value: WS
  misc_feature: MA Experiment 20000437 PARAMETER Experiment Name: At_Drought_P Parameter: Timepoint (hr) Value: 24
  misc_feature: MA Experiment 20000437 PARAMETER Experiment Name: At_Drought_P Parameter: Tissue Value: Whole Plant
  misc_feature: MA Experiment 20000437 PARAMETER Experiment Name: At_Drought_P Parameter: Treatment Value: Drought vs. No Drought
  misc_feature: MA Experiment ID: 20000438 Result: Down-regulated in Transcription
  misc_feature: MA Experiment 20000438 PARAMETER Experiment Name: At_Shoots__P Parameter: Age (day) Value: 14
  misc_feature: MA Experiment 20000438 PARAMETER Experiment Name: At_Shoots__P Parameter: Tissue Value: Shoots vs. Whole Plant
  misc_feature: MA Experiment ID: 20000794 Result: Up-regulated in Transcription
  misc_feature: MA Experiment 20000794 PARAMETER Experiment Name: At_Petals_P Parameter: Age (day) Value: 23-25 days
  misc_feature: MA Experiment 20000794 PARAMETER Experiment Name: At_Petals_P Parameter: Plant Line Value: WS
  misc_feature: MA Experiment 20000794 PARAMETER Experiment Name: At_Petals_P Parameter: Tissue Value: Petals vs. Whole plant
  misc_feature: MA Experiment ID: 20001558 Result: Down-regulated in Transcription
  misc_feature: MA Experiment 20001558 PARAMETER Experiment Name: At_Drought_Soil_Dry_P Parameter: Age (day) Value: 27
  misc_feature: MA Experiment 20001558 PARAMETER Experiment Name: At_Drought_Soil_Dry_P Parameter: Organism Value: A. thaliana
  misc_feature: MA Experiment 20001558 PARAMETER Experiment Name: At_Drought_Soil_Dry_P Parameter: Plant Line Value: WS
  misc_feature: MA Experiment 20001558 PARAMETER Experiment Name: At_Drought_Soil_Dry_P Parameter: Post Timepoint (hr) Value: 6
  misc_feature: MA Experiment 20001558 PARAMETER Experiment Name: At_Drought_Soil_Dry_P Parameter: Post-Treatment Value: Re-Water vs. No Drought
  misc_feature: MA Experiment 20001558 PARAMETER Experiment Name: At_Drought_Soil_Dry_P Parameter: Timepoint (day) Value: 13
  misc_feature: MA Experiment 20001558 PARAMETER Experiment Name: At_Drought_Soil_Dry_P Parameter: Treatment Value: Drought vs. No Drought
  misc_feature: MA Experiment ID: 20001757 Result: Down-regulated in Transcription
  misc_feature: MA Experiment 20001757 PARAMETER Experiment Name: At_50mM_NH4NO3_L-to-H_P Parameter: Timepoint (hr) Value: 6
  misc_feature: MA Experiment 20001757 PARAMETER Experiment Name: At_50mM_NH4NO3_L-to-H_P Parameter: Tissue Value: Leaf
  misc_feature: MA Experiment 20001757 PARAMETER Experiment Name: At_50mM_NH4NO3_L-to-H_P Parameter: Treatment Value: 50mM NH4NO3 vs 100mM Mannitol
  misc_feature: MA Experiment ID: 20001905 Result: Up-regulated in Transcription
  misc_feature: MA Experiment 20001905 PARAMETER Experiment Name: At_Drought_Reproduction_P Parameter: Age (day) Value: 40
  misc_feature: MA Experiment 20001905 PARAMETER Experiment Name: At_Drought_Reproduction_P Parameter: Organism Value: A. thaliana
  misc_feature: MA Experiment 20001905 PARAMETER Experiment Name: At_Drought_Reproduction_P Parameter: Plant Line Value: WS
  misc_feature: MA Experiment 20001905 PARAMETER Experiment Name: At_Drought_Reproduction_P Parameter: Timepoint (day) Value: 10
  misc_feature: MA Experiment 20001905 PARAMETER Experiment Name: At_Drought_Reproduction_P Parameter: Tissue Value: Rosettes
  misc_feature: MA Experiment 20001905 PARAMETER Experiment Name: At_Drought_Reproduction_P Parameter: Treatment Value: Drought vs. No Drought
tatgaaattgtagataaatggatcaaatcgttaacgtggatgagtttcaagagctggccaaacaggccctccctaagatgtactatgatttctacaatggaggagcagaggatcaacacactctcaatgaaaatgtccaagctttccgtagaatcatgtttaggcctagggttcttgttgatgtgagcaacatagatatgtctacaagtatgttgggttacccaatctcagctcccatcatgattgctccaacagcaatgcataagttggctcatcctaaaggagaaatcgccacagcgaaagctgcagctgcgtgtaacactatcatgatagtatcattcatgtctacttgcactattgaggaggttgcttccagttgtaacgctgttcggtttcttcaaatatatgtgtacaagagacgtgatgtaacagctcagattgtgaaaagagctgaaaaagctggattcaaggctatagttctaactgttgatgttcccagacttggtagaagggaagcagatataaagaacaaaatgatatccccacagctgaagaattttgaaggcttagtttcaaccgaagtccgacctaatgaaggttcaggggttgaagcctttgcctctagtgcatttgatgcttcgttaagctggaaggatatcgaatggttaagatctattacaaagttgccaattctggtcaaagggttactcacacgtgaagacgctcttaaggctgttgaagccggtgtagatggaatagtggtatccaaccacggggctcgccagctcgactattccccggctacgataactgttttagaagaggttgttcatgctgtgaaaggtaggattccggttttgcttgatggaggagtaagacgaggaacagatgttttcaaagcgctggcgctcggagcacaagctgttcttatagggaggcctatagtctatgggcttgcagctaagggtgaagatggagtgaaaaaagtgattgatatgctgaaaaatgagtttgagattactatggccctttctggctgtccaaccattgatgacgtaaccagaaaccatgttaggacagagaatgagagaattaaatctatgctctgatcctaaaaccaacagatctagtctcagagacttaatcagacagttggacaacagtatgaaatactgtcaatgcacataaataaaaagctctatttc

SEQ ID NO: 74775 - protein, 363 aa, Arabidopsis thaliana; identical to SEQ ID NO: 41959
  peptide (1)..(363): Ceres Seq. ID no. 5679590
  misc_feature (14)..(354): Pfam Name: FMN-dependent dehydrogenase Pfam Description: FMN-dependent dehydrogenase
  misc_feature (1)..(363): Homolog of NCBI NO: 15231789 NR Description: glycolate oxidase, putative; protein id: supported by cDNA: 125291. [Arabidopsis thaliana] glycolate oxidase [Arabidopsis thaliana]
  misc_feature (1)..(363): Homolog of NCBI NO: 21537253 NR Description: glycolate oxidase, putative [Arabidopsis thaliana]
  misc_feature (1)..(363): Homolog of NCBI NO: 15231792 NR Description: glycolate oxidase, putative; protein id:
  misc_feature (1)..(363): Homolog of NCBI NO: 9294640 NR Description: glycolate oxidase [Arabidopsis thaliana]
  misc_feature (1)..(363): Homolog of NCBI NO: 21618144 NR Description: glycolate oxidase, putative [Arabidopsis thaliana]
  misc_feature (5)..(363): Homolog of NCBI NO: 33146942 NR Description: putative (S)-2-hydroxy-acid oxidase [Oryza sativa
  misc_feature (3)..(355): Homolog of NCBI NO: 15231850 NR Description: glycolate oxidase, putative; protein id: supported by cDNA: gi_15450740, supported by cDNA: gi_16226422, by cDNA: gi_16226771, supported by cDNA: gi_16604393, supported
  misc_feature (3)..(355): Homolog of NCBI NO: 999542 NR Description: Chain A, Glycolate Oxidase (E.C.1.1.3.15) Mutant Tyr 24 Replaced By Phe (Y24f) >gi|999543|pdb|1GYL|B Chain B,
  misc_feature (3)..(355): Homolog of NCBI NO: 16226772 NR Description: AT3g14420/MOA2_2 [Arabidopsis thaliana]
  misc_feature (1)..(362): Homolog of NCBI NO: 34395056 NR Description: putative glycolate oxidase [Oryza sativa

SEQ ID NO: 74776 - protein, 343 aa, Arabidopsis thaliana; identical to SEQ ID NO: 41960
  peptide (1)..(343): Ceres Seq. ID no. 5679591
  misc_feature (1)..(334): Pfam Name: FMN-dependent dehydrogenase Pfam Description: FMN-dependent dehydrogenase
  misc_feature (1)..(343): Homolog of NCBI NO: 15231789 NR Description: glycolate oxidase, putative; protein id: supported by cDNA: 125291. [Arabidopsis thaliana] glycolate oxidase [Arabidopsis thaliana]
  misc_feature (1)..(343): Homolog of NCBI NO: 21537253 NR Description: glycolate oxidase, putative [Arabidopsis thaliana]
  misc_feature (1)..(343): Homolog of NCBI NO: 15231792 NR Description: glycolate oxidase, putative; protein id:
  misc_feature (1)..(343): Homolog of NCBI NO: 9294640 NR Description: glycolate oxidase [Arabidopsis thaliana]
  misc_feature (1)..(343): Homolog of NCBI NO: 21618144 NR Description: glycolate oxidase, putative [Arabidopsis thaliana]
  misc_feature (1)..(343): Homolog of NCBI NO: 33146942 NR Description: putative (S)-2-hydroxy-acid oxidase [Oryza sativa
  misc_feature (1)..(335): Homolog of NCBI NO: 15231850 NR Description: glycolate oxidase, putative; protein id: supported by cDNA: gi_15450740, supported by cDNA: gi_16226422, by cDNA: gi_16226771, supported by cDNA: gi_16604393, supported
  misc_feature (1)..(335): Homolog of NCBI NO: 999542 NR Description: Chain A, Glycolate Oxidase (E.C.1.1.3.15) Mutant Tyr 24 Replaced By Phe (Y24f) >gi|999543|pdb|1GYL|B Chain B,
  misc_feature (1)..(335): Homolog of NCBI NO: 16226772 NR Description: AT3g14420/MOA2_2 [Arabidopsis thaliana]
  misc_feature (1)..(342): Homolog of NCBI NO: 34395056 NR Description: putative glycolate oxidase [Oryza sativa

SEQ ID NO: 74777 - protein, 317 aa, Arabidopsis thaliana; identical to SEQ ID NO: 41961
  peptide (1)..(317): Ceres Seq. ID no. 5679592
  misc_feature (1)..(308): Pfam Name: FMN-dependent dehydrogenase Pfam Description: FMN-dependent dehydrogenase
  misc_feature (1)..(317): Homolog of NCBI NO: 15231789 NR Description: glycolate oxidase, putative; protein id: supported by cDNA: 125291. [Arabidopsis thaliana] glycolate oxidase [Arabidopsis thaliana]
  misc_feature (1)..(317): Homolog of NCBI NO: 21537253 NR Description: glycolate oxidase, putative [Arabidopsis thaliana]
  misc_feature (1)..(317): Homolog of NCBI NO: 15231792 NR Description: glycolate oxidase, putative; protein id:
  misc_feature (1)..(317): Homolog of NCBI NO: 9294640 NR Description: glycolate oxidase [Arabidopsis thaliana]
  misc_feature (1)..(317): Homolog of NCBI NO: 21618144 NR Description: glycolate oxidase, putative [Arabidopsis thaliana]
  misc_feature (1)..(317): Homolog of NCBI NO: 33146942 NR Description: putative (S)-2-hydroxy-acid oxidase [Oryza sativa
  misc_feature (1)..(309): Homolog of NCBI NO: 15231850 NR Description: glycolate oxidase, putative; protein id: supported by cDNA: gi_15450740, supported by cDNA: gi_16226422, by cDNA: gi_16226771, supported by cDNA: gi_16604393, supported
  misc_feature (1)..(309): Homolog of NCBI NO: 999542 NR Description: Chain A, Glycolate Oxidase (E.C.1.1.3.15) Mutant Tyr 24 Replaced By Phe (Y24f) >gi|999543|pdb|1GYL|B Chain B,
  misc_feature (1)..(309): Homolog of NCBI NO: 16226772 NR Description: AT3g14420/MOA2_2 [Arabidopsis thaliana]
  misc_feature (1)..(316): Homolog of NCBI NO: 34395056 NR Description: putative glycolate oxidase [Oryza sativa

SEQ ID NO: 74778 - DNA, 1302 bp, Arabidopsis thaliana
  misc_feature (1)..(1302): Ceres Seq. ID no. 5679604
  misc_feature: MA Experiment ID: 108434 Result: Down-regulated in Transcription
  misc_feature: MA Experiment 108434 PARAMETER Experiment Name: At_Root_Tips_cDNA_P Parameter: Tissue Value: Root Tips
  misc_feature: MA Experiment ID: 108595 Result: Down-regulated in Transcription
  misc_feature: MA Experiment 108595 PARAMETER Experiment Name: At_Ler-pi_Ovule_cDNA_P Parameter: Plant Line Value: null
  misc_feature: MA Experiment ID: 20000794 Result: Up-regulated in Transcription
  misc_feature: MA Experiment 20000794 PARAMETER Experiment Name: At_Petals_P Parameter: Age (day) Value: 23-25 days
  misc_feature: MA Experiment 20000794 PARAMETER Experiment Name: At_Petals_P Parameter: Plant Line Value: WS
  misc_feature: MA Experiment 20000794 PARAMETER Experiment Name: At_Petals_P Parameter: Tissue Value: Petals vs. Whole plant
atatatcgcgtggatttgaagacgaagaggaatcataaaaagcctaacgaagaagacgaagaagaagaggaacaaacaaccatgggtgaagtggttaaggtaatcgtaaatctcttgcttctgattctgatttcgtgaaagctcatcggaaaatttcttgtttcagctatgaaaacatgaatcgccgccgattgttaattaagtggtcttcaatcactgatcactattccaattttgatttttgttttattttaatcatcaaatttgatgttttctagtttcacttgttgtgtatgaaattcaggctttgtcttggaggttgcaatcgaaaatttcactaattgctgaacgttttttgtttctctttcaagcttagcatcataaatttatgttttcttgttgtgtttgtgtatgtgtgtttttgcttaggatggaagagaagaagtgatccaggcatggtatatggatgatagcgaagaggatcagagacttcctcaccacaaggatcctaaggagtttctatctttggacaaacttgcaggtctctttgtgtgtttcaattcagtgttcttctctctgtttctctatttgtttcagatgtaatgtttgtgtgcagagctgggagtacttagctggagacttgatgctgataactatgaaaccgatgaggatttgaaaaagatccgcgaatctcgtggttactcttacatggacttttgtgaggtatgcccggaaaagcttccaaactatgaagtgaaagtgaagagctttttcgaagaacatttgcacactgatgaagagatccgttactgcgttgcaggaagcggttactttgatgtgagggatcgcaatgaagcttggattagagtatgggtaaagaagggaggtatgatagtcttacctgctggaatatatcatcgcttcaccgtagactcagacaactatatcaaggcaatgcggcttttcgttggtgaaccggtctggacaccatacaatcgcccacacgaccacctccctgcaaggaaagagtacatcgataatttcgtgaaggtgaatgaaggtggtgtcatagacgcgtcagcctagaggattctcagtcttatgcatcagatttctataaactaagcatacaataaagagagctttctgtctcatgttggatattatgtcatctacagatccacttgtgaagaaactttgattcgtgtggctttggcattatggttgtgttgtaactgtatttatagtttatactccagaaatcaaactgtgttacattatcaatctctccaaagttttcct

SEQ ID NO: 74779 - protein, 125 aa, Arabidopsis thaliana; identical to SEQ ID NO: 25190
  peptide (1)..(125): Ceres Seq. ID no. 5679605
  misc_feature (1)..(94): Pfam Name: ARD/ARD' family Pfam Description: ARD/ARD' family
  misc_feature (1)..(125): Homolog of NCBI NO: 18414289 NR Description: Expressed protein; protein id: At4g14710.1, by cDNA: 2738., supported by cDNA: gi_18087552 [Arabidopsis >gi|18087553|gb|AAL58908.1|AF462818_1 AT4g14710/dl3395c
  misc_feature (1)..(113): Homolog of NCBI NO: 18414293 NR Description: Expressed protein; protein id: At4g14716.1, by cDNA: 16319. [Arabidopsis thaliana] unknown protein [Arabidopsis thaliana]
  misc_feature (1)..(105): Homolog of NCBI NO: 7485194 NR Description: hypothetical protein - Arabidopsis thaliana hypothetical protein [Arabidopsis thaliana]
  misc_feature (1)..(125): Homolog of NCBI NO: 15225298 NR Description: unknown protein; protein id: At2g26400.1
  misc_feature (1)..(119): Homolog of NCBI NO: 7489559 NR Description: probable submergence induced, nickel-binding
  misc_feature (1)..(119): Homolog of NCBI NO: 14522834 NR Description: iron-deficiency induced gene [Hordeum vulgare]
  misc_feature (1)..(119): Homolog of NCBI NO: 34902616 NR Description: Putative probable submergence induced,
  misc_feature (1)..(118): Homolog of NCBI NO: 37534408 NR Description: putative zinc finger protein ID1 [Oryza sativa
  misc_feature (1)..(118): Homolog of NCBI NO: 7489558 NR Description: probable submergence induced protein 2 - rice
  misc_feature (1)..(109): Homolog of NCBI NO: 10177955 NR Description: gene_id:MQD19.21~pir||T02918~similar to unknown

SEQ ID NO: 74780 - protein, 69 aa, Arabidopsis thaliana
  peptide (1)..(69): Ceres Seq. ID no. 5679606
MIAKRIRDFLTTRILRSFYLWTNLQVSLCVSIQCSSLCFSICFRCNVCVQSWEYLAGDLMLITMKPMRI

SEQ ID NO: 74781 - protein, 65 aa, Arabidopsis thaliana; identical to SEQ ID NO: 25191
  peptide (1)..(65): Ceres Seq. ID no. 5679607
  misc_feature (1)..(65): Homolog of NCBI NO: 18414289 NR Description: Expressed protein; protein id: At4g14710.1, by cDNA: 2738., supported by cDNA: gi_18087552 [Arabidopsis >gi|18087553|gb|AAL58908.1|AF462818_1 AT4g14710/dl3395c
  misc_feature (1)..(53): Homolog of NCBI NO: 18414293 NR Description: Expressed protein; protein id: At4g14716.1, by cDNA: 16319. [Arabidopsis thaliana] unknown protein [Arabidopsis thaliana]
  misc_feature (1)..(45): Homolog of NCBI NO: 7485194 NR Description: hypothetical protein - Arabidopsis thaliana hypothetical protein [Arabidopsis thaliana]
  misc_feature (1)..(65): Homolog of NCBI NO: 15225298 NR Description: unknown protein; protein id: At2g26400.1
  misc_feature (1)..(59): Homolog of NCBI NO: 7489559 NR Description: probable submergence induced, nickel-binding
  misc_feature (1)..(59): Homolog of NCBI NO: 14522834 NR Description: iron-deficiency induced gene [Hordeum vulgare]
  misc_feature (1)..(59): Homolog of NCBI NO: 34902616 NR Description: Putative probable submergence induced,
  misc_feature (1)..(58): Homolog of NCBI NO: 37534408 NR Description: putative zinc finger protein ID1 [Oryza sativa
  misc_feature (1)..(58): Homolog of NCBI NO: 7489558 NR Description: probable submergence induced protein 2 - rice
  misc_feature (1)..(49): Homolog of NCBI NO: 10177955 NR Description: gene_id:MQD19.21~pir||T02918~similar to unknown

SEQ ID NO: 74782 - DNA, 696 bp, Arabidopsis thaliana
  misc_feature (1)..(696): Ceres Seq. ID no. 5679645
  misc_feature: MA Experiment ID: 108462 Result: Up-regulated in Transcription
  misc_feature: MA Experiment 108462 PARAMETER Experiment Name: At_Germinating_Seeds_cDNA_P Parameter: Age (day) Value: 2 vs. 0
  misc_feature: MA Experiment 108462 PARAMETER Experiment Name: At_Germinating_Seeds_cDNA_P Parameter: Tissue Value: Germinating Seeds
  misc_feature: MA Experiment ID: 108463 Result: Up-regulated in Transcription
  misc_feature: MA Experiment 108463 PARAMETER Experiment Name: At_Germinating_Seeds_cDNA_P Parameter: Age (day) Value: 3 vs. 0
  misc_feature: MA Experiment 108463 PARAMETER Experiment Name: At_Germinating_Seeds_cDNA_P Parameter: Tissue Value: Germinating Seeds
  misc_feature: MA Experiment ID: 108464 Result: Up-regulated in Transcription
  misc_feature: MA Experiment 108464 PARAMETER Experiment Name: At_Germinating_Seeds_cDNA_P Parameter: Age (day) Value: 4 vs. 0
  misc_feature: MA Experiment 108464 PARAMETER Experiment Name: At_Germinating_Seeds_cDNA_P Parameter: Tissue Value: Germinating Seeds
  misc_feature: MA Experiment ID: 108561 Result: Down-regulated in Transcription
  misc_feature: MA Experiment 108561 PARAMETER Experiment Name: At_100uM_ABA_cDNA_P Parameter: Timepoint (hr) Value: 6
  misc_feature: MA Experiment 108561 PARAMETER Experiment Name: At_100uM_ABA_cDNA_P Parameter: Tissue Value: Aerial
  misc_feature: MA Experiment 108561 PARAMETER Experiment Name: At_100uM_ABA_cDNA_P Parameter: Treatment Value: 100uM ABA vs. No Treatment
  misc_feature: MA Experiment ID: 20000113 Result: Down-regulated in Transcription
  misc_feature: MA Experiment 20000113 PARAMETER Experiment Name: At_42deg_Heat_cDNA_P Parameter: Temperature (deg C) Value: 42 vs. 22
  misc_feature: MA Experiment 20000113 PARAMETER Experiment Name: At_42deg_Heat_cDNA_P Parameter: Timepoint (hr) Value: 8
  misc_feature: MA Experiment 20000113 PARAMETER Experiment Name: At_42deg_Heat_cDNA_P Parameter: Tissue Value: Aerial
  misc_feature: MA Experiment ID: 20000173 Result: Down-regulated in Transcription
  misc_feature: MA Experiment 20000173 PARAMETER Experiment Name: At_42deg_Heat_P Parameter: Age (day) Value: 14
  misc_feature: MA Experiment 20000173 PARAMETER Experiment Name: At_42deg_Heat_P Parameter: Organism Value: A. thaliana
  misc_feature: MA Experiment 20000173 PARAMETER Experiment Name: At_42deg_Heat_P Parameter: Plant Line Value: WS
  misc_feature: MA Experiment 20000173 PARAMETER Experiment Name: At_42deg_Heat_P Parameter: Temperature (deg C) Value: 42 vs. 22
  misc_feature: MA Experiment 20000173 PARAMETER Experiment Name: At_42deg_Heat_P Parameter: Timepoint (hr) Value: 6
  misc_feature: MA Experiment 20000173 PARAMETER Experiment Name: At_42deg_Heat_P Parameter: Tissue Value: Aerial
  misc_feature: MA Experiment ID: 20000180 Result: Up-regulated in Transcription
  misc_feature: MA Experiment 20000180 PARAMETER Experiment Name: At_Germinating_Seeds_P Parameter: Age (hr) Value: 24 vs. 0
  misc_feature: MA Experiment 20000180 PARAMETER Experiment Name: At_Germinating_Seeds_P Parameter: Tissue Value: Germinating Seeds
  misc_feature: MA Experiment ID: 20000185 Result: Down-regulated in Transcription
  misc_feature: MA Experiment 20000185 PARAMETER Experiment Name: At_Roots__P Parameter: Age (day) Value: 7 vs. 21
  misc_feature: MA Experiment 20000185 PARAMETER Experiment Name: At_Roots__P Parameter: Organism Value: A. thaliana
  misc_feature: MA Experiment 20000185 PARAMETER Experiment Name: At_Roots__P Parameter: Tissue Value: Roots vs. Whole Plant
  misc_feature: MA Experiment ID: 20000235 Result: Up-regulated in Transcription
  misc_feature: MA Experiment 20000235 PARAMETER Experiment Name: At_Siliques_P Parameter: Age (day) Value: 21
  misc_feature: MA Experiment 20000235 PARAMETER Experiment Name: At_Siliques_P Parameter: Organism Value: A. thaliana
  misc_feature: MA Experiment 20000235 PARAMETER Experiment Name: At_Siliques_P Parameter: Plant Line Value: WS
  misc_feature: MA Experiment 20000235 PARAMETER Experiment Name: At_Siliques_P Parameter: Tissue Value: 5-10mm Siliques vs. Whole Plant
  misc_feature: MA Experiment ID: 20000265 Result: Up-regulated in Transcription
  misc_feature: MA Experiment 20000265 PARAMETER Experiment Name: At_Open_Flower_P Parameter: Age (day) Value: 21
  misc_feature: MA Experiment 20000265 PARAMETER Experiment Name: At_Open_Flower_P Parameter: Plant Line Value: WS
  misc_feature: MA Experiment 20000265 PARAMETER Experiment Name: At_Open_Flower_P Parameter: Tissue Value: Closed Flower vs. Whole Plant
  misc_feature: MA Experiment ID: 20000437 Result: Down-regulated in Transcription
  misc_feature: MA Experiment 20000437 PARAMETER Experiment Name: At_Drought_P Parameter: Age (day) Value: 8
  misc_feature: MA Experiment 20000437 PARAMETER Experiment Name: At_Drought_P Parameter: Organism Value: A. thaliana
  misc_feature: MA Experiment 20000437 PARAMETER Experiment Name: At_Drought_P Parameter: Plant Line Value: WS
  misc_feature: MA Experiment 20000437 PARAMETER Experiment Name: At_Drought_P Parameter: Timepoint (hr) Value: 24
  misc_feature: MA Experiment 20000437 PARAMETER Experiment Name: At_Drought_P Parameter: Tissue Value: Whole Plant
  misc_feature: MA Experiment 20000437 PARAMETER Experiment Name: At_Drought_P Parameter: Treatment Value: Drought vs. No Drought
  misc_feature: MA Experiment ID: 20000441 Result: Down-regulated in Transcription
  misc_feature: MA Experiment 20000441 PARAMETER Experiment Name: At_1uM_BR-BRZ__P Parameter: Tissue Value: Shoot Apices
  misc_feature: MA Experiment 20000441 PARAMETER Experiment Name: At_1uM_BR-BRZ__P Parameter: Treatment Value: 1uM BR vs. No Treatment
  misc_feature: MA Experiment ID: 20000443 Result: Down-regulated in Transcription
  misc_feature: MA Experiment 20000443 PARAMETER Experiment Name: At_1uM_BR-BRZ__P Parameter: Tissue Value: Shoot Apices
  misc_feature: MA Experiment 20000443 PARAMETER Experiment Name: At_1uM_BR-BRZ__P Parameter: Treatment Value: 1uM BRZ vs. No Treatment
  misc_feature: MA Experiment ID: 20000794 Result: Up-regulated in Transcription
  misc_feature: MA Experiment 20000794 PARAMETER Experiment Name: At_Petals_P Parameter: Age (day) Value: 23-25 days
  misc_feature: MA Experiment 20000794 PARAMETER Experiment Name: At_Petals_P Parameter: Plant Line Value: WS
  misc_feature: MA Experiment 20000794 PARAMETER Experiment Name: At_Petals_P Parameter: Tissue Value: Petals vs. Whole plant
  misc_feature: MA Experiment ID: 20001911 Result: Down-regulated in Transcription
  misc_feature: MA Experiment 20001911 PARAMETER Experiment Name: At_Drought_Reproduction_P Parameter: Age (day) Value: 40
  misc_feature: MA Experiment 20001911 PARAMETER Experiment Name: At_Drought_Reproduction_P Parameter: Organism Value: A. thaliana
  misc_feature: MA Experiment 20001911 PARAMETER Experiment Name: At_Drought_Reproduction_P Parameter: Plant Line Value: WS
  misc_feature: MA Experiment 20001911 PARAMETER Experiment Name: At_Drought_Reproduction_P Parameter: Timepoint (day) Value: 10
  misc_feature: MA Experiment 20001911 PARAMETER Experiment Name: At_Drought_Reproduction_P Parameter: Tissue Value: Flowers
  misc_feature: MA Experiment 20001911 PARAMETER Experiment Name: At_Drought_Reproduction_P Parameter: Treatment Value: Drought vs. No Drought
tttatcgtctacgagctgatggaaagcggatcattggatacacagttacacggaccttctcggggatcggctttaacatggcacatgcggatgaagattgctcttgatacagcaagagctgttgagtatctccacgagcgttgtcgtcctccggttatccacagagatcttaaatcgtcaaatattctccttgattcttccttcaacgccaagatttcggattttggtcttgcggtaatggtgggggctcacggcaaaaacaacattaaactatcaggaacacttggttatgttgctccagaatatctcctagatggaaaattgacggataagagtgatgtttatgcgtttggtgtggttttacttgaactcttgttaggaagacggccggttgagaaattgagttcggttcagtgtcaatctcttgtcacttgggcaatgccccaacttacggatagatcaaagcttccgaaaatcgtggatccggttatcaaagatacaatggatcataagcacttataccaggtggcagccgtggcagtgctttgtgtacaaccagaaccgagttatcgaccgttgataaccgatgttcttcactcactagttccattggttccggtagagctaggagggactctccggttaataccatcatcgtcttgatttaagaaaataatattttttgcttcttttttt

SEQ ID NO: 74783 - protein, 220 aa, Arabidopsis thaliana; identical to SEQ ID NO: 34916
  peptide (1)..(220): Ceres Seq. ID no. 5679646
  misc_feature (1)..(130): Pfam Name: Protein kinase domain Pfam Description: Protein kinase domain
  misc_feature (1)..(220): Homolog of NCBI NO: 11259774 NR Description: ser/thr specific protein kinase-like protein -
  misc_feature (1)..(220): Homolog of NCBI NO: 11358833 NR Description: ser/thr specific protein kinase-like protein -
  misc_feature (1)..(220): Homolog of NCBI NO: 30683447 NR Description: protein kinase family [Arabidopsis thaliana]
  misc_feature (18)..(219): Homolog of NCBI NO: 29367521 NR Description: protein kinase-like protein [Oryza sativa
  misc_feature (2)..(216): Homolog of NCBI NO: 15220195 NR Description: putative protein kinase; protein id: At1g80640.1
  misc_feature (41)..(184): Homolog of NCBI NO: 7434336 NR Description: hypothetical protein F10N7.190 - Arabidopsis >gi|3858939|emb|CAA16589.1| serine/threonine protein kinase like
  misc_feature (41)..(184): Homolog of NCBI NO: 30689231 NR Description: protein kinase family [Arabidopsis thaliana]
  misc_feature (2)..(205): Homolog of NCBI NO: 11358842 NR Description: serine/threonine-specific protein kinase-like
  misc_feature (2)..(205): Homolog of NCBI NO: 30694859 NR Description: protein kinase family [Arabidopsis thaliana]
  misc_feature (2)..(205): Homolog of NCBI NO: 26449989 NR Description: putative serine/threonine-specific protein kinase

SEQ ID NO: 74784 - protein, 214 aa, Arabidopsis thaliana; identical to SEQ ID NO: 34917
  peptide (1)..(214): Ceres Seq. ID no. 5679647
  misc_feature (1)..(124): Pfam Name: Protein kinase domain Pfam Description: Protein kinase domain
  misc_feature (1)..(214): Homolog of NCBI NO: 11259774 NR Description: ser/thr specific protein kinase-like protein -
  misc_feature (1)..(214): Homolog of NCBI NO: 11358833 NR Description: ser/thr specific protein kinase-like protein -
  misc_feature (1)..(214): Homolog of NCBI NO: 30683447 NR Description: protein kinase family [Arabidopsis thaliana]
  misc_feature (12)..(213): Homolog of NCBI NO: 29367521 NR Description: protein kinase-like protein [Oryza sativa
  misc_feature (1)..(210): Homolog of NCBI NO: 15220195 NR Description: putative protein kinase; protein id: At1g80640.1
  misc_feature (35)..(178): Homolog of NCBI NO: 7434336 NR Description: hypothetical protein F10N7.190 - Arabidopsis >gi|3858939|emb|CAA16589.1| serine/threonine protein kinase like
  misc_feature (35)..(178): Homolog of NCBI NO: 30689231 NR Description: protein kinase family [Arabidopsis thaliana]
  misc_feature (1)..(199): Homolog of NCBI NO: 11358842 NR Description: serine/threonine-specific protein kinase-like
  misc_feature (1)..(199): Homolog of NCBI NO: 30694859 NR Description: protein kinase family [Arabidopsis thaliana]
  misc_feature (1)..(199): Homolog of NCBI NO: 26449989 NR Description: putative serine/threonine-specific protein kinase

SEQ ID NO: 74785 - protein, 192 aa, Arabidopsis thaliana; identical to SEQ ID NO: 34918
  peptide (1)..(192): Ceres Seq. ID no. 5679648
  misc_feature (1)..(102): Pfam Name: Protein kinase domain Pfam Description: Protein kinase domain
  misc_feature (1)..(192): Homolog of NCBI NO: 11259774 NR Description: ser/thr specific protein kinase-like protein -
  misc_feature (1)..(192): Homolog of NCBI NO: 11358833 NR Description: ser/thr specific protein kinase-like protein -
  misc_feature (1)..(192): Homolog of NCBI NO: 30683447 NR Description: protein kinase family [Arabidopsis thaliana]
  misc_feature (1)..(191): Homolog of NCBI NO: 29367521 NR Description: protein kinase-like protein [Oryza sativa
  misc_feature (1)..(188): Homolog of NCBI NO: 15220195 NR Description: putative protein kinase; protein id: At1g80640.1
  misc_feature (13)..(156): Homolog of NCBI NO: 7434336 NR Description: hypothetical protein F10N7.190 - Arabidopsis >gi|3858939|emb|CAA16589.1| serine/threonine protein kinase like
  misc_feature (13)..(156): Homolog of NCBI NO: 30689231 NR Description: protein kinase family [Arabidopsis thaliana]
  misc_feature (1)..(177): Homolog of NCBI NO: 11358842 NR Description: serine/threonine-specific protein kinase-like
  misc_feature (1)..(177): Homolog of NCBI NO: 30694859 NR Description: protein kinase family [Arabidopsis thaliana]
  misc_feature (1)..(177): Homolog of NCBI NO: 26449989 NR Description: putative serine/threonine-specific protein kinase

SEQ ID NO: 74786 - DNA, 1772 bp, Arabidopsis thaliana
  misc_feature (1)..(1772): Ceres Seq. ID no. 5679656
  misc_feature: MA Experiment ID: 20000794 Result: Up-regulated in Transcription
  misc_feature: MA Experiment 20000794 PARAMETER Experiment Name: At_Petals_P Parameter: Age (day) Value: 23-25 days
  misc_feature: MA Experiment 20000794 PARAMETER Experiment Name: At_Petals_P Parameter: Plant Line Value: WS
  misc_feature: MA Experiment 20000794 PARAMETER Experiment Name: At_Petals_P Parameter: Tissue Value: Petals vs. Whole plant
  misc_feature: MA Experiment ID: 20001905 Result: Up-regulated in Transcription
  misc_feature: MA Experiment 20001905 PARAMETER Experiment Name: At_Drought_Reproduction_P Parameter: Age (day) Value: 40
  misc_feature: MA Experiment 20001905 PARAMETER Experiment Name: At_Drought_Reproduction_P Parameter: Organism Value: A. thaliana
  misc_feature: MA Experiment 20001905 PARAMETER Experiment Name: At_Drought_Reproduction_P Parameter: Plant Line Value: WS
  misc_feature: MA Experiment 20001905 PARAMETER Experiment Name: At_Drought_Reproduction_P Parameter: Timepoint (day) Value: 10
  misc_feature: MA Experiment 20001905 PARAMETER Experiment Name: At_Drought_Reproduction_P Parameter: Tissue Value: Rosettes
  misc_feature: MA Experiment 20001905 PARAMETER Experiment Name: At_Drought_Reproduction_P Parameter: Treatment Value: Drought vs. No Drought
  misc_feature: MA Experiment ID: 20001911 Result: Up-regulated in Transcription
  misc_feature: MA Experiment 20001911 PARAMETER Experiment Name: At_Drought_Reproduction_P Parameter: Age (day) Value: 40
  misc_feature: MA Experiment 20001911 PARAMETER Experiment Name: At_Drought_Reproduction_P Parameter: Organism Value: A. thaliana
  misc_feature: MA Experiment 20001911 PARAMETER Experiment Name: At_Drought_Reproduction_P Parameter: Plant Line Value: WS
  misc_feature: MA Experiment 20001911 PARAMETER Experiment Name: At_Drought_Reproduction_P Parameter: Timepoint (day) Value: 10
  misc_feature: MA Experiment 20001911 PARAMETER Experiment Name: At_Drought_Reproduction_P Parameter: Tissue Value: Flowers
  misc_feature: MA Experiment 20001911 PARAMETER Experiment Name: At_Drought_Reproduction_P Parameter: Treatment Value: Drought vs. No Drought
gtaatctcaatcacaaactatttcccccccttcgttcatcaaatcctcaagagaaaaaaaaaatccccaaaagcttcctcaaaaccctaacacagatctctcgatcttctccgatctgtcttttctcctaatctggtttagtttgattttattggattgaagatgtcagacgctttgaatatgactcttgatgaaattgtgaagaagagtaagagtgaaaggtctgcagctgcaaggtctggaggtaaaggagtttcccgtaagagtggacgtggacgtggtggacctaatggtgttgtaggaggtggaagaggaggtggacctgttcgtagaggtcctcttgctgttaatactcggccatcatcatccttctccataaacaaggcaagctcgaaatcttgattggaactctgtgccaccaaataccgaagcatgctaaaacttaagatggatgatcttttaatgctcttttgtccttggagaagaatcatacatgcatataccgttacttctgatgatgattcagattacaagaatcttctaacatcttcttagaaaagcttctttcctgcaattagtggtttttatggttaaaatctgggaacttcaagaggcatgaatagatgtgcagaagttttcggttgatattgtcactcgctataggtttattgaggagctcctttaagctaagtagtccacatagggttatctacagggggataaagcctgaaaatgtgtgtggttttagggggaatttcagaaattttaacagtaaataggatttatgatgggttatcaaagtgggggtatttgcactatgcatgaagttcacgatggtacatctggaatttcttcggagtgtgacggcagtctcagttttcgtttttggcttcagagactgactgataacaccacttgcccgcaggaagaggagcttgccatggcagaatcagaatgatttgtatgaagaaacccttagagctgttggggtatcaggagtggaagtcggaaccacagtttatattaccaaccttgatcagggagtgacaaatgaagatataagggaactctatgctgaaattggagagctgaaaagatatgcaattcactatgacaaaaatgggcgtccaagtggatcggctgaagttgtgtatatgagaagaagtgatgcaattcaagctatgaggaaatacaataatgtacttttggatggaaggcctatgaaactggagattctgggtggaaatactgaatctgctcctgtcgcagctcgtgttaatgtgactggattgaatggaaggatgaagaggagtgtcttcattggacaaggagttagaggtgggagagtaggaagaggaagaggttcaggtccttctgggagacgccttccactccaacaaaaccaacaaggtggtgtgacagctggtcgaggcgggttccgtggtagaggccggggtaatggtggtggcagagggaataaaagcggtgggcgaggtggaaagaagccagtggagaagtctgctgcggatctcgacaaagatctcgaaagctatcatgctgaagctatgaacatctcttaaacagaagcaagacttcgcatcttgtcatgtacttttgtgttctttattcttagtctctgactaaatatgtggcaaagtctggtttggtttaattacgtttaggatggctctactctgcttttattttcctcttttcttgtttcacactttcacagtcacttttggttattgaagttaaaagagatttagctg

SEQ ID NO: 74787 - protein, 141 aa, Arabidopsis thaliana
  peptide (1)..(141): Ceres Seq. ID no. 5679657
  misc_feature (1)..(141): Homolog of NCBI NO: 18408471 NR Description: RNA and export factor binding protein, putative; id: At1g66260.1, supported by cDNA: gi_15294237 [Arabidopsis >gi|15294238|gb|AAK95296.1|AF410310_1 At1g66260/T6J19_1
  misc_feature (1)..(141): Homolog of NCBI NO: 9663023 NR Description: DIP1 protein [Arabidopsis thaliana]
  misc_feature (1)..(141): Homolog of NCBI NO: 25404603 NR Description: hypothetical protein T6J19.1 [imported] - thaliana >gi|12323574|gb|AAG51767.1|AC066691_7 RNA and export
  misc_feature (1)..(141): Homolog of NCBI NO: 30693141 NR Description: RNA and export factor binding protein, putative
  misc_feature (1)..(141): Homolog of NCBI NO: 9663025 NR Description: DIP2 protein [Arabidopsis thaliana]
  misc_feature (1)..(141): Homolog of NCBI NO: 9757981 NR Description: gene_id:K12B20.19~unknown protein [Arabidopsis
  misc_feature (1)..(138): Homolog of NCBI NO: 38175495 NR Description: putative transcriptional coactivator(DIP2) [Oryza
  misc_feature (1)..(141): Homolog of NCBI NO: 30679669 NR Description: RNA and export factor binding protein, putative thaliana] >gi|22655123|gb|AAM98152.1| putative protein thaliana] >gi|30023796|gb|AAP13431.1| At5g02530 [Arabidopsis
  misc_feature (1)..(141): Homolog of NCBI NO: 11358209 NR Description: hypothetical protein T22P11.120 - Arabidopsis >gi|7413642|emb|CAB85990.1| putative protein [Arabidopsis
  misc_feature (1)..(77): Homolog of NCBI NO: 6755763 NR Description: RNA and export factor binding protein 1; Tcra binding factor interacting protein 1 [Mus musculus]
MRRSDAIQAMRKYNNVLLDGRPMKLEILGGNTESAPVAARVNVTGLNGRMKRSVFIGQGVRGGRVGRGRGSGPSGRRLPLQQNQQGGVTAGRGGFRGRGRGNGGGRGNKSGGRGGKKPVEKSAADLDKDLESYHAEAMNIS

SEQ ID NO: 74788 - protein, 132 aa, Arabidopsis thaliana
  peptide (1)..(132): Ceres Seq. ID no. 5679658
  misc_feature (1)..(132): Homolog of NCBI NO: 18408471 NR Description: RNA and export factor binding protein, putative; id: At1g66260.1, supported by cDNA: gi_15294237 [Arabidopsis >gi|15294238|gb|AAK95296.1|AF410310_1 At1g66260/T6J19_1
  misc_feature (1)..(132): Homolog of NCBI NO: 9663023 NR Description: DIP1 protein [Arabidopsis thaliana]
  misc_feature (1)..(132): Homolog of NCBI NO: 25404603 NR Description: hypothetical protein T6J19.1 [imported] - thaliana >gi|12323574|gb|AAG51767.1|AC066691_7 RNA and export
  misc_feature (1)..(132): Homolog of NCBI NO: 30693141 NR Description: RNA and export factor binding protein, putative
  misc_feature (1)..(132): Homolog of NCBI NO: 9663025 NR Description: DIP2 protein [Arabidopsis thaliana]
  misc_feature (1)..(132): Homolog of NCBI NO: 9757981 NR Description: gene_id:K12B20.19~unknown protein [Arabidopsis
  misc_feature (1)..(129): Homolog of NCBI NO: 38175495 NR Description: putative transcriptional coactivator(DIP2) [Oryza
  misc_feature (1)..(132): Homolog of NCBI NO: 30679669 NR Description: RNA and export factor binding protein, putative thaliana] >gi|22655123|gb|AAM98152.1| putative protein thaliana] >gi|30023796|gb|AAP13431.1| At5g02530 [Arabidopsis
  misc_feature (1)..(132): Homolog of NCBI NO: 11358209 NR Description: hypothetical protein T22P11.120 - Arabidopsis >gi|7413642|emb|CAB85990.1| putative protein [Arabidopsis
  misc_feature (1)..(68): Homolog of NCBI NO: 6755763 NR Description: RNA and export factor binding protein 1; Tcra binding factor interacting protein 1 [Mus musculus]
MRKYNNVLLDGRPMKLEILGGNTESAPVAARVNVTGLNGRMKRSVFIGQGVRGGRVGRGRGSGPSGRRLPLQQNQQGGVTAGRGGFRGRGRGNGGGRGNKSGGRGGKKPVEKSAADLDKDLESYHAEAMNIS

SEQ ID NO: 74789 - protein, 119 aa, Arabidopsis thaliana
  peptide (1)..(119): Ceres Seq. ID no. 5679659
  misc_feature (1)..(119): Homolog of NCBI NO: 18408471 NR Description: RNA and export factor binding protein, putative; id: At1g66260.1, supported by cDNA: gi_15294237 [Arabidopsis >gi|15294238|gb|AAK95296.1|AF410310_1 At1g66260/T6J19_1
  misc_feature (1)..(119): Homolog of NCBI NO: 9663023 NR Description: DIP1 protein [Arabidopsis thaliana]
  misc_feature (1)..(119): Homolog of NCBI NO: 25404603 NR Description: hypothetical protein T6J19.1 [imported] - thaliana >gi|12323574|gb|AAG51767.1|AC066691_7 RNA and export
  misc_feature (1)..(119): Homolog of NCBI NO: 30693141 NR Description: RNA and export factor binding protein, putative
  misc_feature (1)..(119): Homolog of NCBI NO: 9663025 NR Description: DIP2 protein [Arabidopsis thaliana]
  misc_feature (1)..(119): Homolog of NCBI NO: 9757981 NR Description: gene_id:K12B20.19~unknown protein [Arabidopsis
  misc_feature (1)..(116): Homolog of NCBI NO: 38175495 NR Description: putative transcriptional coactivator(DIP2) [Oryza
  misc_feature (1)..(119): Homolog of NCBI NO: 30679669 NR Description: RNA and export factor binding protein, putative thaliana] >gi|22655123|gb|AAM98152.1| putative protein thaliana] >gi|30023796|gb|AAP13431.1| At5g02530 [Arabidopsis
  misc_feature (1)..(119): Homolog of NCBI NO: 11358209 NR Description: hypothetical protein T22P11.120 - Arabidopsis >gi|7413642|emb|CAB85990.1| putative protein [Arabidopsis
  misc_feature (1)..(55): Homolog of NCBI NO: 6755763 NR Description: RNA and export factor binding protein 1; Tcra binding factor interacting protein 1 [Mus musculus]
MKLEILGGNTESAPVAARVNVTGLNGRMKRSVFIGQGVRGGRVGRGRGSGPSGRRLPLQQNQQGGVTAGRGGFRGRGRGNGGGRGNKSGGRGGKKPVEKSAADLDKDLESYHAEAMNIS

SEQ ID NO: 74790 - DNA, 1702 bp, Arabidopsis thaliana
  misc_feature (1)..(1702): Ceres Seq. ID no. 5679735
  misc_feature: MA Experiment ID: 108462 Result: Down-regulated in Transcription
  misc_feature: MA Experiment 108462 PARAMETER Experiment Name: At_Germinating_Seeds_cDNA_P Parameter: Age (day) Value: 2 vs. 0
  misc_feature: MA Experiment 108462 PARAMETER Experiment Name: At_Germinating_Seeds_cDNA_P Parameter: Tissue Value: Germinating Seeds
  misc_feature: MA Experiment ID: 108577 Result: Down-regulated in Transcription
  misc_feature: MA Experiment 108577 PARAMETER Experiment Name: At_42deg_Heat_cDNA_P Parameter: Temperature (deg C) Value: 42 vs. 22
  misc_feature: MA Experiment 108577 PARAMETER Experiment Name: At_42deg_Heat_cDNA_P Parameter: Timepoint (hr) Value: 6
  misc_feature: MA Experiment 108577 PARAMETER Experiment Name: At_42deg_Heat_cDNA_P Parameter: Tissue Value: Aerial
  misc_feature: MA Experiment ID: 20000069 Result: Up-regulated in Transcription
  misc_feature: MA Experiment 20000069 PARAMETER Experiment Name: At_100uM_ABA_Mutants_cDNA_P Parameter: Plant Line Value: CS23
  misc_feature: MA Experiment 20000069 PARAMETER Experiment Name: At_100uM_ABA_Mutants_cDNA_P Parameter: Timepoint (hr) Value: 6
  misc_feature: MA Experiment 20000069 PARAMETER Experiment Name: At_100uM_ABA_Mutants_cDNA_P Parameter: Tissue Value: Aerial
  misc_feature: MA Experiment 20000069 PARAMETER Experiment Name: At_100uM_ABA_Mutants_cDNA_P Parameter: Treatment Value: 100uM ABA vs. No Treatment
  misc_feature: MA Experiment ID: 20000070 Result: Up-regulated in Transcription
  misc_feature: MA Experiment 20000070 PARAMETER Experiment Name: At_100uM_ABA_Mutants_cDNA_P Parameter: Plant Line Value: CS24
  misc_feature: MA Experiment 20000070 PARAMETER Experiment Name: At_100uM_ABA_Mutants_cDNA_P Parameter: Timepoint (hr) Value: 6
  misc_feature: MA Experiment 20000070 PARAMETER Experiment Name: At_100uM_ABA_Mutants_cDNA_P Parameter: Tissue Value: Aerial
  misc_feature: MA Experiment 20000070 PARAMETER Experiment Name: At_100uM_ABA_Mutants_cDNA_P Parameter: Treatment Value: 100uM ABA vs. No Treatment
  misc_feature: MA Experiment ID: 20000071 Result: Up-regulated in Transcription
  misc_feature: MA Experiment 20000071 PARAMETER Experiment Name: At_100uM_ABA_Mutants_cDNA_P Parameter: Plant Line Value: CS8104
  misc_feature: MA Experiment 20000071 PARAMETER Experiment Name: At_100uM_ABA_Mutants_cDNA_P Parameter: Timepoint (hr) Value: 6
  misc_feature: MA Experiment 20000071 PARAMETER Experiment Name: At_100uM_ABA_Mutants_cDNA_P Parameter: Tissue Value: Aerial
  misc_feature: MA Experiment 20000071 PARAMETER Experiment Name: At_100uM_ABA_Mutants_cDNA_P Parameter: Treatment Value: 100uM ABA vs. No Treatment
  misc_feature: MA Experiment ID: 20000072 Result: Up-regulated in Transcription
  misc_feature: MA Experiment 20000072 PARAMETER Experiment Name: At_100uM_ABA_Mutants_cDNA_P Parameter: Plant Line Value: CS8105
  misc_feature: MA Experiment 20000072 PARAMETER Experiment Name: At_100uM_ABA_Mutants_cDNA_P Parameter: Timepoint (hr) Value: 6
  misc_feature: MA Experiment 20000072 PARAMETER Experiment Name: At_100uM_ABA_Mutants_cDNA_P Parameter: Tissue Value: Aerial
  misc_feature: MA Experiment 20000072 PARAMETER Experiment Name: At_100uM_ABA_Mutants_cDNA_P Parameter: Treatment Value: 100uM ABA vs. No Treatment
  misc_feature: MA Experiment ID: 20000086 Result: Up-regulated in Transcription
  misc_feature: MA Experiment 20000086 PARAMETER Experiment Name: At_100uM_ABA_Mutants_cDNA_P Parameter: Plant Line Value: CS22
  misc_feature: MA Experiment 20000086 PARAMETER Experiment Name: At_100uM_ABA_Mutants_cDNA_P Parameter: Timepoint (hr) Value: 6
  misc_feature: MA Experiment 20000086 PARAMETER Experiment Name: At_100uM_ABA_Mutants_cDNA_P Parameter: Tissue Value: Aerial
  misc_feature: MA Experiment 20000086 PARAMETER Experiment Name: At_100uM_ABA_Mutants_cDNA_P Parameter: Treatment Value: 100uM ABA vs. No Treatment
  misc_feature: MA Experiment ID: 20000087 Result: Up-regulated in Transcription
  misc_feature: MA Experiment 20000087 PARAMETER Experiment Name: At_100uM_ABA_Mutants_cDNA_P Parameter: Plant Line Value: WS
  misc_feature: MA Experiment 20000087 PARAMETER Experiment Name: At_100uM_ABA_Mutants_cDNA_P Parameter: Timepoint (hr) Value: 6
  misc_feature: MA Experiment 20000087 PARAMETER Experiment Name: At_100uM_ABA_Mutants_cDNA_P Parameter: Tissue Value: Aerial
  misc_feature: MA Experiment 20000087 PARAMETER Experiment Name: At_100uM_ABA_Mutants_cDNA_P Parameter: Treatment Value: 100uM ABA vs. No Treatment
  misc_feature: MA Experiment ID: 20000088 Result: Up-regulated in Transcription
  misc_feature: MA Experiment 20000088 PARAMETER Experiment Name: At_100uM_ABA_Mutants_cDNA_P Parameter: Plant Line Value: Landsberg
  misc_feature: MA Experiment 20000088 PARAMETER Experiment Name: At_100uM_ABA_Mutants_cDNA_P Parameter: Timepoint (hr) Value: 6
  misc_feature: MA Experiment 20000088 PARAMETER Experiment Name: At_100uM_ABA_Mutants_cDNA_P Parameter: Tissue Value: Aerial
  misc_feature: MA Experiment 20000088 PARAMETER Experiment Name: At_100uM_ABA_Mutants_cDNA_P Parameter: Treatment Value: 100uM ABA vs. No Treatment
  misc_feature: MA Experiment ID: 20000089 Result: Up-regulated in Transcription
  misc_feature: MA Experiment ID: 20000111 Result: Down-regulated in Transcription
  misc_feature: MA Experiment 20000111 PARAMETER Experiment Name: At_42deg_Heat_cDNA_P Parameter: Temperature (deg C) Value: 42 vs. 22
  misc_feature: MA Experiment 20000111 PARAMETER Experiment Name: At_42deg_Heat_cDNA_P Parameter: Timepoint (hr) Value: 6
  misc_feature: MA Experiment 20000111 PARAMETER Experiment Name: At_42deg_Heat_cDNA_P Parameter: Tissue Value: Aerial
  misc_feature: MA Experiment ID: 20000113 Result: Down-regulated in Transcription
  misc_feature: MA Experiment 20000113 PARAMETER Experiment Name: At_42deg_Heat_cDNA_P Parameter: Temperature (deg C) Value: 42 vs. 22
  misc_feature: MA Experiment 20000113 PARAMETER Experiment Name: At_42deg_Heat_cDNA_P Parameter: Timepoint (hr) Value: 8
  misc_feature: MA Experiment 20000113 PARAMETER Experiment Name: At_42deg_Heat_cDNA_P Parameter: Tissue Value: Aerial
  misc_feature: MA Experiment ID: 20000117 Result: Up-regulated in Transcription
  misc_feature: MA Experiment 20000117 PARAMETER Experiment Name: At_100uM_ABA_Mutants_cDNA_P Parameter: Plant Line Value: Columbia
  misc_feature: MA Experiment 20000117 PARAMETER Experiment Name: At_100uM_ABA_Mutants_cDNA_P Parameter: Timepoint (hr) Value: 6
  misc_feature: MA Experiment 20000117 PARAMETER Experiment Name: At_100uM_ABA_Mutants_cDNA_P Parameter: Tissue Value: Aerial
  misc_feature: MA Experiment 20000117 PARAMETER Experiment Name: At_100uM_ABA_Mutants_cDNA_P Parameter: Treatment Value: 100uM ABA vs. No Treatment
  misc_feature: MA Experiment ID: 20000173 Result: Down-regulated in Transcription
  misc_feature: MA Experiment 20000173 PARAMETER Experiment Name: At_42deg_Heat_P Parameter: Age (day) Value: 14
  misc_feature: MA Experiment 20000173 PARAMETER Experiment Name: At_42deg_Heat_P Parameter: Organism Value: A. thaliana
  misc_feature: MA Experiment 20000173 PARAMETER Experiment Name: At_42deg_Heat_P Parameter: Plant Line Value: WS
  misc_feature: MA Experiment 20000173 PARAMETER Experiment Name: At_42deg_Heat_P Parameter: Temperature (deg C) Value: 42 vs. 22
  misc_feature: MA Experiment 20000173 PARAMETER Experiment Name: At_42deg_Heat_P Parameter: Timepoint (hr) Value: 6
  misc_feature: MA Experiment 20000173 PARAMETER Experiment Name: At_42deg_Heat_P Parameter: Tissue Value: Aerial
  misc_feature: MA Experiment ID: 20000180 Result: Down-regulated in Transcription
  misc_feature: MA Experiment 20000180 PARAMETER Experiment Name: At_Germinating_Seeds_P Parameter: Age (hr) Value: 24 vs. 0
  misc_feature: MA Experiment 20000180 PARAMETER Experiment Name: At_Germinating_Seeds_P Parameter: Tissue Value: Germinating Seeds
  misc_feature: MA Experiment ID: 20000184 Result: Down-regulated in Transcription
  misc_feature: MA Experiment 20000184 PARAMETER Experiment Name: At_Shoots__P Parameter: Age (day) Value: 7
  misc_feature: MA Experiment 20000184 PARAMETER Experiment Name: At_Shoots__P Parameter: Tissue Value: Shoots vs. Whole Plant
  misc_feature: MA Experiment ID: 20000185 Result: Down-regulated in Transcription
  misc_feature: MA Experiment 20000185 PARAMETER Experiment Name: At_Roots__P Parameter: Age (day) Value: 7 vs. 21
  misc_feature: MA Experiment 20000185 PARAMETER Experiment Name: At_Roots__P Parameter: Organism Value: A. thaliana
  misc_feature: MA Experiment 20000185 PARAMETER Experiment Name: At_Roots__P Parameter: Tissue Value: Roots vs. Whole Plant
  misc_feature: MA Experiment ID: 20000224 Result: Up-regulated in Transcription
  misc_feature: MA Experiment ID: 20000286 Result: Up-regulated in Transcription
  misc_feature: MA Experiment 20000286 PARAMETER Experiment Name: At_Open_Flower_P Parameter: Age (day) Value: 21
  misc_feature: MA Experiment 20000286 PARAMETER Experiment Name: At_Open_Flower_P Parameter: Plant Line Value: WS
  misc_feature: MA Experiment 20000286 PARAMETER Experiment Name: At_Open_Flower_P Parameter: Tissue Value: Half Open vs. Whole Plant
  misc_feature: MA Experiment ID: 20000437 Result: Up-regulated in Transcription
  misc_feature: MA Experiment 20000437 PARAMETER Experiment Name: At_Drought_P Parameter: Age (day) Value: 8
  misc_feature: MA Experiment 20000437 PARAMETER Experiment Name: At_Drought_P Parameter: Organism Value: A. thaliana
  misc_feature: MA Experiment 20000437 PARAMETER Experiment Name: At_Drought_P Parameter: Plant Line Value: WS
  misc_feature: MA Experiment 20000437 PARAMETER Experiment Name: At_Drought_P Parameter: Timepoint (hr) Value: 24
  misc_feature: MA Experiment 20000437 PARAMETER Experiment Name: At_Drought_P Parameter: Tissue Value: Whole Plant
  misc_feature: MA Experiment 20000437 PARAMETER Experiment Name: At_Drought_P Parameter: Treatment Value: Drought vs. No Drought
  misc_feature: MA Experiment ID: 20000438 Result: Down-regulated in Transcription
  misc_feature: MA Experiment 20000438 PARAMETER Experiment Name: At_Shoots__P Parameter: Age (day) Value: 14
  misc_feature: MA Experiment 20000438 PARAMETER Experiment Name: At_Shoots__P Parameter: Tissue Value: Shoots vs. Whole Plant
  misc_feature: MA Experiment ID: 20000495 Result: Up-regulated in Transcription
  misc_feature: MA Experiment 20000495 PARAMETER Experiment Name: At_Guard_Cells_P Parameter: Harvest Date Value: 8/2/2002
  misc_feature: MA Experiment 20000495 PARAMETER Experiment Name: At_Guard_Cells_P Parameter: Organism Value: A. thaliana
  misc_feature: MA Experiment 20000495 PARAMETER Experiment Name: At_Guard_Cells_P Parameter: Tissue Value: Guard Cells vs. Leaves
  misc_feature: MA Experiment ID: 20000794 Result: Up-regulated in Transcription
  misc_feature: MA Experiment 20000794 PARAMETER Experiment Name: At_Petals_P Parameter: Age (day) Value: 23-25 days
  misc_feature: MA Experiment 20000794 PARAMETER Experiment Name: At_Petals_P Parameter: Plant Line Value: WS
  misc_feature: MA Experiment 20000794 PARAMETER Experiment Name: At_Petals_P Parameter: Tissue Value: Petals vs. Whole plant
ctgttgtttgttttatcatctctccataattgcttcgatttctctgcaaagacacaacacaaaaagtgctttttttaatcagatattttctgggcttcactttaactctcttcgtgcttggttttccgatcttagtcgttactaattgagtcggagactgttcatttcctgattctgaagaaagttttggagaaggagaagatgtcaactctgcgagtgagctagggtttagtgtgttttccgatttttgagctcttggggattgttgttttctcttaaagagtcgattttgaatggcggtggagtatgtatgttgcagcccaaacttctttatacatatagctgtgattgtgtttcttgtcttgttcgctggactcatgtctggcttaacattgggtcttatgtctttgagtctcgttgatcttgaagttctcgctaaatccggtacacctgaacatcgtaaatatgcagcaaagatattgccagtggtaaagaatcagcacttgttgcttgtcactttacttatatgcaatgcagctgctatggagacgcttcctatttttcttgatggccttgtgacggcatggggtgccattttgatttcagttacattgattcttctctttggtgagattatacctcagtcgatttgttcacgttatggtttagcgattggtgcaacagtggctccgtttgtccgtgtcctagtctttatctgcttacctgttgcatggccaataagcaagcgctttttcgaagagctgagctgaaaacacttgtggattttcatggaaatgaggctggaaagggtggggagttgactcatgacgaaacgacaatcattgcaggagctcttgaactctctgagaaaatggtcaaagatgcaatgacaccaatatcggatatctttgtgattgatatcaatgccaaactagacagagacttgatgaacttgattcttgagaaagggcatagcagagttccagtatactatgagcagccaactaacataatcggccttgttctggtgaagaacttattaactatcaacccagatgaagaaatacctgtcaagaatgtcacgataagaaggattccaagagttccagaaatcttgcctttatatgacatattgaacgaattccagaaaggactcagccacatggctgttgttgtaagacagtgtgacaaaatccacccattaccttctaaaaatgggagtgttaaggaagcccgagtggatgtggatagtgagggaactcctactcctcaggagagaatgttaaggacaaaaagatcgcttcaaaagtggaagagctttccgaatcgagcaagttcgtttaaaggagggtcaaagagcaagaagtggtcaaaagacaatgatgcagacatcctgcaattgaatggcaatccgctgcctaaacttgctgaggaagaagaagcagtcggaatcattacgatggaggatgtcattgaagaacttctgcaggaggagatctttgacgaaactgatcaccattttgaagactcctaacacagagtgcatgaccactgaactggttatgaatgtcgaaaactttagtctttgttttcaactttcaaactgtcacttgtccggcgaatgtgtatcaatgtaggcatgaacaacaactttttctatggtttcaagatgttttctctctatatatatatcattggtctc

SEQ ID NO: 74791 - protein, 267 aa, Arabidopsis thaliana; identical to SEQ ID NO: 38927
  peptide (1)..(267): Ceres Seq. ID no. 5679736
  misc_feature (53)..(108): Pfam Name: CBS domain Pfam Description: CBS domain
  misc_feature (1)..(267): Homolog of NCBI NO: 22329131 NR Description: putative protein; protein id: At4g33700.1, by cDNA: gi_17381275, supported by cDNA: gi_20856057 [Arabidopsis >gi|17381276|gb|AAL36056.1| AT4g33700/T16L1_190 [Arabidopsis
  misc_feature (1)..(267): Homolog of NCBI NO: 7487085 NR Description: hypothetical protein T16L1.190 - Arabidopsis >gi|3549672|emb|CAA20583.1| putative protein [Arabidopsis >gi|7270319|emb|CAB80087.1| putative protein [Arabidopsis
  misc_feature (6)..(266): Homolog of NCBI NO: 30679136 NR Description: CBS domain containing protein [Arabidopsis
  misc_feature (23)..(253): Homolog of NCBI NO: 25411569 NR Description: hypothetical protein At2g14520 [imported] - thaliana >gi|4263821|gb|AAD15464.1| hypothetical protein
  misc_feature (6)..(266): Homolog of NCBI NO: 40538933 NR Description: expressed protein [Oryza sativa (japonica
  misc_feature (7)..(163): Homolog of NCBI NO: 22330087 NR Description: unknown protein; protein id: At1g47330.1, by cDNA: gi_19715639 [Arabidopsis thaliana] At1g47330/T3F24_2 [Arabidopsis thaliana]
  misc_feature (221)..(263): Homolog of NCBI NO: 22330087 NR Description: unknown protein; protein id: At1g47330.1, by cDNA: gi_19715639 [Arabidopsis thaliana] At1g47330/T3F24_2 [Arabidopsis thaliana]
  misc_feature (1)..(170): Homolog of NCBI NO: 15237264 NR Description: putative protein; protein id: At5g52790.1 thaliana] >gi|8953734|dbj|BAA98097.1|
  misc_feature (234)..(265): Homolog of NCBI NO: 15237264 NR Description: putative protein; protein id: At5g52790.1 thaliana] >gi|8953734|dbj|BAA98097.1|
  misc_feature (6)..(100): Homolog of NCBI NO: 12039276 NR Description: putative ancient conserved domain protein [Oryza

SEQ ID NO: 74792 - protein, 220 aa, Arabidopsis thaliana; identical to SEQ ID NO: 38928
  peptide (1)..(220): Ceres Seq. ID no. 5679737
  misc_feature (6)..(61): Pfam Name: CBS domain Pfam Description: CBS domain
  misc_feature (1)..(220): Homolog of NCBI NO: 22329131 NR Description: putative protein; protein id: At4g33700.1, by cDNA: gi_17381275, supported by cDNA: gi_20856057 [Arabidopsis >gi|17381276|gb|AAL36056.1| AT4g33700/T16L1_190 [Arabidopsis
  misc_feature (1)..(220): Homolog of NCBI NO: 7487085 NR Description: hypothetical protein T16L1.190 - Arabidopsis >gi|3549672|emb|CAA20583.1| putative protein [Arabidopsis >gi|7270319|emb|CAB80087.1| putative protein [Arabidopsis
  misc_feature (1)..(219): Homolog of NCBI NO: 30679136 NR Description: CBS domain containing protein [Arabidopsis
  misc_feature (1)..(206): Homolog of NCBI NO: 25411569 NR Description: hypothetical protein At2g14520 [imported] - thaliana >gi|4263821|gb|AAD15464.1| hypothetical protein
  misc_feature (1)..(219): Homolog of NCBI NO: 40538933 NR Description: expressed protein [Oryza sativa (japonica
  misc_feature (1)..(116): Homolog of NCBI NO: 22330087 NR Description: unknown protein; protein id: At1g47330.1, by cDNA: gi_19715639 [Arabidopsis thaliana] At1g47330/T3F24_2 [Arabidopsis thaliana]
  misc_feature (174)..(216): Homolog of NCBI NO: 22330087 NR Description: unknown protein; protein id: At1g47330.1, by cDNA: gi_19715639 [Arabidopsis thaliana] At1g47330/T3F24_2 [Arabidopsis thaliana]
  misc_feature (1)..(123): Homolog of NCBI NO: 15237264 NR Description: putative protein; protein id: At5g52790.1 thaliana] >gi|8953734|dbj|BAA98097.1|
  misc_feature (187)..(218): Homolog of NCBI NO: 15237264 NR Description: putative protein; protein id: At5g52790.1 thaliana] >gi|8953734|dbj|BAA98097.1|
  misc_feature (1)..(53): Homolog of NCBI NO: 12039276 NR Description: putative ancient conserved domain protein [Oryza

SEQ ID NO: 74793 - protein, 215 aa, Arabidopsis thaliana; identical to SEQ ID NO: 38929
  peptide (1)..(215): Ceres Seq. ID no. 5679738
  misc_feature (1)..(56): Pfam Name: CBS domain Pfam Description: CBS domain
  misc_feature (1)..(215): Homolog of NCBI NO: 22329131 NR Description: putative protein; protein id: At4g33700.1, by cDNA: gi_17381275, supported by cDNA: gi_20856057 [Arabidopsis >gi|17381276|gb|AAL36056.1| AT4g33700/T16L1_190 [Arabidopsis
  misc_feature (1)..(215): Homolog of NCBI NO: 7487085 NR Description: hypothetical protein T16L1.190 - Arabidopsis >gi|3549672|emb|CAA20583.1| putative protein [Arabidopsis >gi|7270319|emb|CAB80087.1| putative protein [Arabidopsis
  misc_feature (1)..(214): Homolog of NCBI NO: 30679136 NR Description: CBS domain containing protein [Arabidopsis
  misc_feature (1)..(201): Homolog of NCBI NO: 25411569 NR Description: hypothetical protein At2g14520 [imported] - thaliana >gi|4263821|gb|AAD15464.1| hypothetical protein
  misc_feature (1)..(214): Homolog of NCBI NO: 40538933 NR Description: expressed protein [Oryza sativa (japonica
  misc_feature (1)..(111): Homolog of NCBI NO: 22330087 NR Description: unknown protein; protein id: At1g47330.1, by cDNA: gi_19715639 [Arabidopsis thaliana] At1g47330/T3F24_2 [Arabidopsis thaliana]
  misc_feature (169)..(211): Homolog of NCBI NO: 22330087 NR Description: unknown protein; protein id: At1g47330.1, by cDNA: gi_19715639 [Arabidopsis thaliana] At1g47330/T3F24_2 [Arabidopsis thaliana]
  misc_feature (1)..(118): Homolog of NCBI NO: 15237264 NR Description: putative protein; protein id: At5g52790.1 thaliana] >gi|8953734|dbj|BAA98097.1|
  misc_feature (182)..(213): Homolog of NCBI NO: 15237264 NR Description: putative protein; protein id: At5g52790.1 thaliana] >gi|8953734|dbj|BAA98097.1|
  misc_feature (1)..(48): Homolog of NCBI NO: 12039276 NR Description: putative ancient conserved domain protein [Oryza

SEQ ID NO: 74794 - DNA, 1121 bp, Arabidopsis thaliana
  misc_feature (1)..(1121): Ceres Seq. ID no. 5679743
  misc_feature: MA Experiment ID: 108461 Result: Up-regulated in Transcription
  misc_feature: MA Experiment 108461 PARAMETER Experiment Name: At_Germinating_Seeds_cDNA_P Parameter: Age (day) Value: 1 vs. 0
  misc_feature: MA Experiment 108461 PARAMETER Experiment Name: At_Germinating_Seeds_cDNA_P Parameter: Tissue Value: Germinating Seeds
  misc_feature: MA Experiment ID: 108462 Result: Up-regulated in Transcription
  misc_feature: MA Experiment 108462 PARAMETER Experiment Name: At_Germinating_Seeds_cDNA_P Parameter: Age (day) Value: 2 vs. 0
  misc_feature: MA Experiment 108462 PARAMETER Experiment Name: At_Germinating_Seeds_cDNA_P Parameter: Tissue Value: Germinating Seeds
  misc_feature: MA Experiment ID: 108463 Result: Up-regulated in Transcription
  misc_feature: MA Experiment 108463 PARAMETER Experiment Name: At_Germinating_Seeds_cDNA_P Parameter: Age (day) Value: 3 vs. 0
  misc_feature: MA Experiment 108463 PARAMETER Experiment Name: At_Germinating_Seeds_cDNA_P Parameter: Tissue Value: Germinating Seeds
  misc_feature: MA Experiment ID: 108464 Result: Up-regulated in Transcription
  misc_feature: MA Experiment 108464 PARAMETER Experiment Name: At_Germinating_Seeds_cDNA_P Parameter: Age (day) Value: 4 vs. 0
  misc_feature: MA Experiment 108464 PARAMETER Experiment Name: At_Germinating_Seeds_cDNA_P Parameter: Tissue Value: Germinating Seeds
  misc_feature: MA Experiment ID: 108594 Result: Down-regulated in Transcription
  misc_feature: MA Experiment 108594 PARAMETER Experiment Name: At_Ler-rhl_Root_cDNA_P Parameter: Plant Line Value: null
  misc_feature: MA Experiment ID: 108595 Result: Down-regulated in Transcription
  misc_feature: MA Experiment 108595 PARAMETER Experiment Name: At_Ler-pi_Ovule_cDNA_P Parameter: Plant Line Value: null
  misc_feature: MA Experiment ID: 108668 Result: Up-regulated in Transcription
  misc_feature: MA Experiment 108668 PARAMETER Experiment Name: At_2mM_SA_cDNA_P Parameter: Plant Line Value: WS
  misc_feature: MA Experiment 108668 PARAMETER Experiment Name: At_2mM_SA_cDNA_P Parameter: Timepoint (hr) Value: 6
  misc_feature: MA Experiment 108668 PARAMETER Experiment Name: At_2mM_SA_cDNA_P Parameter: Treatment Value: 2mM SA vs. No Treatment
  misc_feature: MA Experiment ID: 20000069 Result: Down-regulated in Transcription
  misc_feature: MA Experiment 20000069 PARAMETER Experiment Name: At_100uM_ABA_Mutants_cDNA_P Parameter: Plant Line Value: CS23
  misc_feature: MA Experiment 20000069 PARAMETER Experiment Name: At_100uM_ABA_Mutants_cDNA_P Parameter: Timepoint (hr) Value: 6
  misc_feature: MA Experiment 20000069 PARAMETER Experiment Name: At_100uM_ABA_Mutants_cDNA_P Parameter: Tissue Value: Aerial
  misc_feature: MA Experiment 20000069 PARAMETER Experiment Name: At_100uM_ABA_Mutants_cDNA_P Parameter: Treatment Value: 100uM ABA vs. No Treatment
  misc_feature: MA Experiment ID: 20000070 Result: Down-regulated in Transcription
  misc_feature: MA Experiment 20000070 PARAMETER Experiment Name: At_100uM_ABA_Mutants_cDNA_P Parameter: Plant Line Value: CS24
  misc_feature: MA Experiment 20000070 PARAMETER Experiment Name: At_100uM_ABA_Mutants_cDNA_P Parameter: Timepoint (hr) Value: 6
  misc_feature: MA Experiment 20000070 PARAMETER Experiment Name: At_100uM_ABA_Mutants_cDNA_P Parameter: Tissue Value: Aerial
  misc_feature: MA Experiment 20000070 PARAMETER Experiment Name: At_100uM_ABA_Mutants_cDNA_P Parameter: Treatment Value: 100uM ABA vs. No Treatment
  misc_feature: MA Experiment ID: 20000071 Result: Down-regulated in Transcription
  misc_feature: MA Experiment 20000071 PARAMETER Experiment Name: At_100uM_ABA_Mutants_cDNA_P Parameter: Plant Line Value: CS8104
  misc_feature: MA Experiment 20000071 PARAMETER Experiment Name: At_100uM_ABA_Mutants_cDNA_P Parameter: Timepoint (hr) Value: 6
  misc_feature: MA Experiment 20000071 PARAMETER Experiment Name: At_100uM_ABA_Mutants_cDNA_P Parameter: Tissue Value: Aerial
  misc_feature: MA Experiment 20000071 PARAMETER Experiment Name: At_100uM_ABA_Mutants_cDNA_P Parameter: Treatment Value: 100uM ABA vs. No Treatment
  misc_feature: MA Experiment ID: 20000087 Result: Down-regulated in Transcription
  misc_feature: MA Experiment 20000087 PARAMETER Experiment Name: At_100uM_ABA_Mutants_cDNA_P Parameter: Plant Line Value: WS
  misc_feature: MA Experiment 20000087 PARAMETER Experiment Name: At_100uM_ABA_Mutants_cDNA_P Parameter: Timepoint (hr) Value: 6
  misc_feature: MA Experiment 20000087 PARAMETER Experiment Name: At_100uM_ABA_Mutants_cDNA_P Parameter: Tissue Value: Aerial
  misc_feature: MA Experiment 20000087 PARAMETER Experiment Name: At_100uM_ABA_Mutants_cDNA_P Parameter: Treatment Value: 100uM ABA vs. No Treatment
  misc_feature: MA Experiment ID: 20000089 Result: Down-regulated in Transcription
  misc_feature: MA Experiment ID: 20000117 Result: Down-regulated in Transcription
  misc_feature: MA Experiment 20000117 PARAMETER Experiment Name: At_100uM_ABA_Mutants_cDNA_P Parameter: Plant Line Value: Columbia
  misc_feature: MA Experiment 20000117 PARAMETER Experiment Name: At_100uM_ABA_Mutants_cDNA_P Parameter: Timepoint (hr) Value: 6
  misc_feature: MA Experiment 20000117 PARAMETER Experiment Name: At_100uM_ABA_Mutants_cDNA_P Parameter: Tissue Value: Aerial
  misc_feature: MA Experiment 20000117 PARAMETER Experiment Name: At_100uM_ABA_Mutants_cDNA_P Parameter: Treatment Value: 100uM ABA vs. No Treatment
  misc_feature: Pfam Name: DUF1295 Pfam Description: Protein of unknown function (DUF1295)
aagttctcagctaatctaaattcctctgttcattttctgggttgtgcgatagtttctgaacagagttaggtttctttgttcatgtctgatttcgcaaaactctgtttgccataatttgtaggtgatttaccagttcatattcttcgtaatcacggctcttttcaaatttgatcaagtcactgactttgctggtagcacaaacttcgttatacttgctgtgttaacacttgttctcaaagcctcttggcattttcgacagatagtattgactttgctagttgtggtatggggtcttcgcttggggattttccttctaatgaggatcttgcaatggggggaagatcgtcgctttgatgaacagcgtggaaatatagtgagactaatcattttctggactcttcaggctgtgtgggtttggacggttagcttacctttaacacttgttaatgcaagtgatggtggtggatctcttaaacccgcagatgttatcggttggactatgtgggttttcggtttcttgattgaagctgcagctgatcaacagaagctatcattcaaaaactctcctgaaaacagaggaaaatggtgtgatgttggagtctggaagtattcaagacatccaaactacttcggtgagatgttactgtggtggggaatctttgtggctgcatcgcctgtgcttgaaggtgcagagtatcttgtcatattcggaccactctttctcactttgctacttctattcgtcagcggcataccattactcgaggcatcggctgacaaaaaacatggaaactcaggagcttacagatcctacaagaagacaacaagtcctctgattctgttcccaagaggagtgtatgggaacttaccaggatggttcaagacggtctttctcttcgagtttccattttacagccgaaatctccctcaagagttagggtagactccaaaacagcaaagagaaagaagtaaaagatgactgatttgtgatactcatatttgagttattgttcttcacaacactctttgataaaatttgtgtaaaaaattgcccgtaagaaactgaatttgtttgaaatattggacagtcttgacagattatctcagttgtatttggttct

SEQ ID NO: 74795 - protein, 208 aa, Arabidopsis thaliana; identical to SEQ ID NO: 37102
  peptide (1)..(208): Ceres Seq. ID no. 5679744
  misc_feature: Pfam Name: DUF1295 Pfam Description: Protein of unknown function (DUF1295)
  misc_feature (1)..(208): Homolog of NCBI NO: 30698953 NR Description: expressed protein [Arabidopsis thaliana] At1g73650/F25P22_7 [Arabidopsis thaliana]
  misc_feature (1)..(207): Homolog of NCBI NO: 18410409 NR Description: expressed protein; protein id: At1g73650.1,
  misc_feature (1)..(207): Homolog of NCBI NO: 21537359 NR Description: unknown [Arabidopsis thaliana]
  misc_feature (1)..(206): Homolog of NCBI NO: 15221003 NR Description: hypothetical protein; protein id: At1g18180.1
  misc_feature (1)..(170): Homolog of NCBI NO: 25402844 NR Description: protein T10O22.15 [imported] - Arabidopsis >gi|8671769|gb|AAF78375.1|AC069551_8 T10O22.15 [Arabidopsis
  misc_feature (171)..(206): Homolog of NCBI NO: 25402844 NR Description: protein T10O22.15 [imported] - Arabidopsis >gi|8671769|gb|AAF78375.1|AC069551_8 T10O22.15 [Arabidopsis
  misc_feature (1)..(150): Homolog of NCBI NO: 25406281 NR Description: unknown protein F25P22.7 [imported] - Arabidopsis
  misc_feature (1)..(170): Homolog of NCBI NO: 9719732 NR Description: T10F20.18 [Arabidopsis thaliana]
  misc_feature (171)..(206): Homolog of NCBI NO: 9719732 NR Description: T10F20.18 [Arabidopsis thaliana]
  misc_feature (1)..(205): Homolog of NCBI NO: 13937298 NR Description: unknown protein [Oryza sativa]

SEQ ID NO: 74796 - protein, 147 aa, Arabidopsis thaliana; identical to SEQ ID NO: 37103
  peptide (1)..(147): Ceres Seq. ID no. 5679745
  misc_feature: Pfam Name: DUF1295 Pfam Description: Protein of unknown function (DUF1295)
  misc_feature (1)..(147): Homolog of NCBI NO: 30698953 NR Description: expressed protein [Arabidopsis thaliana] At1g73650/F25P22_7 [Arabidopsis thaliana]
  misc_feature (1)..(146): Homolog of NCBI NO: 18410409 NR Description: expressed protein; protein id: At1g73650.1,
  misc_feature (1)..(146): Homolog of NCBI NO: 21537359 NR Description: unknown [Arabidopsis thaliana]
  misc_feature (1)..(145): Homolog of NCBI NO: 15221003 NR Description: hypothetical protein; protein id: At1g18180.1
  misc_feature (1)..(109): Homolog of NCBI NO: 25402844 NR Description: protein T10O22.15 [imported] - Arabidopsis >gi|8671769|gb|AAF78375.1|AC069551_8 T10O22.15 [Arabidopsis
  misc_feature (110)..(145): Homolog of NCBI NO: 25402844 NR Description: protein T10O22.15 [imported] - Arabidopsis >gi|8671769|gb|AAF78375.1|AC069551_8 T10O22.15 [Arabidopsis
  misc_feature (1)..(89): Homolog of NCBI NO: 25406281 NR Description: unknown protein F25P22.7 [imported] - Arabidopsis
  misc_feature (1)..(109): Homolog of NCBI NO: 9719732 NR Description: T10F20.18 [Arabidopsis thaliana]
  misc_feature (110)..(145): Homolog of NCBI NO: 9719732 NR Description: T10F20.18 [Arabidopsis thaliana]
  misc_feature (1)..(144): Homolog of NCBI NO: 13937298 NR Description: unknown protein [Oryza sativa]

SEQ ID NO: 74797 - DNA, 985 bp, Arabidopsis thaliana
  misc_feature (1)..(985): Ceres Seq. ID no. 5679750
  misc_feature: MA Experiment ID: 108434 Result: Up-regulated in Transcription
  misc_feature: MA Experiment 108434 PARAMETER Experiment Name: At_Root_Tips_cDNA_P Parameter: Tissue Value: Root Tips
  misc_feature: MA Experiment ID: 108462 Result: Down-regulated in Transcription
  misc_feature: MA Experiment 108462 PARAMETER Experiment Name: At_Germinating_Seeds_cDNA_P Parameter: Age (day) Value: 2 vs. 0
  misc_feature: MA Experiment 108462 PARAMETER Experiment Name: At_Germinating_Seeds_cDNA_P Parameter: Tissue Value: Germinating Seeds
  misc_feature: MA Experiment ID: 108463 Result: Down-regulated in Transcription
  misc_feature: MA Experiment 108463 PARAMETER Experiment Name: At_Germinating_Seeds_cDNA_P Parameter: Age (day) Value: 3 vs. 0
  misc_feature: MA Experiment 108463 PARAMETER Experiment Name: At_Germinating_Seeds_cDNA_P Parameter: Tissue Value: Germinating Seeds
  misc_feature: MA Experiment ID: 108464 Result: Down-regulated in Transcription
  misc_feature: MA Experiment 108464 PARAMETER Experiment Name: At_Germinating_Seeds_cDNA_P Parameter: Age (day) Value: 4 vs. 0
  misc_feature: MA Experiment 108464 PARAMETER Experiment Name: At_Germinating_Seeds_cDNA_P Parameter: Tissue Value: Germinating Seeds
  misc_feature: MA Experiment ID: 108488 Result: Up-regulated in Transcription
  misc_feature: MA Experiment ID: 20000113 Result: Up-regulated in Transcription
  misc_feature: MA Experiment 20000113 PARAMETER Experiment Name: At_42deg_Heat_cDNA_P Parameter: Temperature (deg C) Value: 42 vs. 22
  misc_feature: MA Experiment 20000113 PARAMETER Experiment Name: At_42deg_Heat_cDNA_P Parameter: Timepoint (hr) Value: 8
  misc_feature: MA Experiment 20000113 PARAMETER Experiment Name: At_42deg_Heat_cDNA_P Parameter: Tissue Value: Aerial
aagaaagccctaaaatttaattagggtttcagtgtcttcaaattcacctatcctcagcctcaactctctcctctatccactctcagccggaaaatttttccttgattcattacgacagagagaaccatgccggcgaaacagaggaccccgaaggtcaacagaaaccctgatctgatcaggggtgttggtaaatactcgagatcccagatgtaccataagagaggtttgtgggctatcaaggccaaaaatggaggcgttttcccacgtcacgacgctaaatctaaggttgatgctccggtggagaagccaccgaagttctatccagctgaagatgttaagaaacctctccccaacaggcgcacggcaaaaccaaccaagctcagagctagcattactccaggtacagtgttgattatccttgctggtaggttcaagggaaagagagttgtcttccttaagcagcttgcctctggtttgcttcttgtgactggaccattcaagatcaatggtgttcctttgagacgtgttaaccaggcctatgtgattggcacttccacaaaggttgacatttctggagtcaccctcgataaattcgatgataagtactttggcaaggttgctgagaagaaaaagaagaagacagaaggagagttctttgaggctgagaaagaggagaagaaggagatcccacaggtgaagaaagatgaccagaaagctgtggatgcagctttgatcaaagccattgaagcagttccagagttgaagacttaccttggcgcaaggttttcattgaaacaaggaatgaagccccatgagcttgttttctagatttcattactttttttctgaggtctctagagtatctgtctcctgaagtgttttaccttctaaatggttgttttgttcttgttcactgaacacatacaatttttggcttatacattctctgttcttacgtatggacaaactatcgatcctgtttttg

SEQ ID NO: 74798 - protein, 233 aa, Arabidopsis thaliana; identical to SEQ ID NO: 22783
  peptide (1)..(233): Ceres Seq. ID no. 5679751
  misc_feature (126)..(233): Pfam Name: Ribosomal protein L6e Pfam Description: Ribosomal protein L6e
  misc_feature (1)..(233): Homolog of NCBI NO: 15221126 NR Description: putative 60S ribosomal protein L6; protein id: supported by cDNA: 3418., supported by cDNA: gi_15450985, by cDNA: gi_19698916 [Arabidopsis thaliana]
  misc_feature (1)..(233): Homolog of NCBI NO: 15221127 NR Description: putative 60S ribosomal protein L6; protein id: supported by cDNA: gi_17065091 [Arabidopsis thaliana]
  misc_feature (1)..(233): Homolog of NCBI NO: 15221798 NR Description: 60S ribosomal protein L6, putative; protein id: supported by cDNA: 573., supported by cDNA: gi_15451189, by cDNA: gi_18377489 [Arabidopsis thaliana]
  misc_feature (1)..(233): Homolog of NCBI NO: 21593910 NR Description: 60S ribosomal protein L6, putative [Arabidopsis
  misc_feature (3)..(233): Homolog of NCBI NO: 464621 NR Description: 60S RIBOSOMAL PROTEIN L6 (YL16-LIKE)
  misc_feature (1)..(233): Homolog of NCBI NO: 7208784 NR Description: 60S ribosomal protein L6 [Cicer arietinum]
  misc_feature (16)..(233): Homolog of NCBI NO: 38344818 NR Description: OSJNBb0022F23.11 [Oryza sativa (japonica
  misc_feature (49)..(233): Homolog of NCBI NO: 6012952 NR Description: 60S ribosomal protein L6 (YL 16 like) [Cyanophora
  misc_feature (58)..(233): Homolog of NCBI NO: 18088374 NR Description: Similar to ribosomal protein L6 [Homo sapiens]
  misc_feature (4)..(61): Homolog of NCBI NO: 18088374 NR Description: Similar to ribosomal protein L6 [Homo sapiens]

SEQ ID NO: 74799 - protein, 206 aa, Arabidopsis thaliana; identical to SEQ ID NO: 22784
  peptide (1)..(206): Ceres Seq. ID no. 5679752
  misc_feature (99)..(206): Pfam Name: Ribosomal protein L6e Pfam Description: Ribosomal protein L6e
  misc_feature (1)..(206): Homolog of NCBI NO: 15221126 NR Description: putative 60S ribosomal protein L6; protein id: supported by cDNA: 3418., supported by cDNA: gi_15450985, by cDNA: gi_19698916 [Arabidopsis thaliana]
  misc_feature (1)..(206): Homolog of NCBI NO: 15221127 NR Description: putative 60S ribosomal protein L6; protein id: supported by cDNA: gi_17065091 [Arabidopsis thaliana]
  misc_feature (1)..(206): Homolog of NCBI NO: 15221798 NR Description: 60S ribosomal protein L6, putative; protein id: supported by cDNA: 573., supported by cDNA: gi_15451189, by cDNA: gi_18377489 [Arabidopsis thaliana]
  misc_feature (1)..(206): Homolog of NCBI NO: 21593910 NR Description: 60S ribosomal protein L6, putative [Arabidopsis
  misc_feature (1)..(206): Homolog of NCBI NO: 464621 NR Description: 60S RIBOSOMAL PROTEIN L6 (YL16-LIKE)
  misc_feature (1)..(206): Homolog of NCBI NO: 7208784 NR Description: 60S ribosomal protein L6 [Cicer arietinum]
  misc_feature (1)..(206): Homolog of NCBI NO: 38344818 NR Description: OSJNBb0022F23.11 [Oryza sativa (japonica
  misc_feature (22)..(206): Homolog of NCBI NO: 6012952 NR Description: 60S ribosomal protein L6 (YL 16 like) [Cyanophora
  misc_feature (31)..(206): Homolog of NCBI NO: 18088374 NR Description: Similar to ribosomal protein L6 [Homo sapiens]
  misc_feature (1)..(34): Homolog of NCBI NO: 18088374 NR Description: Similar to ribosomal protein L6 [Homo sapiens]

SEQ ID NO: 74800 - DNA, 1219 bp, Arabidopsis thaliana
  misc_feature (1)..(1219): Ceres Seq. ID no. 5679772
  misc_feature: MA Experiment ID: 108461 Result: Up-regulated in Transcription
  misc_feature: MA Experiment 108461 PARAMETER Experiment Name: At_Germinating_Seeds_cDNA_P Parameter: Age (day) Value: 1 vs. 0
  misc_feature: MA Experiment 108461 PARAMETER Experiment Name: At_Germinating_Seeds_cDNA_P Parameter: Tissue Value: Germinating Seeds
  misc_feature: MA Experiment ID: 108462 Result: Up-regulated in Transcription
  misc_feature: MA Experiment 108462 PARAMETER Experiment Name: At_Germinating_Seeds_cDNA_P Parameter: Age (day) Value: 2 vs. 0
  misc_feature: MA Experiment 108462 PARAMETER Experiment Name: At_Germinating_Seeds_cDNA_P Parameter: Tissue Value: Germinating Seeds
  misc_feature: MA Experiment ID: 108464 Result: Up-regulated in Transcription
  misc_feature: MA Experiment 108464 PARAMETER Experiment Name: At_Germinating_Seeds_cDNA_P Parameter: Age (day) Value: 4 vs. 0
  misc_feature: MA Experiment 108464 PARAMETER Experiment Name: At_Germinating_Seeds_cDNA_P Parameter: Tissue Value: Germinating Seeds
  misc_feature: MA Experiment ID: 108488 Result: Up-regulated in Transcription
  misc_feature: MA Experiment ID: 108489 Result: Down-regulated in Transcription
  misc_feature: MA Experiment ID: 108572 Result: Down-regulated in Transcription
  misc_feature: MA Experiment 108572 PARAMETER Experiment Name: At_Drought_cDNA_P Parameter: Timepoint (hr) Value: 1
  misc_feature: MA Experiment 108572 PARAMETER Experiment Name: At_Drought_cDNA_P Parameter: Tissue Value: Aerial
  misc_feature: MA Experiment 108572 PARAMETER Experiment Name: At_Drought_cDNA_P Parameter: Treatment Value: Drought vs. No Drought
  misc_feature: MA Experiment ID: 108573 Result: Down-regulated in Transcription
  misc_feature: MA Experiment 108573 PARAMETER Experiment Name: At_Drought_cDNA_P Parameter: Timepoint (hr) Value: 6
  misc_feature: MA Experiment 108573 PARAMETER Experiment Name: At_Drought_cDNA_P Parameter: Tissue Value: Aerial
  misc_feature: MA Experiment 108573 PARAMETER Experiment Name: At_Drought_cDNA_P Parameter: Treatment Value: Drought vs. No Drought
  misc_feature: MA Experiment ID: 108576 Result: Down-regulated in Transcription
  misc_feature: MA Experiment 108576 PARAMETER Experiment Name: At_42deg_Heat_cDNA_P Parameter: Temperature (deg C) Value: 42 vs. 22
  misc_feature: MA Experiment 108576 PARAMETER Experiment Name: At_42deg_Heat_cDNA_P Parameter: Timepoint (hr) Value: 1
  misc_feature: MA Experiment 108576 PARAMETER Experiment Name: At_42deg_Heat_cDNA_P Parameter: Tissue Value: Aerial
  misc_feature: MA Experiment ID: 108577 Result: Down-regulated in Transcription
  misc_feature: MA Experiment 108577 PARAMETER Experiment Name: At_42deg_Heat_cDNA_P Parameter: Temperature (deg C) Value: 42 vs. 22
  misc_feature: MA Experiment 108577 PARAMETER Experiment Name: At_42deg_Heat_cDNA_P Parameter: Timepoint (hr) Value: 6
  misc_feature: MA Experiment 108577 PARAMETER Experiment Name: At_42deg_Heat_cDNA_P Parameter: Tissue Value: Aerial
  misc_feature: MA Experiment ID: 108668 Result: Down-regulated in Transcription
  misc_feature: MA Experiment 108668 PARAMETER Experiment Name: At_2mM_SA_cDNA_P Parameter: Plant Line Value: WS
  misc_feature: MA Experiment 108668 PARAMETER Experiment Name: At_2mM_SA_cDNA_P Parameter: Timepoint (hr) Value: 6
  misc_feature: MA Experiment 108668 PARAMETER Experiment Name: At_2mM_SA_cDNA_P Parameter: Treatment Value: 2mM SA vs. No Treatment
  misc_feature: MA Experiment ID: 20000071 Result: Down-regulated in Transcription
  misc_feature: MA Experiment 20000071 PARAMETER Experiment Name: At_100uM_ABA_Mutants_cDNA_P Parameter: Plant Line Value: CS8104
  misc_feature: MA Experiment 20000071 PARAMETER Experiment Name: At_100uM_ABA_Mutants_cDNA_P Parameter: Timepoint (hr) Value: 6
  misc_feature: MA Experiment 20000071 PARAMETER Experiment Name: At_100uM_ABA_Mutants_cDNA_P Parameter: Tissue Value: Aerial
  misc_feature: MA Experiment 20000071 PARAMETER Experiment Name: At_100uM_ABA_Mutants_cDNA_P Parameter: Treatment Value: 100uM ABA vs. No Treatment
  misc_feature: MA Experiment ID: 20000089 Result: Down-regulated in Transcription
  misc_feature: MA Experiment ID: 20000090 Result: Down-regulated in Transcription
  misc_feature: MA Experiment ID: 20000112 Result: Down-regulated in Transcription
  misc_feature: MA Experiment 20000112 PARAMETER Experiment Name: At_42deg_Heat_cDNA_P Parameter: Temperature (deg C) Value: 42 vs. 22
  misc_feature: MA Experiment 20000112 PARAMETER Experiment Name: At_42deg_Heat_cDNA_P Parameter: Timepoint (hr) Value: 2
  misc_feature: MA Experiment 20000112 PARAMETER Experiment Name: At_42deg_Heat_cDNA_P Parameter: Tissue Value: Aerial
  misc_feature: MA Experiment ID: 20000117 Result: Down-regulated in Transcription
  misc_feature: MA Experiment 20000117 PARAMETER Experiment Name: At_100uM_ABA_Mutants_cDNA_P Parameter: Plant Line Value: Columbia
  misc_feature: MA Experiment 20000117 PARAMETER Experiment Name: At_100uM_ABA_Mutants_cDNA_P Parameter: Timepoint (hr) Value: 6
  misc_feature: MA Experiment 20000117 PARAMETER Experiment Name: At_100uM_ABA_Mutants_cDNA_P Parameter: Tissue Value: Aerial
  misc_feature: MA Experiment 20000117 PARAMETER Experiment Name: At_100uM_ABA_Mutants_cDNA_P Parameter: Treatment Value: 100uM ABA vs. No Treatment
  misc_feature: MA Experiment ID: 20000173 Result: Down-regulated in Transcription
  misc_feature: MA Experiment 20000173 PARAMETER Experiment Name: At_42deg_Heat_P Parameter: Age (day) Value: 14
  misc_feature: MA Experiment 20000173 PARAMETER Experiment Name: At_42deg_Heat_P Parameter: Organism Value: A. thaliana
  misc_feature: MA Experiment 20000173 PARAMETER Experiment Name: At_42deg_Heat_P Parameter: Plant Line Value: WS
  misc_feature: MA Experiment 20000173 PARAMETER Experiment Name: At_42deg_Heat_P Parameter: Temperature (deg C) Value: 42 vs. 22
  misc_feature: MA Experiment 20000173 PARAMETER Experiment Name: At_42deg_Heat_P Parameter: Timepoint (hr) Value: 6
  misc_feature: MA Experiment 20000173 PARAMETER Experiment Name: At_42deg_Heat_P Parameter: Tissue Value: Aerial
  misc_feature: MA Experiment ID: 20000179 Result: Up-regulated in Transcription
  misc_feature: MA Experiment 20000179 PARAMETER Experiment Name: At_Germinating_Seeds_P Parameter: Age (hr) Value: 6 vs. 0
  misc_feature: MA Experiment 20000179 PARAMETER Experiment Name: At_Germinating_Seeds_P Parameter: Tissue Value: Germinating Seeds
  misc_feature: MA Experiment ID: 20000182 Result: Down-regulated in Transcription
  misc_feature: MA Experiment 20000182 PARAMETER Experiment Name: At_2mM_SA_P Parameter: Age (day) Value: 14
  misc_feature: MA Experiment 20000182 PARAMETER Experiment Name: At_2mM_SA_P Parameter: Organism Value: A. thaliana
  misc_feature: MA Experiment 20000182 PARAMETER Experiment Name: At_2mM_SA_P Parameter: Plant Line Value: WS
  misc_feature: MA Experiment 20000182 PARAMETER Experiment Name: At_2mM_SA_P Parameter: Timepoint (hr) Value: 6
  misc_feature: MA Experiment 20000182 PARAMETER Experiment Name: At_2mM_SA_P Parameter: Tissue Value: Aerial
  misc_feature: MA Experiment 20000182 PARAMETER Experiment Name: At_2mM_SA_P Parameter: Treatment Value: 2mM SA vs. No Treatment
  misc_feature: MA Experiment ID: 20000184 Result: Up-regulated in Transcription
  misc_feature: MA Experiment 20000184 PARAMETER Experiment Name: At_Shoots__P Parameter: Age (day) Value: 7
  misc_feature: MA Experiment 20000184 PARAMETER Experiment Name: At_Shoots__P Parameter: Tissue Value: Shoots vs. Whole Plant
  misc_feature: MA Experiment ID: 20000224 Result: Down-regulated in Transcription
  misc_feature: MA Experiment ID: 20000227 Result: Down-regulated in Transcription
  misc_feature: MA Experiment 20000227 PARAMETER Experiment Name: At_Root-Tips-vs-Tops_P Parameter: Tissue Value: Root Tips vs. Root Tops
  misc_feature: MA Experiment ID: 20000437 Result: Down-regulated in Transcription
  misc_feature: MA Experiment 20000437 PARAMETER Experiment Name: At_Drought_P Parameter: Age (day) Value: 8
  misc_feature: MA Experiment 20000437 PARAMETER Experiment Name: At_Drought_P Parameter: Organism Value: A. thaliana
  misc_feature: MA Experiment 20000437 PARAMETER Experiment Name: At_Drought_P Parameter: Plant Line Value: WS
  misc_feature: MA Experiment 20000437 PARAMETER Experiment Name: At_Drought_P Parameter: Timepoint (hr) Value: 24
  misc_feature: MA Experiment 20000437 PARAMETER Experiment Name: At_Drought_P Parameter: Tissue Value: Whole Plant
  misc_feature: MA Experiment 20000437 PARAMETER Experiment Name: At_Drought_P Parameter: Treatment Value: Drought vs. No Drought
  misc_feature: MA Experiment ID: 20001247 Result: Up-regulated in Transcription
  misc_feature: MA Experiment 20001247 PARAMETER Experiment Name: At_Far-red-induction_P Parameter: Age (day) Value: 7
  misc_feature: MA Experiment 20001247 PARAMETER Experiment Name: At_Far-red-induction_P Parameter: Light Value: Far-red vs. White
  misc_feature: MA Experiment 20001247 PARAMETER Experiment Name: At_Far-red-induction_P Parameter: Organism Value: A. thaliana
  misc_feature: MA Experiment 20001247 PARAMETER Experiment Name: At_Far-red-induction_P Parameter: Plant Line Value: Columbia
  misc_feature: MA Experiment 20001247 PARAMETER Experiment Name: At_Far-red-induction_P Parameter: Timepoint (hr) Value: 1
  misc_feature: MA Experiment 20001247 PARAMETER Experiment Name: At_Far-red-induction_P Parameter: Tissue Value: Whole Plant
  misc_feature: MA Experiment ID: 20001451 Result: Down-regulated in Transcription
  misc_feature: MA Experiment 20001451 PARAMETER Experiment Name: At_Far-red-induction_P Parameter: Age (day) Value: 7
  misc_feature: MA Experiment 20001451 PARAMETER Experiment Name: At_Far-red-induction_P Parameter: Light Value: Far-red vs. White
  misc_feature: MA Experiment 20001451 PARAMETER Experiment Name: At_Far-red-induction_P Parameter: Organism Value: A. thaliana
  misc_feature: MA Experiment 20001451 PARAMETER Experiment Name: At_Far-red-induction_P Parameter: Plant Line Value: Columbia
  misc_feature: MA Experiment 20001451 PARAMETER Experiment Name: At_Far-red-induction_P Parameter: Timepoint (hr) Value: 24
  misc_feature: MA Experiment 20001451 PARAMETER Experiment Name: At_Far-red-induction_P Parameter: Tissue Value: Whole Plant
  misc_feature: MA Experiment ID: 20001757 Result: Up-regulated in Transcription
  misc_feature: MA Experiment 20001757 PARAMETER Experiment Name: At_50mM_NH4NO3_L-to-H_P Parameter: Timepoint (hr) Value: 6
  misc_feature: MA Experiment 20001757 PARAMETER Experiment Name: At_50mM_NH4NO3_L-to-H_P Parameter: Tissue Value: Leaf
  misc_feature: MA Experiment 20001757 PARAMETER Experiment Name: At_50mM_NH4NO3_L-to-H_P Parameter: Treatment Value: 50mM NH4NO3 vs 100mM Mannitol
  misc_feature: MA Experiment ID: 20001904 Result: Down-regulated in Transcription
  misc_feature: MA Experiment 20001904 PARAMETER Experiment Name: At_Drought_Reproduction_P Parameter: Age (day) Value: 37
  misc_feature: MA Experiment 20001904 PARAMETER Experiment Name: At_Drought_Reproduction_P Parameter: Organism Value: A. thaliana
  misc_feature: MA Experiment 20001904 PARAMETER Experiment Name: At_Drought_Reproduction_P Parameter: Plant Line Value: WS
  misc_feature: MA Experiment 20001904 PARAMETER Experiment Name: At_Drought_Reproduction_P Parameter: Timepoint (day) Value: 7
  misc_feature: MA Experiment 20001904 PARAMETER Experiment Name: At_Drought_Reproduction_P Parameter: Tissue Value: Rosettes
  misc_feature: MA Experiment 20001904 PARAMETER Experiment Name: At_Drought_Reproduction_P Parameter: Treatment Value: Drought vs. No Drought
  misc_feature: MA Experiment ID: 20001905 Result: Down-regulated in Transcription
  misc_feature: MA Experiment 20001905 PARAMETER Experiment Name: At_Drought_Reproduction_P Parameter: Age (day) Value: 40
  misc_feature: MA Experiment 20001905 PARAMETER Experiment Name: At_Drought_Reproduction_P Parameter: Organism Value: A. thaliana
  misc_feature: MA Experiment 20001905 PARAMETER Experiment Name: At_Drought_Reproduction_P Parameter: Plant Line Value: WS
  misc_feature: MA Experiment 20001905 PARAMETER Experiment Name: At_Drought_Reproduction_P Parameter: Timepoint (day) Value: 10
  misc_feature: MA Experiment 20001905 PARAMETER Experiment Name: At_Drought_Reproduction_P Parameter: Tissue Value: Rosettes
  misc_feature: MA Experiment 20001905 PARAMETER Experiment Name: At_Drought_Reproduction_P Parameter: Treatment Value: Drought vs. No Drought
  misc_feature: MA Experiment ID: 20001906 Result: Down-regulated in Transcription
  misc_feature: MA Experiment 20001906 PARAMETER Experiment Name: At_Drought_Reproduction_P Parameter: Age (day) Value: 35
  misc_feature: MA Experiment 20001906 PARAMETER Experiment Name: At_Drought_Reproduction_P Parameter: Organism Value: A. thaliana
  misc_feature: MA Experiment 20001906 PARAMETER Experiment Name: At_Drought_Reproduction_P Parameter: Plant Line Value: WS
  misc_feature: MA Experiment 20001906 PARAMETER Experiment Name: At_Drought_Reproduction_P Parameter: Timepoint (day) Value: 5
  misc_feature: MA Experiment 20001906 PARAMETER Experiment Name: At_Drought_Reproduction_P Parameter: Tissue Value: Siliques
  misc_feature: MA Experiment 20001906 PARAMETER Experiment Name: At_Drought_Reproduction_P Parameter: Treatment Value: Drought vs. No Drought
  misc_feature: MA Experiment ID: 20001911 Result: Down-regulated in Transcription
  misc_feature: MA Experiment 20001911 PARAMETER Experiment Name: At_Drought_Reproduction_P Parameter: Age (day) Value: 40
  misc_feature: MA Experiment 20001911 PARAMETER Experiment Name: At_Drought_Reproduction_P Parameter: Organism Value: A. thaliana
  misc_feature: MA Experiment 20001911 PARAMETER Experiment Name: At_Drought_Reproduction_P Parameter: Plant Line Value: WS
  misc_feature: MA Experiment 20001911 PARAMETER Experiment Name: At_Drought_Reproduction_P Parameter: Timepoint (day) Value: 10
  misc_feature: MA Experiment 20001911 PARAMETER Experiment Name: At_Drought_Reproduction_P Parameter: Tissue Value: Flowers
  misc_feature: MA Experiment 20001911 PARAMETER Experiment Name: At_Drought_Reproduction_P Parameter: Treatment Value: Drought vs. No Drought
aatcaacacacacaaacacacacacacacagcctttttccttcgttgatcgattgttaagctcgatccaatggcggataacaccgataatcggagatccttatggggagttccggagaagcttcagcttcacatagcgatgctgacgttgcaattcggttacgccggattccacgtggtgtctcgagctgctcttaacatgggaatcagcaaactcgtcttccctgtttatcgtaacatcatcgccttgcttcttctccttcccttcgcttacttccttgaaaagaaggagagaccagcgattactctcaactttctcatccagttcttctttttggcactcataggaataacagcgaggctctcggttacgtcttacacttgtttcttcggaatcattcagttcttgatcattgctgctttctgtgaaagagattctcaggcttgggtttttcactccggttgggagcttttcaccatcctctacgccggaatcgtagcgtctggaatcgcgtttgcggttcagatttggtgtattgacagagggggtccagtcttcgttgctgtttaccagcctgttcagactcttgtcgttgcgatcatggcttctattgcgttaggcgaagaattttatttgggcgggattattggagcggtcttgatcatagcgggactttacttcgtattgtacggtaagagcgaagagaggaaatttgcagcgcttgagaaggcagcgatccagtcctccgcggagcatggtattgaacgtgcacctgtttctcgcaactccatcaagtcgtccatcacaacaccactactccatcagtcaacggacaatgtttgactactttggacaaatcactctccagctaataattacaaatgccattacccaattaaaagggaacaatggtgtgccgttgtgttttatgacttttgtgtctgctttttttcttagtgttttctcttcttttttttttctaaaaaattattaattacctaagaaaggtttttgaagaaaggaaaaaaaatggtggatgagacatcattgttcatgaggatgatgatgatgatgatagtgatgaagaagactatgtgggagctttggattgagacttttctatatataatatctggctgatatattagtgccattttttcttacatttcttgtggggtttttctttcctttatcatcaatagaatgttataatttgcat

SEQ ID NO: 74801 - protein, 257 aa, Arabidopsis thaliana
  peptide (1)..(257): Ceres Seq. ID no. 5679773
  misc_feature (96)..(207): Pfam Name: Integral membrane protein DUF6 Pfam Description: Integral membrane protein DUF6
  misc_feature (96)..(257): Homolog of NCBI NO: 18410867 NR Description: nodulin-like protein; protein id: At1g75500.1, by cDNA: gi_15028078, supported by cDNA: gi_20259306 [Arabidopsis >gi|15028079|gb|AAK76570.1| putative nodulin protein nodulin
  misc_feature (1)..(96): Homolog of NCBI NO: 18410867 NR Description: nodulin-like protein; protein id: At1g75500.1, by cDNA: gi_15028078, supported by cDNA: gi_20259306 [Arabidopsis >gi|15028079|gb|AAK76570.1| putative nodulin protein nodulin
  misc_feature (96)..(257): Homolog of NCBI NO: 25404978 NR Description: protein F10A5.28 [imported] - Arabidopsis >gi|9369372|gb|AAF87121.1|AC006434_17 F10A5.28 [Arabidopsis
  misc_feature (96)..(249): Homolog of NCBI NO: 34895316 NR Description: putative nodulin [Oryza sativa (japonica
  misc_feature (16)..(96): Homolog of NCBI NO: 34895316 NR Description: putative nodulin [Oryza sativa (japonica
  misc_feature (96)..(240): Homolog of NCBI NO: 9294076 NR Description: nodulin-like protein [Arabidopsis thaliana]
  misc_feature (96)..(240): Homolog of NCBI NO: 15229596 NR Description: integral membrane protein, putative; protein id:
  misc_feature (14)..(96): Homolog of NCBI NO: 9294076 NR Description: nodulin-like protein [Arabidopsis thaliana]
  misc_feature (14)..(96): Homolog of NCBI NO: 15229596 NR Description: integral membrane protein, putative; protein id:
  misc_feature (96)..(250): Homolog of NCBI NO: 18409794 NR Description: putative protein; protein id: At3g53210.1,
MADNTDNRRSLWGVPEKLQLHIAMLTLQFGYAGFHVVSRAALNMGISKLVFPVYRNIIALLLLLPFAYFLEKKERPAITLNFLIQFFFLALIGITARLSVTSYTCFFGIIQFLIIAAFCERDSQAWVFHSGWELFTILYAGIVASGIAFAVQIWCIDRGGPVFVAVYQPVQTLVVAIMASIALGEEFYLGGIIGAVLIIAGLYFVLYGKSEERKFAALEKAAIQSSAEHGIERAPVSRNSIKSSITTPLLHQSTDNV

SEQ ID NO: 74802 - protein, 234 aa, Arabidopsis thaliana
  peptide (1)..(234): Ceres Seq. ID no. 5679774
  misc_feature (73)..(184): Pfam Name: Integral membrane protein DUF6 Pfam Description: Integral membrane protein DUF6
  misc_feature (73)..(234): Homolog of NCBI NO: 18410867 NR Description: nodulin-like protein; protein id: At1g75500.1, by cDNA: gi_15028078, supported by cDNA: gi_20259306 [Arabidopsis >gi|15028079|gb|AAK76570.1| putative nodulin protein nodulin
  misc_feature (1)..(73): Homolog of NCBI NO: 18410867 NR Description: nodulin-like protein; protein id: At1g75500.1, by cDNA: gi_15028078, supported by cDNA: gi_20259306 [Arabidopsis >gi|15028079|gb|AAK76570.1| putative nodulin protein nodulin
  misc_feature (73)..(234): Homolog of NCBI NO: 25404978 NR Description: protein F10A5.28 [imported] - Arabidopsis >gi|9369372|gb|AAF87121.1|AC006434_17 F10A5.28 [Arabidopsis
  misc_feature (73)..(226): Homolog of NCBI NO: 34895316 NR Description: putative nodulin [Oryza sativa (japonica
  misc_feature (1)..(73): Homolog of NCBI NO: 34895316 NR Description: putative nodulin [Oryza sativa (japonica
  misc_feature (73)..(217): Homolog of NCBI NO: 9294076 NR Description: nodulin-like protein [Arabidopsis thaliana]
  misc_feature (73)..(217): Homolog of NCBI NO: 15229596 NR Description: integral membrane protein, putative; protein id:
  misc_feature (1)..(73): Homolog of NCBI NO: 9294076 NR Description: nodulin-like protein [Arabidopsis thaliana]
  misc_feature (1)..(73): Homolog of NCBI NO: 15229596 NR Description: integral membrane protein, putative; protein id:
  misc_feature (73)..(227): Homolog of NCBI NO: 18409794 NR Description: putative protein; protein id: At3g53210.1,
MLTLQFGYAGFHVVSRAALNMGISKLVFPVYRNIIALLLLLPFAYFLEKKERPAITLNFLIQFFFLALIGITARLSVTSYTCFFGIIQFLIIAAFCERDSQAWVFHSGWELFTILYAGIVASGIAFAVQIWCIDRGGPVFVAVYQPVQTLVVAIMASIALGEEFYLGGIIGAVLIIAGLYFVLYGKSEERKFAALEKAAIQSSAEHGIERAPVSRNSIKSSITTPLLHQSTDNV

SEQ ID NO: 74803 - protein, 214 aa, Arabidopsis thaliana
  peptide (1)..(214): Ceres Seq. ID no. 5679775
  misc_feature (53)..(164): Pfam Name: Integral membrane protein DUF6 Pfam Description: Integral membrane protein DUF6
  misc_feature (53)..(214): Homolog of NCBI NO: 18410867 NR Description: nodulin-like protein; protein id: At1g75500.1, by cDNA: gi_15028078, supported by cDNA: gi_20259306 [Arabidopsis >gi|15028079|gb|AAK76570.1| putative nodulin protein nodulin
  misc_feature (1)..(53): Homolog of NCBI NO: 18410867 NR Description: nodulin-like protein; protein id: At1g75500.1, by cDNA: gi_15028078, supported by cDNA: gi_20259306 [Arabidopsis >gi|15028079|gb|AAK76570.1| putative nodulin protein nodulin
  misc_feature (53)..(214): Homolog of NCBI NO: 25404978 NR Description: protein F10A5.28 [imported] - Arabidopsis >gi|9369372|gb|AAF87121.1|AC006434_17 F10A5.28 [Arabidopsis
  misc_feature (53)..(206): Homolog of NCBI NO: 34895316 NR Description: putative nodulin [Oryza sativa (japonica
  misc_feature (1)..(53): Homolog of NCBI NO: 34895316 NR Description: putative nodulin [Oryza sativa (japonica
  misc_feature (53)..(197): Homolog of NCBI NO: 9294076 NR Description: nodulin-like protein [Arabidopsis thaliana]
  misc_feature (53)..(197): Homolog of NCBI NO: 15229596 NR Description: integral membrane protein, putative; protein id:
  misc_feature (1)..(53): Homolog of NCBI NO: 9294076 NR Description: nodulin-like protein [Arabidopsis thaliana]
  misc_feature (1)..(53): Homolog of NCBI NO: 15229596 NR Description: integral membrane protein, putative; protein id:
  misc_feature (53)..(207): Homolog of NCBI NO: 18409794 NR Description: putative protein; protein id: At3g53210.1,
MGISKLVFPVYRNIIALLLLLPFAYFLEKKERPAITLNFLIQFFFLALIGITARLSVTSYTCFFGIIQFLIIAAFCERDSQAWVFHSGWELFTILYAGIVASGIAFAVQIWCIDRGGPVFVAVYQPVQTLVVAIMASIALGEEFYLGGIIGAVLIIAGLYFVLYGKSEERKFAALEKAAIQSSAEHGIERAPVSRNSIKSSITTPLLHQSTDNV

SEQ ID NO: 74804 - DNA, 764 bp, Arabidopsis thaliana
  misc_feature (1)..(764): Ceres Seq. ID no. 5679791
  misc_feature: MA Experiment ID: 108462 Result: Up-regulated in Transcription
  misc_feature: MA Experiment 108462 PARAMETER Experiment Name: At_Germinating_Seeds_cDNA_P Parameter: Age (day) Value: 2 vs. 0
  misc_feature: MA Experiment 108462 PARAMETER Experiment Name: At_Germinating_Seeds_cDNA_P Parameter: Tissue Value: Germinating Seeds
  misc_feature: MA Experiment ID: 108463 Result: Up-regulated in Transcription
  misc_feature: MA Experiment 108463 PARAMETER Experiment Name: At_Germinating_Seeds_cDNA_P Parameter: Age (day) Value: 3 vs. 0
  misc_feature: MA Experiment 108463 PARAMETER Experiment Name: At_Germinating_Seeds_cDNA_P Parameter: Tissue Value: Germinating Seeds
  misc_feature: MA Experiment ID: 108464 Result: Up-regulated in Transcription
  misc_feature: MA Experiment 108464 PARAMETER Experiment Name: At_Germinating_Seeds_cDNA_P Parameter: Age (day) Value: 4 vs. 0
  misc_feature: MA Experiment 108464 PARAMETER Experiment Name: At_Germinating_Seeds_cDNA_P Parameter: Tissue Value: Germinating Seeds
  misc_feature: MA Experiment ID: 108607 Result: Up-regulated in Transcription
  misc_feature: MA Experiment 108607 PARAMETER Experiment Name: At_100uM_ABA_cDNA_P Parameter: Timepoint (hr) Value: 4
  misc_feature: MA Experiment 108607 PARAMETER Experiment Name: At_100uM_ABA_cDNA_P Parameter: Tissue Value: Aerial
  misc_feature: MA Experiment 108607 PARAMETER Experiment Name: At_100uM_ABA_cDNA_P Parameter: Treatment Value: 100uM ABA vs. No Treatment
  misc_feature: MA Experiment ID: 20000071 Result: Up-regulated in Transcription
  misc_feature: MA Experiment 20000071 PARAMETER Experiment Name: At_100uM_ABA_Mutants_cDNA_P Parameter: Plant Line Value: CS8104
  misc_feature: MA Experiment 20000071 PARAMETER Experiment Name: At_100uM_ABA_Mutants_cDNA_P Parameter: Timepoint (hr) Value: 6
  misc_feature: MA Experiment 20000071 PARAMETER Experiment Name: At_100uM_ABA_Mutants_cDNA_P Parameter: Tissue Value: Aerial
  misc_feature: MA Experiment 20000071 PARAMETER Experiment Name: At_100uM_ABA_Mutants_cDNA_P Parameter: Treatment Value: 100uM ABA vs. No Treatment
  misc_feature: MA Experiment ID: 20000117 Result: Up-regulated in Transcription
  misc_feature: MA Experiment 20000117 PARAMETER Experiment Name: At_100uM_ABA_Mutants_cDNA_P Parameter: Plant Line Value: Columbia
  misc_feature: MA Experiment 20000117 PARAMETER Experiment Name: At_100uM_ABA_Mutants_cDNA_P Parameter: Timepoint (hr) Value: 6
  misc_feature: MA Experiment 20000117 PARAMETER Experiment Name: At_100uM_ABA_Mutants_cDNA_P Parameter: Tissue Value: Aerial
  misc_feature: MA Experiment 20000117 PARAMETER Experiment Name: At_100uM_ABA_Mutants_cDNA_P Parameter: Treatment Value: 100uM ABA vs. No Treatment
  misc_feature: MA Experiment ID: 20000314 Result: Up-regulated in Transcription
  misc_feature: MA Experiment 20000314 PARAMETER Experiment Name: At_14day_Shoots-Roots_Sub_P Parameter: Age (day) Value: 14
  misc_feature: MA Experiment 20000314 PARAMETER Experiment Name: At_14day_Shoots-Roots_Sub_P Parameter: Organism Value: A. thaliana
  misc_feature: MA Experiment 20000314 PARAMETER Experiment Name: At_14day_Shoots-Roots_Sub_P Parameter: Plant Line Value: WS
  misc_feature: MA Experiment 20000314 PARAMETER Experiment Name: At_14day_Shoots-Roots_Sub_P Parameter: Tissue Value: Roots vs. Whole Plant
  misc_feature: MA Experiment ID: 20000355 Result: Down-regulated in Transcription
  misc_feature: MA Experiment 20000355 PARAMETER Experiment Name: At_Siliques_Sub_P Parameter: Age (day) Value: 21
  misc_feature: MA Experiment 20000355 PARAMETER Experiment Name: At_Siliques_Sub_P Parameter: Organism Value: A. thaliana
  misc_feature: MA Experiment 20000355 PARAMETER Experiment Name: At_Siliques_Sub_P Parameter: Plant Line Value: WS
  misc_feature: MA Experiment 20000355 PARAMETER Experiment Name: At_Siliques_Sub_P Parameter: Tissue Value: Less Than 5mm Siliques vs. Whole Plant
  misc_feature: MA Experiment ID: 20000440 Result: Down-regulated in Transcription
  misc_feature: MA Experiment 20000440 PARAMETER Experiment Name: At_Closed-Flower__Sub_P Parameter: Tissue Value: Closed Flower vs. Whole Plant
atagagtttggtaggtcgtattttcaacattttaaactcaatttttatgttgacaataacaaaaaaagaaaatcatatcatatatctcaacatatagagtctaacttttttcgccaaaccaaaagaaagaagaaaccaagaaacaagaaaaatgggtgttcttgatcacgtctctgaatatttcgattgttctcatggaagctccaagagacacaaaagtctacagacggtggatgtgagggttttgatagattgtgaaggatgcgagaggaaagtaaggagagctttagaaggaatgagaggaataagagatgtaaccatcgagccaaatgctcagaaagtgacagtggttgggtacgttgaaccaaacaaagtggtggctcgtatcattcaccgaaccggtaaaagagcagagctatatcctttcgttccttacgacgttgtggctcatccttacgcgtctggtgtttacgataacagagccccgactgggtacgttaggaacaccgagtatgatccacatgtgtcacgtctcgcacgtgctagctccactgaggttcgttatactacggcgtttagcgacgagaacgcctccgcttgtgttgttatgtgatgttttttttttttggtttaatttttttttactgggattattttttgtgtttggatgttgatgtttgtttatgtttccatcacgaatgtatttaagataagaacgagtgaaaaaaatgtaaattgcatggtgatgaattggtggttaaaac

SEQ ID NO: 74805 - protein, 153 aa, Arabidopsis thaliana; identical to SEQ ID NO: 25669
  peptide (1)..(153): Ceres Seq. ID no. 5679792
  misc_feature (28)..(89): Pfam Name: Heavy-metal-associated domain Pfam Description: Heavy-metal-associated domain
  misc_feature (1)..(153): Homolog of NCBI NO: 18418567 NR Description: copper chaperone (CCH)-related; protein id: supported by cDNA: 265. [Arabidopsis thaliana]
  misc_feature (1)..(153): Homolog of NCBI NO: 15233937 NR Description: copper chaperone (CCH)-related; protein id: supported by cDNA: 10238., supported by cDNA: gi_11908067, by cDNA: gi_12642881, supported by cDNA: gi_13265451, supported
  misc_feature (1)..(153): Homolog of NCBI NO: 21536547 NR Description: farnesylated protein (ATFP6) [Arabidopsis

SEQ ID NO: 74806 - protein, 105 aa, Arabidopsis thaliana; identical to SEQ ID NO: 25670
  peptide (1)..(105): Ceres Seq. ID no. 5679793
  misc_feature (1)..(105): Homolog of NCBI NO: 18418567 NR Description: copper chaperone (CCH)-related; protein id: supported by cDNA: 265. [Arabidopsis thaliana]
  misc_feature (1)..(105): Homolog of NCBI NO: 15233937 NR Description: copper chaperone (CCH)-related; protein id: supported by cDNA: 10238., supported by cDNA: gi_11908067, by cDNA: gi_12642881, supported by cDNA: gi_13265451, supported
  misc_feature (1)..(105): Homolog of NCBI NO: 21536547 NR Description: farnesylated protein (ATFP6) [Arabidopsis

SEQ ID NO: 74807 - DNA, 1126 bp, Arabidopsis thaliana
  misc_feature (1)..(1126): Ceres Seq. ID no. 5679801
  misc_feature: MA Experiment ID: 108434 Result: Down-regulated in Transcription
  misc_feature: MA Experiment 108434 PARAMETER Experiment Name: At_Root_Tips_cDNA_P Parameter: Tissue Value: Root Tips
  misc_feature: MA Experiment ID: 108435 Result: Down-regulated in Transcription
  misc_feature: MA Experiment 108435 PARAMETER Experiment Name: At_stm_Mutants_cDNA_P Parameter: Plant Line Value: wt Landsburg vs stm
  misc_feature: MA Experiment 108435 PARAMETER Experiment Name: At_stm_Mutants_cDNA_P Parameter: Tissue Value: Shoot Apical Meristem Region
  misc_feature: MA Experiment ID: 108461 Result: Up-regulated in Transcription
  misc_feature: MA Experiment 108461 PARAMETER Experiment Name: At_Germinating_Seeds_cDNA_P Parameter: Age (day) Value: 1 vs. 0
  misc_feature: MA Experiment 108461 PARAMETER Experiment Name: At_Germinating_Seeds_cDNA_P Parameter: Tissue Value: Germinating Seeds
  misc_feature: MA Experiment ID: 108462 Result: Up-regulated in Transcription
  misc_feature: MA Experiment 108462 PARAMETER Experiment Name: At_Germinating_Seeds_cDNA_P Parameter: Age (day) Value: 2 vs. 0
  misc_feature: MA Experiment 108462 PARAMETER Experiment Name: At_Germinating_Seeds_cDNA_P Parameter: Tissue Value: Germinating Seeds
  misc_feature: MA Experiment ID: 108463 Result: Up-regulated in Transcription
  misc_feature: MA Experiment 108463 PARAMETER Experiment Name: At_Germinating_Seeds_cDNA_P Parameter: Age (day) Value: 3 vs. 0
  misc_feature: MA Experiment 108463 PARAMETER Experiment Name: At_Germinating_Seeds_cDNA_P Parameter: Tissue Value: Germinating Seeds
  misc_feature: MA Experiment ID: 108464 Result: Up-regulated in Transcription
  misc_feature: MA Experiment 108464 PARAMETER Experiment Name: At_Germinating_Seeds_cDNA_P Parameter: Age (day) Value: 4 vs. 0
  misc_feature: MA Experiment 108464 PARAMETER Experiment Name: At_Germinating_Seeds_cDNA_P Parameter: Tissue Value: Germinating Seeds
  misc_feature: MA Experiment ID: 108561 Result: Up-regulated in Transcription
  misc_feature: MA Experiment 108561 PARAMETER Experiment Name: At_100uM_ABA_cDNA_P Parameter: Timepoint (hr) Value: 6
  misc_feature: MA Experiment 108561 PARAMETER Experiment Name: At_100uM_ABA_cDNA_P Parameter: Tissue Value: Aerial
  misc_feature: MA Experiment 108561 PARAMETER Experiment Name: At_100uM_ABA_cDNA_P Parameter: Treatment Value: 100uM ABA vs. No Treatment
  misc_feature: MA Experiment ID: 108594 Result: Down-regulated in Transcription
  misc_feature: MA Experiment 108594 PARAMETER Experiment Name: At_Ler-rhl_Root_cDNA_P Parameter: Plant Line Value: null
  misc_feature: MA Experiment ID: 20000307 Result: Up-regulated in Transcription
  misc_feature: MA Experiment 20000307 PARAMETER Experiment Name: At_Germinating_Seeds_Sub_P Parameter: Age (hr) Value: 24 vs. 0
  misc_feature: MA Experiment 20000307 PARAMETER Experiment Name: At_Germinating_Seeds_Sub_P Parameter: Organism Value: A. thaliana
  misc_feature: MA Experiment 20000307 PARAMETER Experiment Name: At_Germinating_Seeds_Sub_P Parameter: Plant Line Value: WS
  misc_feature: MA Experiment 20000307 PARAMETER Experiment Name: At_Germinating_Seeds_Sub_P Parameter: Tissue Value: Germinating Seeds
  misc_feature: MA Experiment ID: 20000314 Result: Up-regulated in Transcription
  misc_feature: MA Experiment 20000314 PARAMETER Experiment Name: At_14day_Shoots-Roots_Sub_P Parameter: Age (day) Value: 14
  misc_feature: MA Experiment 20000314 PARAMETER Experiment Name: At_14day_Shoots-Roots_Sub_P Parameter: Organism Value: A. thaliana
  misc_feature: MA Experiment 20000314 PARAMETER Experiment Name: At_14day_Shoots-Roots_Sub_P Parameter: Plant Line Value: WS
  misc_feature: MA Experiment 20000314 PARAMETER Experiment Name: At_14day_Shoots-Roots_Sub_P Parameter: Tissue Value: Roots vs. Whole Plant
  misc_feature: MA Experiment ID: 20000352 Result: Up-regulated in Transcription
  misc_feature: MA Experiment 20000352 PARAMETER Experiment Name: At_Drought_Sub_P Parameter: Age (day) Value: 7
  misc_feature: MA Experiment 20000352 PARAMETER Experiment Name: At_Drought_Sub_P Parameter: Organism Value: A. thaliana
  misc_feature: MA Experiment 20000352 PARAMETER Experiment Name: At_Drought_Sub_P Parameter: Plant Line Value: WS
  misc_feature: MA Experiment 20000352 PARAMETER Experiment Name: At_Drought_Sub_P Parameter: Timepoint (hr) Value: 6
  misc_feature: MA Experiment 20000352 PARAMETER Experiment Name: At_Drought_Sub_P Parameter: Tissue Value: Whole Plant
  misc_feature: MA Experiment 20000352 PARAMETER Experiment Name: At_Drought_Sub_P Parameter: Treatment Value: Drought vs. No Drought
  misc_feature: MA Experiment ID: 20000440 Result: Down-regulated in Transcription
  misc_feature: MA Experiment 20000440 PARAMETER Experiment Name: At_Closed-Flower__Sub_P Parameter: Tissue Value: Closed Flower vs. Whole Plant
  misc_feature: MA Experiment ID: 20000634 Result: Down-regulated in Transcription
  misc_feature: MA Experiment 20000634 PARAMETER Experiment Name: At_10percent_PEG_Sub_P Parameter: Age (day) Value: 12
  misc_feature: MA Experiment 20000634 PARAMETER Experiment Name: At_10percent_PEG_Sub_P Parameter: Organism Value: A. thaliana
  misc_feature: MA Experiment 20000634 PARAMETER Experiment Name: At_10percent_PEG_Sub_P Parameter: Plant Line Value: WS
  misc_feature: MA Experiment 20000634 PARAMETER Experiment Name: At_10percent_PEG_Sub_P Parameter: Timepoint (day) Value: 12
  misc_feature: MA Experiment 20000634 PARAMETER Experiment Name: At_10percent_PEG_Sub_P Parameter: Tissue Value: Whole Plant
  misc_feature: MA Experiment 20000634 PARAMETER Experiment Name: At_10percent_PEG_Sub_P Parameter: Treatment Value: 10% PEG vs. No Treatment
aaacatctctcaacaacaacaacaaaacaaaacttgcacaatggtgaactttgttgaggtacaaaaaccattgttgtacggtctgatgaaaatggctggcgtcgttccttacactttagagatcgaaccagggacgaagatcaacttttgggtccctaaggaaaccctaaagaagaattccggtaccggaaaaccaacgaaacccgataaacctaaaaagcctgtcgtcttgttaatccatggtttcgctggcgaaggaatcgtgacgtggcagttccaagtcggtgcattatccaagaaatactcggtctacataccggacctcctctttttcggtggatcctacaccgacaactcggaccggtctccggcgtttcaagccgactgtttggtcaaggggcttcgtatcctcggcgtggataagtttgttcccgtagggtttagctacgggggcatggtggctttcaagatcgctgaagcttacccggacatggttagagcaatcgttgtgtctggttcgattcccacaatgaccgataccattaatgaggcgagcttgaaccggttagggtttagttcttccacggatctcttgttaccgacttctgttacgggacttaaggctctcttcaccattgctgtgcataaacccttgtggttccctaaacgattgttcaaagactacatcgaggtaatgtttaacaacagaaaagaaagagctgaactgttagaggctgttgtggtcagcaacaaggaagcgcaaatccctcatttcccacggaaaatacatttcttgtggggtgaaagtgatcaaatctttgatctcgaattggctagagacatgaaagaacaaataggtgagaacgcaacaatagagagtataaagaaggcaggccatttggtacaattggaaagaccttgtgtttacaataggcgtctcaaaaagtttcttgcatctattcactcggaagataaaattaaaatgctacattaagttctatttgatcctgatatactgtatgtatggatcatttgtgtcgagattgaataattattgggtttgtttttacttgatttgtctttttgtcatttactatgatcacaatatgtaatattaatctttatg

SEQ ID NO: 74808 - protein, 330 aa, Arabidopsis thaliana; identical to SEQ ID NO: 24341
  peptide (1)..(330): Ceres Seq. ID no. 5679802
  misc_feature (101)..(315): Pfam Name: alpha/beta hydrolase fold Pfam Description: alpha/beta hydrolase fold
  misc_feature (14)..(330): Homolog of NCBI NO: 15234460 NR Description: putative protein; protein id: At4g36610.1, by cDNA: 38141. [Arabidopsis thaliana] >gi|25407745|pir||C85432
  misc_feature (14)..(330): Homolog of NCBI NO: 21593332 NR Description: putative hydrolase [Arabidopsis thaliana]
  misc_feature (14)..(324): Homolog of NCBI NO: 18398716 NR Description: expressed protein; protein id: At2g18360.1, by cDNA: gi_13605610 [Arabidopsis thaliana] At2g18360/T30D6.13 [Arabidopsis thaliana]
  misc_feature (14)..(324): Homolog of NCBI NO: 25411863 NR Description: hypothetical protein At2g18360 [imported] -
  misc_feature (58)..(325): Homolog of NCBI NO: 19387256 NR Description: putative hydrolase [Oryza sativa (japonica
  misc_feature (14)..(65): Homolog of NCBI NO: 19387256 NR Description: putative hydrolase [Oryza sativa (japonica
  misc_feature (30)..(317): Homolog of NCBI NO: 18411865 NR Description: hypothetical protein; protein id: At1g78210.1, by cDNA: gi_19699018 [Arabidopsis thaliana] unknown protein [Arabidopsis thaliana]
  misc_feature (13)..(317): Homolog of NCBI NO: 22326938 NR Description: similar to putative hydrolase; protein id: [Arabidopsis thaliana] >gi|29294062|gb|AAO73899.1| hydrolase,
  misc_feature (29)..(317): Homolog of NCBI NO: 30689631 NR Description: hydrolase, alpha/beta fold family [Arabidopsis
  misc_feature (73)..(319): Homolog of NCBI NO: 18420566 NR Description: Expressed protein; protein id: At4g39955.1,

SEQ ID NO: 74809 - protein, 317 aa, Arabidopsis thaliana; identical to SEQ ID NO: 24342
  peptide (1)..(317): Ceres Seq. ID no. 5679803
  misc_feature (88)..(302): Pfam Name: alpha/beta hydrolase fold Pfam Description: alpha/beta hydrolase fold
  misc_feature (1)..(317): Homolog of NCBI NO: 15234460 NR Description: putative protein; protein id: At4g36610.1, by cDNA: 38141. [Arabidopsis thaliana] >gi|25407745|pir||C85432
  misc_feature (1)..(317): Homolog of NCBI NO: 21593332 NR Description: putative hydrolase [Arabidopsis thaliana]
  misc_feature (1)..(311): Homolog of NCBI NO: 18398716 NR Description: expressed protein; protein id: At2g18360.1, by cDNA: gi_13605610 [Arabidopsis thaliana] At2g18360/T30D6.13 [Arabidopsis thaliana]
  misc_feature (1)..(311): Homolog of NCBI NO: 25411863 NR Description: hypothetical protein At2g18360 [imported] -
  misc_feature (45)..(312): Homolog of NCBI NO: 19387256 NR Description: putative hydrolase [Oryza sativa (japonica
  misc_feature (1)..(52): Homolog of NCBI NO: 19387256 NR Description: putative hydrolase [Oryza sativa (japonica
  misc_feature (17)..(304): Homolog of NCBI NO: 18411865 NR Description: hypothetical protein; protein id: At1g78210.1, by cDNA: gi_19699018 [Arabidopsis thaliana] unknown protein [Arabidopsis thaliana]
  misc_feature (1)..(304): Homolog of NCBI NO: 22326938 NR Description: similar to putative hydrolase; protein id: [Arabidopsis thaliana] >gi|29294062|gb|AAO73899.1| hydrolase,
  misc_feature (16)..(304): Homolog of NCBI NO: 30689631 NR Description: hydrolase, alpha/beta fold family [Arabidopsis
  misc_feature (60)..(306): Homolog of NCBI NO: 18420566 NR Description: Expressed protein; protein id: At4g39955.1,

SEQ ID NO: 74810 - protein, 302 aa, Arabidopsis thaliana; identical to SEQ ID NO: 24343
  peptide (1)..(302): Ceres Seq. ID no. 5679804
  misc_feature (73)..(287): Pfam Name: alpha/beta hydrolase fold Pfam Description: alpha/beta hydrolase fold
  misc_feature (1)..(302): Homolog of NCBI NO: 15234460 NR Description: putative protein; protein id: At4g36610.1, by cDNA: 38141. [Arabidopsis thaliana] >gi|25407745|pir||C85432
  misc_feature (1)..(302): Homolog of NCBI NO: 21593332 NR Description: putative hydrolase [Arabidopsis thaliana]
  misc_feature (1)..(296): Homolog of NCBI NO: 18398716 NR Description: expressed protein; protein id: At2g18360.1, by cDNA: gi_13605610 [Arabidopsis thaliana] At2g18360/T30D6.13 [Arabidopsis thaliana]
  misc_feature (1)..(296): Homolog of NCBI NO: 25411863 NR Description: hypothetical protein At2g18360 [imported] -
  misc_feature (30)..(297): Homolog of NCBI NO: 19387256 NR Description: putative hydrolase [Oryza sativa (japonica
  misc_feature (1)..(37): Homolog of NCBI NO: 19387256 NR Description: putative hydrolase [Oryza sativa (japonica
  misc_feature (2)..(289): Homolog of NCBI NO: 18411865 NR Description: hypothetical protein; protein id: At1g78210.1, by cDNA: gi_19699018 [Arabidopsis thaliana] unknown protein [Arabidopsis thaliana]
  misc_feature (1)..(289): Homolog of NCBI NO: 22326938 NR Description: similar to putative hydrolase; protein id: [Arabidopsis thaliana] >gi|29294062|gb|AAO73899.1| hydrolase,
  misc_feature (1)..(289): Homolog of NCBI NO: 30689631 NR Description: hydrolase, alpha/beta fold family [Arabidopsis
  misc_feature (45)..(291): Homolog of NCBI NO: 18420566 NR Description: Expressed protein; protein id: At4g39955.1,

SEQ ID NO: 74811 - DNA, 797 bp, Arabidopsis thaliana
  misc_feature (1)..(797): Ceres Seq. ID no. 5679807
  misc_feature: MA Experiment ID: 108595 Result: Down-regulated in Transcription
  misc_feature: MA Experiment 108595 PARAMETER Experiment Name: At_Ler-pi_Ovule_cDNA_P Parameter: Plant Line Value: null
  misc_feature: MA Experiment ID: 20000224 Result: Down-regulated in Transcription
  misc_feature: MA Experiment ID: 20000495 Result: Down-regulated in Transcription
  misc_feature: MA Experiment 20000495 PARAMETER Experiment Name: At_Guard_Cells_P Parameter: Harvest Date Value: 8/2/2002
  misc_feature: MA Experiment 20000495 PARAMETER Experiment Name: At_Guard_Cells_P Parameter: Organism Value: A. thaliana
  misc_feature: MA Experiment 20000495 PARAMETER Experiment Name: At_Guard_Cells_P Parameter: Tissue Value: Guard Cells vs. Leaves
  misc_feature: MA Experiment ID: 20000794 Result: Up-regulated in Transcription
  misc_feature: MA Experiment 20000794 PARAMETER Experiment Name: At_Petals_P Parameter: Age (day) Value: 23-25 days
  misc_feature: MA Experiment 20000794 PARAMETER Experiment Name: At_Petals_P Parameter: Plant Line Value: WS
  misc_feature: MA Experiment 20000794 PARAMETER Experiment Name: At_Petals_P Parameter: Tissue Value: Petals vs. Whole plant
  misc_feature: Pfam Name: UQ_con Pfam Description: Ubiquitin-conjugating enzyme
attgcaaccatttctctgctgtttcttcgtcgtttagcttcagaggacgacaatccgctgtgtgtgtgggtgtgagtttcttaagagaagtcagaaacaatgattgggttgtttaaagtaaaggaaaagcaaagagaacaagctcaaaatgctactagaggaggagcttctgttaagaagcaatctgctggcgaacttcgtcttcacaaagatatatcagagttgaaccttcctagctcttgttcaatatcttttccaaatggcaaagatgatttgatgaactttgaagtatccattaaacctgatgatggatattaccacaatggtacgtttgtttcacattccaagtctctcctgtgtatccacatgaagctccaaaagttaaatgcaaaaccaaggtttatcatcccaatatcgatttggaaggaaacgtttgcctgaacatcttgcgtgaagattggaaacctgttcttaacattaacacagttatctacggactcttccatctgttcacggaacccaattctgaagatcccttgaaccatgatgctgcagcagttttgagggataacccaaagctctttgagaccaatgttcgcagggccatgaccggtggatatgtcggtcagacctttttcccgcgttgtatctaacaaagctctggtttgtcttcttcaaggaaaaagataagaaccaaaccctttgtccgccattgtatttcttctctttctcaaggaccctcgtttgtttgtttgatcttgtaaaattacattccgcgttaaagtaaccctttcctt

SEQ ID NO: 74812 - protein, 113 aa, Arabidopsis thaliana
  peptide (1)..(113): Ceres Seq. ID no. 5679808
  misc_feature: Pfam Name: UQ_con Pfam Description: Ubiquitin-conjugating enzyme
  misc_feature (1)..(73): Homolog of NCBI NO: 25407764 NR Description: ubiquitin-protein ligase-like protein [imported] -
  misc_feature (1)..(79): Homolog of NCBI NO: 6635457 NR Description: RUB1 conjugating enzyme [Arabidopsis thaliana] AT4g36800/C7A10_560 [Arabidopsis thaliana]
  misc_feature (1)..(79): Homolog of NCBI NO: 37531910 NR Description: putative ubiquitin-conjugating enzyme [Oryza
  misc_feature (1)..(79): Homolog of NCBI NO: 40253382 NR Description: putative RUB1 conjugating enzyme [Oryza sativa
  misc_feature (1)..(78): Homolog of NCBI NO: 32400752 NR Description: RUB1-conjugating enzyme [Triticum aestivum]
  misc_feature (1)..(79): Homolog of NCBI NO: 4507791 NR Description: ubiquitin-conjugating enzyme E2M (UBC12 homolog,
  misc_feature (1)..(79): Homolog of NCBI NO: 30585323 NR Description: Homo sapiens ubiquitin-conjugating enzyme E2M
  misc_feature (1)..(79): Homolog of NCBI NO: 38174699 NR Description: Unknown (protein for MGC:75750) [Silurana
  misc_feature (1)..(113): Homolog of NCBI NO: 18419910 NR Description: RUB1-conjugating enzyme RCE1, putative; protein At4g36800.1, supported by cDNA: gi_20453316, supported by cDNA:
  misc_feature (1)..(83): Homolog of NCBI NO: 31215017 NR Description: ENSANGP00000013586 [Anopheles gambiae]
MIGLFKVKEKQREQAQNATRGGASVKKQSAGELRLHKDISELNLPSSCSISFPNGKDDLMNFEVSIKPDDGYYHNGTFVSHSKSLLCIHMKLQKLNAKPRFIIPISIWKETFA

SEQ ID NO: 74813 - DNA, 1005 bp, Arabidopsis thaliana
  misc_feature (1)..(1005): Ceres Seq. ID no. 5679862
  misc_feature: MA Experiment ID: 108576 Result: Down-regulated in Transcription
  misc_feature: MA Experiment 108576 PARAMETER Experiment Name: At_42deg_Heat_cDNA_P Parameter: Temperature (deg C) Value: 42 vs. 22
  misc_feature: MA Experiment 108576 PARAMETER Experiment Name: At_42deg_Heat_cDNA_P Parameter: Timepoint (hr) Value: 1
  misc_feature: MA Experiment 108576 PARAMETER Experiment Name: At_42deg_Heat_cDNA_P Parameter: Tissue Value: Aerial
  misc_feature: MA Experiment ID: 108577 Result: Down-regulated in Transcription
  misc_feature: MA Experiment 108577 PARAMETER Experiment Name: At_42deg_Heat_cDNA_P Parameter: Temperature (deg C) Value: 42 vs. 22
  misc_feature: MA Experiment 108577 PARAMETER Experiment Name: At_42deg_Heat_cDNA_P Parameter: Timepoint (hr) Value: 6
  misc_feature: MA Experiment 108577 PARAMETER Experiment Name: At_42deg_Heat_cDNA_P Parameter: Tissue Value: Aerial
  misc_feature: MA Experiment ID: 20000111 Result: Down-regulated in Transcription
  misc_feature: MA Experiment 20000111 PARAMETER Experiment Name: At_42deg_Heat_cDNA_P Parameter: Temperature (deg C) Value: 42 vs. 22
  misc_feature: MA Experiment 20000111 PARAMETER Experiment Name: At_42deg_Heat_cDNA_P Parameter: Timepoint (hr) Value: 6
  misc_feature: MA Experiment 20000111 PARAMETER Experiment Name: At_42deg_Heat_cDNA_P Parameter: Tissue Value: Aerial
  misc_feature: MA Experiment ID: 20000112 Result: Down-regulated in Transcription
  misc_feature: MA Experiment 20000112 PARAMETER Experiment Name: At_42deg_Heat_cDNA_P Parameter: Temperature (deg C) Value: 42 vs. 22
  misc_feature: MA Experiment 20000112 PARAMETER Experiment Name: At_42deg_Heat_cDNA_P Parameter: Timepoint (hr) Value: 2
  misc_feature: MA Experiment 20000112 PARAMETER Experiment Name: At_42deg_Heat_cDNA_P Parameter: Tissue Value: Aerial
  misc_feature: MA Experiment ID: 20000113 Result: Down-regulated in Transcription
  misc_feature: MA Experiment 20000113 PARAMETER Experiment Name: At_42deg_Heat_cDNA_P Parameter: Temperature (deg C) Value: 42 vs. 22
  misc_feature: MA Experiment 20000113 PARAMETER Experiment Name: At_42deg_Heat_cDNA_P Parameter: Timepoint (hr) Value: 8
  misc_feature: MA Experiment 20000113 PARAMETER Experiment Name: At_42deg_Heat_cDNA_P Parameter: Tissue Value: Aerial
  misc_feature: MA Experiment ID: 20000224 Result: Down-regulated in Transcription
atgatttgtttgtaattagatcaggggtttaggtctttccattactttttaatgttttttctgttactgtctccgcgatctgattttacgacaatagagtttcgggttttgtcccattccagtttgaaaataaaggtccgtcttttaagtttgctggatcgataaacctgtgaagattgagtctagtcgatttattggatgatccattcttcatcgtttttttcttgcttcgaagttctgtataaccagatttgtctgtgtgcgattgtcattacctagccgtgtatcgagaactagggttttcgagtcaattttgccccttttggttatatctggttcgataacgattcatctggattagggttttaagtgatggctcgtaccaagcaaaccgctcgtaagtccaccggaggtaaagctccaaggaagcaacttgctactaaggctgctcgtaaatctgcaccaactactggtggagtcaagaaaccacatcgttaccgtcctggaactgttgctctccgtgaaatccgtaagtaccagaagagtactgagttgcttatcaggaaactgccatttcagaggctagtccgtgagattgctcaagatttcaagactgatttgcgtttccagagccatgctgtcttagctctccaggaagctgcagaagcatatcttgttggtctctttgaagacactaacctttgtgccattcatgccaagcgtgtgaccataatgcccaaagacattcagctcgctcgtcgtatcagaggtgaacgcgcttaagccaaccaagaatccgagatttggttcaagtagtttttgttttttatgaaagcaagatcttaattgctgtgttttttaaatctctgggtatgtagtagtaagagtagtaagaagtctgcaatctaagaatgttgtgttctttaagcttattattatgtgtgttgcgaactctttttaactcttttgttaaattcttatgttttcttaactcgtttgttcgtc

SEQ ID NO: 74814 - protein, 136 aa, Arabidopsis thaliana; identical to SEQ ID NO: 26403
  peptide (1)..(136): Ceres Seq. ID no. 5679863
  misc_feature (17)..(135): Pfam Name: Core histone H2A/H2B/H3/H4 Pfam Description: Core histone H2A/H2B/H3/H4
  misc_feature (1)..(136): Homolog of NCBI NO: 15236103 NR Description: histone H3.3; protein id: At4g40030.1, supported cDNA: gi_14326561 [Arabidopsis thaliana] Histon H3; protein id: At4g40040.1, supported by cDNA: 2670.
  misc_feature (1)..(136): Homolog of NCBI NO: 18698662 NR Description: disease-resistent-related protein [Oryza sativa]
  misc_feature (1)..(136): Homolog of NCBI NO: 2119013 NR Description: histone H3.2 protein - shrew mouse
  misc_feature (1)..(136): Homolog of NCBI NO: 7305139 NR Description: histone 1, H3f; histone gene complex 1 [Mus
  misc_feature (1)..(136): Homolog of NCBI NO: 30061401 NR Description: histone 2, H3ca1 [Mus musculus]
  misc_feature (1)..(136): Homolog of NCBI NO: 34858254 NR Description: similar to histone protein Hist2h3c1 [Rattus
  misc_feature (1)..(136): Homolog of NCBI NO: 34876364 NR Description: similar to CG31613-PA [Rattus norvegicus]
  misc_feature (1)..(136): Homolog of NCBI NO: 37546835 NR Description: similar to histone protein Hist2h3c1 [Homo
  misc_feature (1)..(136): Homolog of NCBI NO: 34858260 NR Description: similar to histone protein Hist2h3c1 [Rattus
  misc_feature (1)..(136): Homolog of NCBI NO: 4504281 NR Description: H3 histone family, member A [Homo sapiens] H3 histone family, member C [Homo sapiens] H3 histone family, member D [Homo sapiens]

SEQ ID NO: 74815 - DNA, 645 bp, Arabidopsis thaliana
  misc_feature (1)..(645): Ceres Seq. ID no. 5679864
  misc_feature: MA Experiment ID: 108488 Result: Down-regulated in Transcription
  misc_feature: MA Experiment ID: 108576 Result: Down-regulated in Transcription
  misc_feature: MA Experiment 108576 PARAMETER Experiment Name: At_42deg_Heat_cDNA_P Parameter: Temperature (deg C) Value: 42 vs. 22
  misc_feature: MA Experiment 108576 PARAMETER Experiment Name: At_42deg_Heat_cDNA_P Parameter: Timepoint (hr) Value: 1
  misc_feature: MA Experiment 108576 PARAMETER Experiment Name: At_42deg_Heat_cDNA_P Parameter: Tissue Value: Aerial
  misc_feature: MA Experiment ID: 108577 Result: Down-regulated in Transcription
  misc_feature: MA Experiment 108577 PARAMETER Experiment Name: At_42deg_Heat_cDNA_P Parameter: Temperature (deg C) Value: 42 vs. 22
  misc_feature: MA Experiment 108577 PARAMETER Experiment Name: At_42deg_Heat_cDNA_P Parameter: Timepoint (hr) Value: 6
  misc_feature: MA Experiment 108577 PARAMETER Experiment Name: At_42deg_Heat_cDNA_P Parameter: Tissue Value: Aerial
  misc_feature: MA Experiment ID: 20000112 Result: Down-regulated in Transcription
  misc_feature: MA Experiment 20000112 PARAMETER Experiment Name: At_42deg_Heat_cDNA_P Parameter: Temperature (deg C) Value: 42 vs. 22
  misc_feature: MA Experiment 20000112 PARAMETER Experiment Name: At_42deg_Heat_cDNA_P Parameter: Timepoint (hr) Value: 2
  misc_feature: MA Experiment 20000112 PARAMETER Experiment Name: At_42deg_Heat_cDNA_P Parameter: Tissue Value: Aerial
acaaccactacttcaatcatcccctattactgcttttgttacgaaagacaaaaaaacaaaacaaaacaaaagtcagctcaggcgaagaacagatggctcgtaccaagcaaaccgctcgtaagtccaccggaggtaaagctccaaggaagcaacttgctactaaggctgctcgtaaatctgcaccaactactggtggagtcaagaaaccacatcgttaccgtcctggaactgttgctctccgtgaaatccgtaagtaccagaagagtactgagttgcttatcaggaaactgccatttcagaggctagtccgtgagattgctcaagatttcaagactgatttgcgtttccagagccatgctgtcttagctctccaggaagctgcagaagcatatcttgttggtctctttgaagacactaacctttgtgccattcatgccaagcgtgtgaccataatgcccaaagacattcagctcgctcgtcgtatcagaggtgaacgcgcttaagccaaccaagaatccgagatttggttcaagtagtttttgttttttatgaaagcaagatcttaattgctgtgttttttaaatctctgggtatgtagtagtaagagtagtaagaagtctgcaatctaagaatgttgtgttcttt

SEQ ID NO: 74816 - protein, 166 aa, Arabidopsis thaliana
  peptide (1)..(166): Ceres Seq. ID no. 5679865
  misc_feature (47)..(165): Pfam Name: Core histone H2A/H2B/H3/H4 Pfam Description: Core histone H2A/H2B/H3/H4
  misc_feature (31)..(166): Homolog of NCBI NO: 15236103 NR Description: histone H3.3; protein id: At4g40030.1, supported cDNA: gi_14326561 [Arabidopsis thaliana] Histon H3; protein id: At4g40040.1, supported by cDNA: 2670.
  misc_feature (31)..(166): Homolog of NCBI NO: 18698662 NR Description: disease-resistent-related protein [Oryza sativa]
  misc_feature (12)..(166): Homolog of NCBI NO: 34876364 NR Description: similar to CG31613-PA [Rattus norvegicus]
  misc_feature (29)..(166): Homolog of NCBI NO: 34876394 NR Description: similar to histone protein Hist2h3c1 [Rattus
  misc_feature (31)..(166): Homolog of NCBI NO: 2119013 NR Description: histone H3.2 protein - shrew mouse
  misc_feature (31)..(166): Homolog of NCBI NO: 7305139 NR Description: histone 1, H3f; histone gene complex 1 [Mus
  misc_feature (31)..(166): Homolog of NCBI NO: 30061401 NR Description: histone 2, H3ca1 [Mus musculus]
  misc_feature (31)..(166): Homolog of NCBI NO: 34858254 NR Description: similar to histone protein Hist2h3c1 [Rattus
  misc_feature (31)..(166): Homolog of NCBI NO: 34858260 NR Description: similar to histone protein Hist2h3c1 [Rattus
  misc_feature (31)..(166): Homolog of NCBI NO: 37546835 NR Description: similar to histone protein Hist2h3c1 [Homo
NHYFNHPLLLLLLRKTKKQNKTKVSSGEEQMARTKQTARKSTGGKAPRKQLATKAARKSAPTTGGVKKPHRYRPGTVALREIRKYQKSTELLIRKLPFQRLVREIAQDFKTDLRFQSHAVLALQEAAEAYLVGLFEDTNLCAIHAKRVTIMPKDIQLARRIRGERA

SEQ ID NO: 74817 - protein, 136 aa, Arabidopsis thaliana; identical to SEQ ID NO: 26403
  peptide (1)..(136): Ceres Seq. ID no. 5679866
  misc_feature (17)..(135): Pfam Name: Core histone H2A/H2B/H3/H4 Pfam Description: Core histone H2A/H2B/H3/H4
  misc_feature (1)..(136): Homolog of NCBI NO: 15236103 NR Description: histone H3.3; protein id: At4g40030.1, supported cDNA: gi_14326561 [Arabidopsis thaliana] Histon H3; protein id: At4g40040.1, supported by cDNA: 2670.
  misc_feature (1)..(136): Homolog of NCBI NO: 18698662 NR Description: disease-resistent-related protein [Oryza sativa]
  misc_feature (1)..(136): Homolog of NCBI NO: 34876364 NR Description: similar to CG31613-PA [Rattus norvegicus]
  misc_feature (1)..(136): Homolog of NCBI NO: 34876394 NR Description: similar to histone protein Hist2h3c1 [Rattus
  misc_feature (1)..(136): Homolog of NCBI NO: 2119013 NR Description: histone H3.2 protein - shrew mouse
  misc_feature (1)..(136): Homolog of NCBI NO: 7305139 NR Description: histone 1, H3f; histone gene complex 1 [Mus
  misc_feature (1)..(136): Homolog of NCBI NO: 30061401 NR Description: histone 2, H3ca1 [Mus musculus]
  misc_feature (1)..(136): Homolog of NCBI NO: 34858254 NR Description: similar to histone protein Hist2h3c1 [Rattus
  misc_feature (1)..(136): Homolog of NCBI NO: 37546835 NR Description: similar to histone protein Hist2h3c1 [Homo
  misc_feature (1)..(136): Homolog of NCBI NO: 34858260 NR Description: similar to histone protein Hist2h3c1 [Rattus

SEQ ID NO: 74818 - protein, 101 aa, Arabidopsis thaliana
  peptide (1)..(101): Ceres Seq. ID no. 5679867
TTTTSIIPYYCFCYERQKNKTKQKSAQAKNRWLVPSKPLVSPPEVKLQGSNLLLRLLVNLHQLLVESRNHIVTVLELLLSVKSVSTRRVLSCLSGNCHFRG

SEQ ID NO: 74819 - DNA, 1537 bp, Arabidopsis thaliana
  misc_feature (1)..(1537): Ceres Seq. ID no. 5679887
  misc_feature: MA Experiment ID: 108434 Result: Down-regulated in Transcription
  misc_feature: MA Experiment 108434 PARAMETER Experiment Name: At_Root_Tips_cDNA_P Parameter: Tissue Value: Root Tips
  misc_feature: MA Experiment ID: 108573 Result: Up-regulated in Transcription
  misc_feature: MA Experiment 108573 PARAMETER Experiment Name: At_Drought_cDNA_P Parameter: Timepoint (hr) Value: 6
  misc_feature: MA Experiment 108573 PARAMETER Experiment Name: At_Drought_cDNA_P Parameter: Tissue Value: Aerial
  misc_feature: MA Experiment 108573 PARAMETER Experiment Name: At_Drought_cDNA_P Parameter: Treatment Value: Drought vs. No Drought
  misc_feature: MA Experiment ID: 20000224 Result: Down-regulated in Transcription
  misc_feature: MA Experiment ID: 20000227 Result: Down-regulated in Transcription
  misc_feature: MA Experiment 20000227 PARAMETER Experiment Name: At_Root-Tips-vs-Tops_P Parameter: Tissue Value: Root Tips vs. Root Tops
  misc_feature: MA Experiment ID: 20000234 Result: Down-regulated in Transcription
  misc_feature: MA Experiment 20000234 PARAMETER Experiment Name: At_Siliques_P Parameter: Age (day) Value: 21
  misc_feature: MA Experiment 20000234 PARAMETER Experiment Name: At_Siliques_P Parameter: Organism Value: A. thaliana
  misc_feature: MA Experiment 20000234 PARAMETER Experiment Name: At_Siliques_P Parameter: Plant Line Value: WS
  misc_feature: MA Experiment 20000234 PARAMETER Experiment Name: At_Siliques_P Parameter: Tissue Value: Less Than 5mm Siliques vs. Whole Plant
  misc_feature: MA Experiment ID: 20000235 Result: Down-regulated in Transcription
  misc_feature: MA Experiment 20000235 PARAMETER Experiment Name: At_Siliques_P Parameter: Age (day) Value: 21
  misc_feature: MA Experiment 20000235 PARAMETER Experiment Name: At_Siliques_P Parameter: Organism Value: A. thaliana
  misc_feature: MA Experiment 20000235 PARAMETER Experiment Name: At_Siliques_P Parameter: Plant Line Value: WS
  misc_feature: MA Experiment 20000235 PARAMETER Experiment Name: At_Siliques_P Parameter: Tissue Value: 5-10mm Siliques vs. Whole Plant
  misc_feature: MA Experiment ID: 20000264 Result: Down-regulated in Transcription
  misc_feature: MA Experiment 20000264 PARAMETER Experiment Name: At_Open_Flower_P Parameter: Age (day) Value: 21
  misc_feature: MA Experiment 20000264 PARAMETER Experiment Name: At_Open_Flower_P Parameter: Plant Line Value: WS
  misc_feature: MA Experiment 20000264 PARAMETER Experiment Name: At_Open_Flower_P Parameter: Tissue Value: Open Flower vs. Whole Plant
  misc_feature: MA Experiment ID: 20000265 Result: Down-regulated in Transcription
  misc_feature: MA Experiment 20000265 PARAMETER Experiment Name: At_Open_Flower_P Parameter: Age (day) Value: 21
  misc_feature: MA Experiment 20000265 PARAMETER Experiment Name: At_Open_Flower_P Parameter: Plant Line Value: WS
  misc_feature: MA Experiment 20000265 PARAMETER Experiment Name: At_Open_Flower_P Parameter: Tissue Value: Closed Flower vs. Whole Plant
  misc_feature: MA Experiment ID: 20000286 Result: Down-regulated in Transcription
  misc_feature: MA Experiment 20000286 PARAMETER Experiment Name: At_Open_Flower_P Parameter: Age (day) Value: 21
  misc_feature: MA Experiment 20000286 PARAMETER Experiment Name: At_Open_Flower_P Parameter: Plant Line Value: WS
  misc_feature: MA Experiment 20000286 PARAMETER Experiment Name: At_Open_Flower_P Parameter: Tissue Value: Half Open vs. Whole Plant
  misc_feature: MA Experiment ID: 20001560 Result: Down-regulated in Transcription
  misc_feature: MA Experiment 20001560 PARAMETER Experiment Name: At_Drought_Soil_Dry_P Parameter: Age (day) Value: 28
  misc_feature: MA Experiment 20001560 PARAMETER Experiment Name: At_Drought_Soil_Dry_P Parameter: Organism Value: A. thaliana
  misc_feature: MA Experiment 20001560 PARAMETER Experiment Name: At_Drought_Soil_Dry_P Parameter: Plant Line Value: WS
  misc_feature: MA Experiment 20001560 PARAMETER Experiment Name: At_Drought_Soil_Dry_P Parameter: Post Timepoint (hr) Value: None
  misc_feature: MA Experiment 20001560 PARAMETER Experiment Name: At_Drought_Soil_Dry_P Parameter: Post-Treatment Value: None
  misc_feature: MA Experiment 20001560 PARAMETER Experiment Name: At_Drought_Soil_Dry_P Parameter: Timepoint (day) Value: 14
  misc_feature: MA Experiment 20001560 PARAMETER Experiment Name: At_Drought_Soil_Dry_P Parameter: Treatment Value: Drought vs. No Drought
  misc_feature: Pfam Name: Pkinase Pfam Description: Protein kinase domain
ttctctctctctctctcgcttttgagatcatcgaacacaatcgaaacgaagaatcatttgaagaagaagaagatcgtgagaagcttaatgggttggatcccgtgttctgggaaatcgagtgggaggaataagacaaggaggaacggtgaccacaaactcgacaggaagtcttctgattgttctgtgtctacttcagagaaatctagggccaagtcgtccttgagtgaatccaaaagtaaaggctctgatcacattgtggcacaaacgtttacattctctgagttagctactgccactagaaacttcagaaaagaatgtcttataggagaaggaggatttggtagagtttacaaaggatacttggccagcactagccagacagcggctatcaagcaacttgatcataatggtttacaaggaaacagggagttcctcgtcgaggttctcatgttgagtcttcttcatcacccgaatcttgttaacttaataggatattgtgctgatggagatcaaaggcttctagtctacgagtacatgcccctaggttcacttgaagatcatttgcacgacatttcacctggtaagcagccacttgactggaacaccagaatgaaaatagctgccggtgctgcaaaaggtttggagtatctgcatgacaaaaccatgcctccagtgatctatcgagatttgaaatgctcaaatattttgctcgatgatgattactttccaaagctatccgacttcgggttggctaaacttggcccagttggggacaagtctcatgtgtccactcgggttatgggaacatacggatactgtgctcccgagtatgcaatgacaggccagctaacactcaaatcagacgtttacagcttcggtgttgttctgttggagattataactggtcggaaagcaatagacagttcaagatctactggagaacagaatctagtcgcatgggcaaggcctttgtttaaagacaggaggaaattctctcagatggctgatccaatgcttcaaggtcaataccctccgcgagggttataccaagcactcgctgtagcagcgatgtgcgtacaagagcagccaaatcttagacctctcattgctgacgtcgtcactgcactttcttacctcgcctcccaaaagtttgatcctctggctcagccagtccaaggatcccttttcgctccagggactccacctagatcaaagagggtctgaaaataatcccgagaaccgcaatgctgtgtaagttatgtagcttaaacccattccgtgctgtctttcttggagaggaaaggtggatgattttcagactaagtgtgaatgtatggcttaagagctacttgtagatatgtgtaagaagagatagattcatatagaggccggtttataatgttgttataggtgatgttgtttaatgtaatgtttattgagcgcttgctttcaaatgtgacaatttctcattattgtactgaggatgtctgcttcgattccaaagttattgtataaatattaaagtactatagttttc

SEQ ID NO: 74820 - protein, 407 aa, Arabidopsis thaliana
  peptide (1)..(407): Ceres Seq. ID no. 5679888
  misc_feature: Pfam Name: Pkinase Pfam Description: Protein kinase domain
  misc_feature (30)..(406): Homolog of NCBI NO: 11259782 NR Description: protein kinase-like - Arabidopsis thaliana
  misc_feature (30)..(407): Homolog of NCBI NO: 30679773 NR Description: protein kinase family [Arabidopsis thaliana]
  misc_feature (30)..(407): Homolog of NCBI NO: 10445209 NR Description: protein serine/threonine kinase BNK1 [Brassica
  misc_feature (74)..(400): Homolog of NCBI NO: 34394036 NR Description: putative protein serine/threonine kinase BNK1
  misc_feature (29)..(401): Homolog of NCBI NO: 15238886 NR Description: protein kinase -like protein; protein id:
  misc_feature (50)..(401): Homolog of NCBI NO: 34907210 NR Description: putative serine/threonine kinase PBS1 protein
  misc_feature (30)..(401): Homolog of NCBI NO: 34395193 NR Description: putative protein serine/threonine kinase [Oryza
  misc_feature (8)..(405): Homolog of NCBI NO: 7573596 NR Description: protein kinase 1 [Populus nigra]
  misc_feature (30)..(401): Homolog of NCBI NO: 34899302 NR Description: putative protein serine/threonine kinase [Oryza
  misc_feature (71)..(320): Homolog of NCBI NO: 21740745 NR Description: OSJNBa0072K14.10 [Oryza sativa (japonica
FSLSLSLLRSSNTIETKNHLKKKKIVRSLMGWIPCSGKSSGRNKTRRNGDHKLDRKSSDCSVSTSEKSRAKSSLSESKSKGSDHIVAQTFTFSELATATRNFRKECLIGEGGFGRVYKGYLASTSQTAAIKQLDHNGLQGNREFLVEVLMLSLLHHPNLVNLIGYCADGDQRLLVYEYMPLGSLEDHLHDISPGKQPLDWNTRMKIAAGAAKGLEYLHDKTMPPVIYRDLKCSNILLDDDYFPKLSDFGLAKLGPVGDKSHVSTRVMGTYGYCAPEYAMTGQLTLKSDVYSFGVVLLEIITGRKAIDSSRSTGEQNLVAWARPLFKDRRKFSQMADPMLQGQYPPRGLYQALAVAAMCVQEQPNLRPLIADVVTALSYLASQKFDPLAQPVQGSLFAPGTPPRSKRV

SEQ ID NO: 74821 - protein, 378 aa, Arabidopsis thaliana
  peptide (1)..(378): Ceres Seq. ID no. 5679889
  misc_feature: Pfam Name: Pkinase Pfam Description: Protein kinase domain
  misc_feature (1)..(377): Homolog of NCBI NO: 11259782 NR Description: protein kinase-like - Arabidopsis thaliana
  misc_feature (1)..(378): Homolog of NCBI NO: 30679773 NR Description: protein kinase family [Arabidopsis thaliana]
  misc_feature (1)..(378): Homolog of NCBI NO: 10445209 NR Description: protein serine/threonine kinase BNK1 [Brassica
  misc_feature (45)..(371): Homolog of NCBI NO: 34394036 NR Description: putative protein serine/threonine kinase BNK1
  misc_feature (1)..(372): Homolog of NCBI NO: 15238886 NR Description: protein kinase -like protein; protein id:
  misc_feature (21)..(372): Homolog of NCBI NO: 34907210 NR Description: putative serine/threonine kinase PBS1 protein
  misc_feature (1)..(372): Homolog of NCBI NO: 34395193 NR Description: putative protein serine/threonine kinase [Oryza
  misc_feature (1)..(376): Homolog of NCBI NO: 7573596 NR Description: protein kinase 1 [Populus nigra]
  misc_feature (1)..(372): Homolog of NCBI NO: 34899302 NR Description: putative protein serine/threonine kinase [Oryza
  misc_feature (42)..(291): Homolog of NCBI NO: 21740745 NR Description: OSJNBa0072K14.10 [Oryza sativa (japonica
MGWIPCSGKSSGRNKTRRNGDHKLDRKSSDCSVSTSEKSRAKSSLSESKSKGSDHIVAQTFTFSELATATRNFRKECLIGEGGFGRVYKGYLASTSQTAAIKQLDHNGLQGNREFLVEVLMLSLLHHPNLVNLIGYCADGDQRLLVYEYMPLGSLEDHLHDISPGKQPLDWNTRMKIAAGAAKGLEYLHDKTMPPVIYRDLKCSNILLDDDYFPKLSDFGLAKLGPVGDKSHVSTRVMGTYGYCAPEYAMTGQLTLKSDVYSFGVVLLEIITGRKAIDSSRSTGEQNLVAWARPLFKDRRKFSQMADPMLQGQYPPRGLYQALAVAAMCVQEQPNLRPLIADVVTALSYLASQKFDPLAQPVQGSLFAPGTPPRSKRV

SEQ ID NO: 74822 - protein, 258 aa, Arabidopsis thaliana
  peptide (1)..(258): Ceres Seq. ID no. 5679890
  misc_feature: Pfam Name: Pkinase Pfam Description: Protein kinase domain
  misc_feature (1)..(257): Homolog of NCBI NO: 11259782 NR Description: protein kinase-like - Arabidopsis thaliana
  misc_feature (1)..(258): Homolog of NCBI NO: 30679773 NR Description: protein kinase family [Arabidopsis thaliana]
  misc_feature (1)..(258): Homolog of NCBI NO: 10445209 NR Description: protein serine/threonine kinase BNK1 [Brassica
  misc_feature (1)..(251): Homolog of NCBI NO: 34394036 NR Description: putative protein serine/threonine kinase BNK1
  misc_feature (1)..(252): Homolog of NCBI NO: 15238886 NR Description: protein kinase -like protein; protein id:
  misc_feature (1)..(252): Homolog of NCBI NO: 34907210 NR Description: putative serine/threonine kinase PBS1 protein
  misc_feature (1)..(252): Homolog of NCBI NO: 34395193 NR Description: putative protein serine/threonine kinase [Oryza
  misc_feature (1)..(256): Homolog of NCBI NO: 7573596 NR Description: protein kinase 1 [Populus nigra]
  misc_feature (1)..(252): Homolog of NCBI NO: 34899302 NR Description: putative protein serine/threonine kinase [Oryza
  misc_feature (1)..(171): Homolog of NCBI NO: 21740745 NR Description: OSJNBa0072K14.10 [Oryza sativa (japonica
MLSLLHHPNLVNLIGYCADGDQRLLVYEYMPLGSLEDHLHDISPGKQPLDWNTRMKIAAGAAKGLEYLHDKTMPPVIYRDLKCSNILLDDDYFPKLSDFGLAKLGPVGDKSHVSTRVMGTYGYCAPEYAMTGQLTLKSDVYSFGVVLLEIITGRKAIDSSRSTGEQNLVAWARPLFKDRRKFSQMADPMLQGQYPPRGLYQALAVAAMCVQEQPNLRPLIADVVTALSYLASQKFDPLAQPVQGSLFAPGTPPRSKRV
